United States Patent Application Publication US 2026/0327580 A1 - sequence listing, part 4

SEQ ID NO: 4602 - protein, 841 aa, synthetic construct
  REGION 1..841: note = Variant of DNA polymerase I from Thermus sp. strain 2.9
MHHHHHHGGSGVLPVFEPKGRVLLVDGHHLAYRNFFALKGLTTSLGEPVQGVYGFAKSLLKALKEDGDVVIVVFDAKAPSFRHEAYEAYKAGRAPTPEDFPRQLALMKELVDLLGLERLEVPGFEADDVLATLAKKAEREGYEVQILTADRDLFQLLSPRISVLHPEGHRITPEWLWEKYGLRPEQWVDFRALAGDPSDNIPGVKGIGEKTALKLLKEWGSLENLLKNLDQVKPESVREKILAHLEDLKLSRELSRVRTDLPLEVDFGRRREPDWEGLKAFLERLEFGSLLHEFGLLESPLLAEEAPWPPPEGAFLGYRLSRPEPMWAELLALAASAQGRVYRAEDPHGALRGLFEVRGLLAKDLAVVALREGLDLPPTDDPMLLAYLLDPSNTTPEGVARRYGGEWTEDAAKRALLAERLHANLLGRLQGEERLLWLYEEVEKPLSRVLAHMEATGVKLDVAYLENLSLEVAAHMRRLEEEVFRLAGRSFRLNSRDQLERVLFDELGLPPIGKTEKTGKRSTSAAVLEALREVHPIVDKILQYRELAKLKGTYIDRLPALVHPKTGRLHTRFNQTATATGRLSSSDPNLQNIPVRTPLGQKIRRAFVAEEGWRLVALDYRQIELRVLAHLSGDENLIRVFQEGKDIHTQTASWMFGLSAEAIDPLMRRAAKTINFGVLYGMSAFRLSQELGIPYEEAQAFIQKYFQSYPKVKAWIEKTLREGRTRGYVETLFGRRRGVPDLNARVKGKREAAERMAFNMPVQGTAADLMKLAMVRLFPQLREVGARMLLQVHDELLLEAPKERAEEVAALAKEVMEGVWPLAVPLEVEVGIGEDWLAAKG

SEQ ID NO: 4603 - DNA, 2523 bp, synthetic construct
  misc_feature 1..2523: note = Variant of DNA polymerase I from Thermus sp. strain 2.9
  source 1..2523: mol_type = other DNA
atgcaccatcatcatcatcatggcggtagcggcgtgttaccggtgttcgagcctaaaggtcgcgtgcttctggttgatggccatcatctcgcgtatcgtaacttctttgccctgaaaggattaaccaccagcctgggcgagccggtacagggtgtctacggctttgcaaagtcgctcctgaaagctctgaaagaagacggtgatgtggtgattgttgtctttgatgcgaaagcgccaagttttcgccacgaagcgtacgaagcttacaaagccgggcgtgctccaacgccggaagactttcctcgccaattggcgcttatgaaggaattagtggatttgcttggcctcgaacgcttggaagttcccggtttcgaggcagacgacgtattagcgactctcgcaaagaaagccgaacgtgagggctatgaagtccagatcttgacagcagatcgcgatcttttccagcttttatctccgcgcatctcggtgttacacccggaagggcatcgtatcaccccggaatggctctgggagaaatatggtttgcgtcccgaacaatgggtggattttcgcgccttagcaggcgatccgagcgacaatattccgggagttaaaggtatcggcgagaagacggcgctcaagctccttaaagaatgggggtcgttggagaacttgcttaagaatttagatcaggtcaaaccagagtcagtgcgtgagaagattcttgctcacctcgaagacctcaaattaagccgcgaattgtcccgtgtacgcaccgatttgccgctcgaagttgatttcggtcgccgccgcgaacctgactgggagggtcttaaagcgtttttagagcgtcttgaatttggttcgctcttgcatgaattcggccttttagaaagcccgttactggccgaagaagcaccttggccaccgcccgagggcgcgtttttaggttaccgtttgagtcgcccggaaccgatgtgggccgaattactggctcttgcagcgtctgcccagggacgtgtgtatcgcgcggaagaccctcatggtgcgctccgcggcctcttcgaagtccgtggactccttgccaaagacttagctgttgttgcattgcgcgaaggtcttgatttacctccgactgatgatccaatgcttcttgcgtacctcttggacccgtcaaacacgacgcccgaaggcgtagcccgtcgttacggcggcgagtggaccgaagatgcagcgaaacgcgcgttattggccgaacgtttgcacgccaatttattaggacgtttgcaaggcgaggaacgtctcctctggctttacgaagaagtggagaaaccattgagtcgcgtgctcgcgcatatggaagctaccggtgtcaaattagacgtggcgtatttggagaatctcagccttgaagttgctgcccacatgcgccgcttggaggaagaagtattccgtttagcaggccgttcctttcgccttaactctcgcgatcagttagaacgtgtgttgttcgatgaacttggtctccctcctatcggcaagacagagaagaccggtaaacgtagcacttcagcggcggttttagaagctcttcgcgaagtccatcccattgtggacaagatcttgcagtaccgcgaactcgcgaaattgaaaggcacctatattgaccgtcttccggcattagtccacccgaaaacgggacgcctccatacccgcttcaaccaaacagccacggcgaccggtcgtttgtcctcctctgatccaaaccttcagaatattccagtacgtaccccattgggccagaagatccgccgtgcgtttgtagctgaggagggttggcgtttagtggccctcgattatcgtcaaattgaattacgtgtccttgcccatctttctggcgatgagaacctcatccgcgtgtttcaggaaggcaaagacattcacactcaaacggcaagctggatgtttggattatcagctgaagcgatcgatcctttgatgcgtcgtgcagcgaagaccatcaatttcggtgttctctacggtatgagtgcctttcgtttgtcgcaggaattaggcattccctatgaacaggctcaggcgttcattcagaaatactttcaaagctatcccaaagttaaagcatggatcgagaagactctccgtgaaggccgcacacgtggttacgtagagaccttatttggacgtcgccgctatgttcccgatttaaacgctcgcgtgaaaggcaagcgtgaagccgccgaacgcatggcgttcaacatgcctgtacagggcacggcagctgacctcatgaaacttgcaatggtgcgcctttttccacaattgcgtgaagttggtgcccgcatgctcttgcaggtccacgatgaactcttgttagaagcgccaaaagagcgtgcggaagaggtggcagccctcgcgaaagaagttatggaaggcgtgtggcccttagcggtgcctcttgaagtcgaagttggtattggcgaggattggctggctgccaaagga

SEQ ID NO: 4604 - protein, 841 aa, synthetic construct
  REGION 1..841: note = Variant of DNA polymerase I from Thermus sp. strain 2.9
MHHHHHHGGSGVLPVFEPKGRVLLVDGHHLAYRNFFALKGLTTSLGEPVQGVYGFAKSLLKALKEDGDVVIVVFDAKAPSFRHEAYEAYKAGRAPTPEDFPRQLALMKELVDLLGLERLEVPGFEADDVLATLAKKAEREGYEVQILTADRDLFQLLSPRISVLHPEGHRITPEWLWEKYGLRPEQWVDFRALAGDPSDNIPGVKGIGEKTALKLLKEWGSLENLLKNLDQVKPESVREKILAHLEDLKLSRELSRVRTDLPLEVDFGRRREPDWEGLKAFLERLEFGSLLHEFGLLESPLLAEEAPWPPPEGAFLGYRLSRPEPMWAELLALAASAQGRVYRAEDPHGALRGLFEVRGLLAKDLAVVALREGLDLPPTDDPMLLAYLLDPSNTTPEGVARRYGGEWTEDAAKRALLAERLHANLLGRLQGEERLLWLYEEVEKPLSRVLAHMEATGVKLDVAYLENLSLEVAAHMRRLEEEVFRLAGRSFRLNSRDQLERVLFDELGLPPIGKTEKTGKRSTSAAVLEALREVHPIVDKILQYRELAKLKGTYIDRLPALVHPKTGRLHTRFNQTATATGRLSSSDPNLQNIPVRTPLGQKIRRAFVAEEGWRLVALDYRQIELRVLAHLSGDENLIRVFQEGKDIHTQTASWMFGLSAEAIDPLMRRAAKTINFGVLYGMSAFRLSQELGIPYEQAQAFIQKYFQSYPKVKAWIEKTLREGRTRGYVETLFGRRRYVPDLNARVKGKREAAERMAFNMPVQGTAADLMKLAMVRLFPQLREVGARMLLQVHDELLLEAPKERAEEVAALAKEVMEGVWPLAVPLEVEVGIGEDWLAAKG

SEQ ID NO: 4605 - DNA, 2523 bp, synthetic construct
  misc_feature 1..2523: note = Variant of DNA polymerase I from Thermus sp. strain 2.9
  source 1..2523: mol_type = other DNA
atgcaccatcatcatcatcatggcggtagcggcgtgttaccggtgttcgagcctaaaggtcgcgtgcttctggttgatggccatcatctcgcgtatcgtaacttctttgccctgaaaggattaaccaccagcctgggcgagccggtacagggtgtctacggctttgcaaagtcgctcctgaaagctctgaaagaagacggtgatgtggtgattgttgtctttgatgcgaaagcgccaagttttcgccacgaagcgtacgaagcttacaaagccgggcgtgctccaacgccggaagactttcctcgccaattggcgcttatgaaggaattagtggatttgcttggcctcgaacgcttggaagttcccggtttcgaggcagacgacgtattagcgactctcgcaaagaaagccgaacgtgagggctatgaagtccagatcttgacagcagatcgcgatcttttccagcttttatctccgcgcatctcggtgttacacccggaagggcatcgtatcaccccggaatggctctgggagaaatatggtttgcgtcccgaacaatgggtggattttcgcgccttagcaggcgatccgagcgacaatattccgggagttaaaggtatcggcgagaagacggcgctcaagctccttaaagaatgggggtcgttggagaacttgcttaagaatttagatcaggtcaaaccagagtcagtgcgtgagaagattcttgctcacctcgaagacctcaaattaagccgcgaattgtcccgtgtacgcaccgatttgccgctcgaagttgatttcggtcgccgccgcgaacctgactgggagggtcttaaagcgtttttagagcgtcttgaatttggttcgctcttgcatgaattcggccttttagaaagcccgttactggccgaagaagcaccttggccaccgcccgagggcgcgtttttaggttaccgtttgagtcgcccggaaccgatgtgggccgaattactggctcttgcagcgtctgcccagggacgtgtgtatcgcgcggaagaccctcatggtgcgctccgcggcctcttcgaagtccgtggactccttgccaaagacttagctgttgttgcattgcgcgaaggtcttgatttacctccgactgatgatccaatgcttcttgcgtacctcttggacccgtcaaacacgacgcccgaaggcgtagcccgtcgttacggcggcgagtggaccgaagatgcagcgaaacgcgcgttattggccgaacgtttgcacgccaatttattaggacgtttgcaaggcgaggaacgtctcctctggctttacgaagaagtggagaaaccattgagtcgcgtgctcgcgcatatggaagctaccggtgtcaaattagacgtggcgtatttggagaatctcagccttgaagttgctgcccacatgcgccgcttggaggaagaagtattccgtttagcaggccgttcctttcgccttaactctcgcgatcagttagaacgtgtgttgttcgatgaacttggtctccctcctatcggcaagacagagaagaccggtaaacgtagcacttcagcggcggttttagaagctcttcgcgaagtccatcccattgtggacaagatcttgcagtaccgcgaactcgcgaaattgaaaggcacctatattgaccgtcttccggcattagtccacccgaaaacgggacgcctccatacccgcttcaaccaaacagccacggcgaccggtcgtttgtcctcctctgatccaaaccttcagaatattccagtacgtaccccattgggccagaagatccgccgtgcgtttgtagctgaggagggttggcgtttagtggccctcgattatcgtcaaattgaattacgtgtccttgcccatctttctggcgatgagaacctcatccgcgtgtttcaggaaggcaaagacattcacactcaaacggcaagctggatgtttggattatcagctgaagcgatcgatcctttgatgcgtcgtgcagcgaagaccatcaatttcggtgttctctacggtatgagtgcctttcgtttgtcgcaggaattaggcattccctatgaagaagctcaggcgttcattcagaaatactttcaaagctatcccaaagttaaagcatggatcgagaagactctccgtgaaggccgcacacgtggttacgtagagaccttatttggacgtcgccgctatgttcccgatttaaacgctcgcgtgaaaggcaagcgtgaagccgccgaacgcatggcgttcaacatgcctgtacagggcacggcagctgacctcatgaaacttgcaatggtgcgcctttttccacaattgcgtgaagttggtgcccgcatgctcttgcaggtccacgatgaactcttgttagaagcgccaaaagagcgtgcggaagaggtggcagccctcgcgaaagaagttatggaaggcgtgtggcccttagcggtgagtcttgaagtcgaagttggtattggcgaggattggctggctgccaaagga

SEQ ID NO: 4606 - protein, 841 aa, synthetic construct
  REGION 1..841: note = Variant of DNA polymerase I from Thermus sp. strain 2.9
MHHHHHHGGSGVLPVFEPKGRVLLVDGHHLAYRNFFALKGLTTSLGEPVQGVYGFAKSLLKALKEDGDVVIVVFDAKAPSFRHEAYEAYKAGRAPTPEDFPRQLALMKELVDLLGLERLEVPGFEADDVLATLAKKAEREGYEVQILTADRDLFQLLSPRISVLHPEGHRITPEWLWEKYGLRPEQWVDFRALAGDPSDNIPGVKGIGEKTALKLLKEWGSLENLLKNLDQVKPESVREKILAHLEDLKLSRELSRVRTDLPLEVDFGRRREPDWEGLKAFLERLEFGSLLHEFGLLESPLLAEEAPWPPPEGAFLGYRLSRPEPMWAELLALAASAQGRVYRAEDPHGALRGLFEVRGLLAKDLAVVALREGLDLPPTDDPMLLAYLLDPSNTTPEGVARRYGGEWTEDAAKRALLAERLHANLLGRLQGEERLLWLYEEVEKPLSRVLAHMEATGVKLDVAYLENLSLEVAAHMRRLEEEVFRLAGRSFRLNSRDQLERVLFDELGLPPIGKTEKTGKRSTSAAVLEALREVHPIVDKILQYRELAKLKGTYIDRLPALVHPKTGRLHTRFNQTATATGRLSSSDPNLQNIPVRTPLGQKIRRAFVAEEGWRLVALDYRQIELRVLAHLSGDENLIRVFQEGKDIHTQTASWMFGLSAEAIDPLMRRAAKTINFGVLYGMSAFRLSQELGIPYEEAQAFIQKYFQSYPKVKAWIEKTLREGRTRGYVETLFGRRRYVPDLNARVKGKREAAERMAFNMPVQGTAADLMKLAMVRLFPQLREVGARMLLQVHDELLLEAPKERAEEVAALAKEVMEGVWPLAVSLEVEVGIGEDWLAAKG

SEQ ID NO: 4607 - DNA, 2523 bp, synthetic construct
  misc_feature 1..2523: note = Variant of DNA polymerase I from Thermus sp. strain 2.9
  source 1..2523: mol_type = other DNA
atgcaccatcatcatcatcatggcggtagcggcgtgttaccggtgttcgagcctaaaggtcgcgtgcttctggttgatggccatcatctcgcgtatcgtaacttctttgccctgaaaggattaaccaccagcctgggcgagccggtacagggtgtctacggctttgcaaagtcgctcctgaaagctctgaaagaagacggtgatgtggtgattgttgtctttgatgcgaaagcgccaagttttcgccacgaagcgtacgaagcttacaaagccgggcgtgctccaacgccggaagactttcctcgccaattggcgcttatgaaggaattagtggatttgcttggcctcgaacgcttggaagttcccggtttcgaggcagacgacgtattagcgactctcgcaaagaaagccgaacgtgagggctatgaagtccagatcttgacagcagatcgcgatcttttccagcttttatctccgcgcatctcggtgttacacccggaagggcatcgtatcaccccggaatggctctgggagaaatatggtttgcgtcccgaacaatgggtggattttcgcgccttagcaggcgatccgagcgacaatattccgggagttaaaggtatcggcgagaagacggcgctcaagctccttaaagaatgggggtcgttggagaacttgcttaagaatttagatcaggtcaaaccagagtcagtgcgtgagaagattcttgctcacctcgaagacctcaaattaagccgcgaattgtcccgtgtacgcaccgatttgccgctcgaagttgatttcggtcgccgccgcgaacctgactgggagggtcttaaagcgtttttagagcgtcttgaatttggttcgctcttgcatgaattcggccttttagaaagcccgttactggccgaagaagcaccttggccaccgcccgagggcgcgtttttaggttaccgtttgagtcgcccggaaccgatgtgggccgaattactggctcttgcagcgtctgcccagggacgtgtgtatcgcgcggaagaccctcatggtgcgctccgcggcctcttcgaagtccgtggactccttgccaaagacttagctgttgttgcattgcgcgaaggtcttgatttacctccgactgatgatccaatgcttcttgcgtacctcttggacccgtcaaacacgacgcccgaaggcgtagcccgtcgttacggcggcgagtggaccgaagatgcagcgaaacgcgcgttattggccgaacgtttgcacgccaatttattaggacgtttgcaaggcgaggaacgtctcctctggctttacgaagaagtggagaaaccattgagtcgcgtgctcgcgcatatggaagctaccggtgtcaaattagacgtggcgtatttggagaatctcagccttgaagttgctgcccacatgcgccgcttggaggaagaagtattccgtttagcaggccgttcctttcgccttaactctcgcgatcagttagaacgtgtgttgttcgatgaacttggtctccctcctatcggcaagacagagaagaccggtaaacgtagcacttcagcggcggttttagaagctcttcgcgaagtccatcccattgtggacaagatcttgcagtaccgcgaactcgcgaaattgaaaggcacctatattgaccgtcttccggcattagtccacccgaaaacgggacgcctccatacccgcttcaaccaaacagccacggcgaccggtcgtttgtcctcctctgatccaaaccttcagaatattccagtacgtaccccattgggccagaagatccgccgtgcgtttgtagctgaggagggttggcgtttagtggccctcgattatcgtcaaattgaattacgtgtccttgcccatctttctggcgatgagaacctcatccgcgtgtttcaggaaggcaaagacattcacactcaaacggcaagctggatgtttggattatcagctgaagcgatcgatcctttgatgcgtcgtgcagcgaagaccatcaatttcggtgttctctacggtatgagtgcctttcgtttgtcgcaggaattaggcattccctatgaagaagctcaggcgttcattcagaaatactttcaaagctatcccaaagttaaagcatggatcgagaagactctccgtgaaggccgcacacgtggttacgtagagaccttatttggacgtcgccgctatgttcccgatttaaacgctcgcgtgaaaggcaagcgtgaagccgccgaacgcatggcgttcaacatgcctgtacagggcacggcagctgacctcatgaaacttgcaatggtgcgcctttttccacaattgcgtgaagttggtgcccgcatgctcttgcaggtccacgatgaactcttgttagaagcgccaaaagagcgtgcggaagaggtggcagccctcgcgaaagaagttatggaaggcgtgtggcccttagcggtgcctcttgttgtcgaagttggtattggcgaggattggctggctgccaaagga

SEQ ID NO: 4608 - protein, 841 aa, synthetic construct
  REGION 1..841: note = Variant of DNA polymerase I from Thermus sp. strain 2.9
MHHHHHHGGSGVLPVFEPKGRVLLVDGHHLAYRNFFALKGLTTSLGEPVQGVYGFAKSLLKALKEDGDVVIVVFDAKAPSFRHEAYEAYKAGRAPTPEDFPRQLALMKELVDLLGLERLEVPGFEADDVLATLAKKAEREGYEVQILTADRDLFQLLSPRISVLHPEGHRITPEWLWEKYGLRPEQWVDFRALAGDPSDNIPGVKGIGEKTALKLLKEWGSLENLLKNLDQVKPESVREKILAHLEDLKLSRELSRVRTDLPLEVDFGRRREPDWEGLKAFLERLEFGSLLHEFGLLESPLLAEEAPWPPPEGAFLGYRLSRPEPMWAELLALAASAQGRVYRAEDPHGALRGLFEVRGLLAKDLAVVALREGLDLPPTDDPMLLAYLLDPSNTTPEGVARRYGGEWTEDAAKRALLAERLHANLLGRLQGEERLLWLYEEVEKPLSRVLAHMEATGVKLDVAYLENLSLEVAAHMRRLEEEVFRLAGRSFRLNSRDQLERVLFDELGLPPIGKTEKTGKRSTSAAVLEALREVHPIVDKILQYRELAKLKGTYIDRLPALVHPKTGRLHTRFNQTATATGRLSSSDPNLQNIPVRTPLGQKIRRAFVAEEGWRLVALDYRQIELRVLAHLSGDENLIRVFQEGKDIHTQTASWMFGLSAEAIDPLMRRAAKTINFGVLYGMSAFRLSQELGIPYEEAQAFIQKYFQSYPKVKAWIEKTLREGRTRGYVETLFGRRRYVPDLNARVKGKREAAERMAFNMPVQGTAADLMKLAMVRLFPQLREVGARMLLQVHDELLLEAPKERAEEVAALAKEVMEGVWPLAVPLVVEVGIGEDWLAAKG

SEQ ID NO: 4609 - DNA, 2523 bp, synthetic construct
  misc_feature 1..2523: note = Variant of DNA polymerase I from Thermus sp. strain 2.9
  source 1..2523: mol_type = other DNA
atgcaccatcatcatcatcatggcggtagcggcgtgttaccggtgttcgagcctaaaggtcgcgtgcttctggttgatggccatcatctcgcgtatcgtaacttctttgccctgaaaggattaaccaccagcctgggcgagccggtacagggtgtctacggctttgcaaagtcgctcctgaaagctctgaaagaagacggtgatgtggtgattgttgtctttgatgcgaaagcgccaagttttcgccacgaagcgtacgaagcttacaaagccgggcgtgctccaacgccggaagactttcctcgccaattggcgcttatgaaggaattagtggatttgcttggcctcgaacgcttggaagttcccggtttcgaggcagacgacgtattagcgactctcgcaaagaaagccgaacgtgagggctatgaagtccagatcttgacagcagatcgcgatcttttccagcttttatctccgcgcatctcggtgttacacccggaagggcatcgtatcaccccggaatggctctgggagaaatatggtttgcgtcccgaacaatgggtggattttcgcgccttagcaggcgatccgagcgacaatattccgggagttaaaggtatcggcgagaagacggcgctcaagctccttaaagaatgggggtcgttggagaacttgcttaagaatttagatcaggtcaaaccagagtcagtgcgtgagaagattcttgctcacctcgaagacctcaaattaagccgcgaattgtcccgtgtacgcaccgatttgccgctcgaagttgatttcggtcgccgccgcgaacctgactgggagggtcttaaagcgtttttagagcgtcttgaatttggttcgctcttgcatgaattcggccttttagaaagcccgttactggccgaagaagcaccttggccaccgcccgagggcgcgtttttaggttaccgtttgagtcgcccggaaccgatgtgggccgaattactggctcttgcagcgtctgcccagggacgtgtgtatcgcgcggaagaccctcatggtgcgctccgcggcctcttcgaagtccgtggactccttgccaaagacttagctgttgttgcattgcgcgaaggtcttgatttacctccgactgatgatccaatgcttcttgcgtacctcttggacccgtcaaacacgacgcccgaaggcgtagcccgtcgttacggcggcgagtggaccgaagatgcagcgaaacgcgcgttattggccgaacgtttgcacgccaatttattaggacgtttgcaaggcgaggaacgtctcctctggctttacgaagaagtggagaaaccattgagtcgcgtgctcgcgcatatggaagctaccggtgtcaaattagacgtggcgtatttggagaatctcagccttgaagttgctaggcacatgcgccgcttggaggaagaagtattccgtttagcaggccgttcctttcgccttaactctcgcgatcagttagaacgtgtgttgttcgatgaacttggtctccctcctatcggcaagacagagaagaccggtaaacgtagcacttcagcggcggttttagaagctcttcgcgaagtccatcccattgtggacaagatcttgcagtaccgcgaactcgcgaaattgaaaggcacctatattgaccgtcttccggcattagtccacccgaaaacgggacgcctccatacccgcttcaaccaaacagccacggcgaccggtcgtttgtcctcctctgatccaaaccttcagaatattccagtacgtaccccattgggccagaagatccgccgtgcgtttgtagctgaggagggttggcgtttagtggccctcgattatcgtcaaattgaattacgtgtccttgcccatctttctggcgatgagaacctcatccgcgtgtttcaggaaggcaaagacattcacactcaaacggcaagctggatgtttggattatcagctgaagcgatcgatcctttgatgcgtcgtgcagcgaagaccatcaatttcggtgttctctacggtatgagtgcctttcgtttgtcgcaggaattaggcattccctatgaagaagctcaggcgttcattcagaaatactttcaaagctatcccaaagttaaagcatggatcgagaagactctccgtgaaggccgcacacgtggttacgtagagaccttatttggacgtcgccgctatgttcccgatttaaacgctcgcgtgaaaggcaagcgtgaagccgccgaacgcatggcgttcaacatgcctgtacagggcacggcagctgacctcatgaaacttgcaatggtgcgcctttttccacaattgcgtgaagttggtgcccgcatgctcttgcaggtccacgatgaactcttgttagaagcgccaaaagagcgtgcggaagaggtggcagccctcgcgaaagaagttatggaaggcgtgtggcccttagcggtgcctcttgaagtcgaagttggtattggcgaggattggctggctgccaaagga

SEQ ID NO: 4610 - protein, 841 aa, synthetic construct
  REGION 1..841: note = Variant of DNA polymerase I from Thermus sp. strain 2.9
MHHHHHHGGSGVLPVFEPKGRVLLVDGHHLAYRNFFALKGLTTSLGEPVQGVYGFAKSLLKALKEDGDVVIVVFDAKAPSFRHEAYEAYKAGRAPTPEDFPRQLALMKELVDLLGLERLEVPGFEADDVLATLAKKAEREGYEVQILTADRDLFQLLSPRISVLHPEGHRITPEWLWEKYGLRPEQWVDFRALAGDPSDNIPGVKGIGEKTALKLLKEWGSLENLLKNLDQVKPESVREKILAHLEDLKLSRELSRVRTDLPLEVDFGRRREPDWEGLKAFLERLEFGSLLHEFGLLESPLLAEEAPWPPPEGAFLGYRLSRPEPMWAELLALAASAQGRVYRAEDPHGALRGLFEVRGLLAKDLAVVALREGLDLPPTDDPMLLAYLLDPSNTTPEGVARRYGGEWTEDAAKRALLAERLHANLLGRLQGEERLLWLYEEVEKPLSRVLAHMEATGVKLDVAYLENLSLEVARHMRRLEEEVFRLAGRSFRLNSRDQLERVLFDELGLPPIGKTEKTGKRSTSAAVLEALREVHPIVDKILQYRELAKLKGTYIDRLPALVHPKTGRLHTRFNQTATATGRLSSSDPNLQNIPVRTPLGQKIRRAFVAEEGWRLVALDYRQIELRVLAHLSGDENLIRVFQEGKDIHTQTASWMFGLSAEAIDPLMRRAAKTINFGVLYGMSAFRLSQELGIPYEEAQAFIQKYFQSYPKVKAWIEKTLREGRTRGYVETLFGRRRYVPDLNARVKGKREAAERMAFNMPVQGTAADLMKLAMVRLFPQLREVGARMLLQVHDELLLEAPKERAEEVAALAKEVMEGVWPLAVPLEVEVGIGEDWLAAKG

SEQ ID NO: 4611 - DNA, 2523 bp, synthetic construct
  misc_feature 1..2523: note = Variant of DNA polymerase I from Thermus sp. strain 2.9
  source 1..2523: mol_type = other DNA
atgcaccatcatcatcatcatggcggtagcggcgtgttaccggtgttcgagcctaaaggtcgcgtgcttctggttgatggccatcatctcgcgtatcgtaacttctttgccctgaaaggattaaccaccagcctgggcgagccggtacagggtgtctacggctttgcaaagtcgctcctgaaagctctgaaagaagacggtgatgtggtgattgttgtctttgatgcgaaagcgccaagttttcgccacgaagcgtacgaagcttacaaagccgggcgtgctccaacgccggaagactttcctcgccaattggcgcttatgaaggaattagtggatttgcttggcctcgaacgcttggaagttcccggtttcgaggcagacgacgtattagcgactctcgcaaagaaagccgaacgtgagggctatgaagtccagatcttgacagcagatcgcgatcttttccagcttttatctccgcgcatctcggtgttacacccggaagggcatcgtatcaccccggaatggctctgggagaaatatggtttgcgtcccgaacaatgggtggattttcgcgccttagcaggcgatccgagcgacaatattccgggagttaaaggtatcggcgagaagacggcgctcaagctccttaaagaatgggggtcgttggagaacttgcttaagaatttagatcaggtcaaaccagagtcagtgcgtgagaagattcttgctcacctcgaagacctcaaattaagccgcgaattgtcccgtgtacgcaccgatttgccgctcgaagttgatttcggtcgccgccgcgaacctgactgggagggtcttaaagcgtttttagagcgtcttgaatttggttcgctcttgcatgaattcggccttttagaaagcccgttactggccgaagaagcaccttggccaccgcccgagggcgcgtttttaggttaccgtttgagtcgcccggaaccgatgtgggccgaattactggctcttgcagcgtctgcccagggacgtgtgtatcgcgcggaagaccctcatggtgcgctccgcggcctcttcgaagtccgtggactccttgccaaagacttagctgttgttgcattgcgcgaaggtcttgatttacctccgactgatgatccaatgcttcttgcgtacctcttggacccgtcaaacacgacgcccgaaggcgtagcccgtcgttacggcggcgagtggaccgaagatgcagcgaaacgcgcgttattggccgaacgtttgcacgccaatttattaggacgtttgcaaggcgaggaacgtctcctctggctttacgaagaagtggagaaaccattgagtcgcgtgctcgcgcatatggaagctaccggtgtcaaattagacgtggcgtatttggagaatctcagccttgaagttgctgcccacatgcgccgcttggaggaagaagtattccgtttagcaggccgttcctttcgccttaactctcgcgatcagttagaacgtgtgttgttcgatgaacttggtctccctcctatcggcaagacagagaagaccggtaaacgtagcacttcagcggcggttttagaagctcttcgcgaagtccatcccattgtggacaagatcttgcagtaccgcgaactcgcgaaattgaaaggcacctatattgaccgtcttccggcattagtccacccgaaaacgggacgcctccatacccgcttcaaccaaacaggtacggcgaccggtcgtttgtcctcctctgatccaaaccttcagaatattccagtacgtaccccattgggccagaagatccgccgtgcgtttgtagctgaggagggttggcgtttagtggccctcgattatcgtcaaattgaattacgtgtccttgcccatctttctggcgatgagaacctcatccgcgtgtttcaggaaggcaaagacattcacactcaaacggcaagctggatgtttggattatcagctgaagcgatcgatcctttgatgcgtcgtgcagcgaagaccatcaatttcggtgttctctacggtatgagtgcctttcgtttgtcgcaggaattaggcattccctatgaagaagctcaggcgttcattcagaaatactttcaaagctatcccaaagttaaagcatggatcgagaagactctccgtgaaggccgcacacgtggttacgtagagaccttatttggacgtcgccgctatgttcccgatttaaacgctcgcgtgaaaggcaagcgtgaagccgccgaacgcatggcgttcaacatgcctgtacagggcacggcagctgacctcatgaaacttgcaatggtgcgcctttttccacaattgcgtgaagttggtgcccgcatgctcttgcaggtccacgatgaactcttgttagaagcgccaaaagagcgtgcggaagaggtggcagccctcgcgaaagaagttatggaaggcgtgtggcccttagcggtgcctcttgaagtcgaagttggtattggcgaggattggctggctgccaaagga

SEQ ID NO: 4612 - protein, 841 aa, synthetic construct
  REGION 1..841: note = Variant of DNA polymerase I from Thermus sp. strain 2.9
MHHHHHHGGSGVLPVFEPKGRVLLVDGHHLAYRNFFALKGLTTSLGEPVQGVYGFAKSLLKALKEDGDVVIVVFDAKAPSFRHEAYEAYKAGRAPTPEDFPRQLALMKELVDLLGLERLEVPGFEADDVLATLAKKAEREGYEVQILTADRDLFQLLSPRISVLHPEGHRITPEWLWEKYGLRPEQWVDFRALAGDPSDNIPGVKGIGEKTALKLLKEWGSLENLLKNLDQVKPESVREKILAHLEDLKLSRELSRVRTDLPLEVDFGRRREPDWEGLKAFLERLEFGSLLHEFGLLESPLLAEEAPWPPPEGAFLGYRLSRPEPMWAELLALAASAQGRVYRAEDPHGALRGLFEVRGLLAKDLAVVALREGLDLPPTDDPMLLAYLLDPSNTTPEGVARRYGGEWTEDAAKRALLAERLHANLLGRLQGEERLLWLYEEVEKPLSRVLAHMEATGVKLDVAYLENLSLEVAAHMRRLEEEVFRLAGRSFRLNSRDQLERVLFDELGLPPIGKTEKTGKRSTSAAVLEALREVHPIVDKILQYRELAKLKGTYIDRLPALVHPKTGRLHTRFNQTGTATGRLSSSDPNLQNIPVRTPLGQKIRRAFVAEEGWRLVALDYRQIELRVLAHLSGDENLIRVFQEGKDIHTQTASWMFGLSAEAIDPLMRRAAKTINFGVLYGMSAFRLSQELGIPYEEAQAFIQKYFQSYPKVKAWIEKTLREGRTRGYVETLFGRRRYVPDLNARVKGKREAAERMAFNMPVQGTAADLMKLAMVRLFPQLREVGARMLLQVHDELLLEAPKERAEEVAALAKEVMEGVWPLAVPLEVEVGIGEDWLAAKG

SEQ ID NO: 4613 - DNA, 2523 bp, synthetic construct
  misc_feature 1..2523: note = Variant of DNA polymerase I from Thermus sp. strain 2.9
  source 1..2523: mol_type = other DNA
atgcaccatcatcatcatcatggcggtagcggcgtgttaccggtgttcgagcctaaaggtcgcgtgcttctggttgatggccatcatctcgcgtatcgtaacttctttgccctgaaaggattaaccaccagcctgggcgagccggtacagggtgtctacggctttgcaaagtcgctcctgaaagctctgaaagaagacggtgatgtggtgattgttgtctttgatgcgaaagcgccaagttttcgccacgaagcgtacgaagcttacaaagccgggcgtgctccaacgccggaagactttcctcgccaattggcgcttatgaaggaattagtggatttgcttggcctcgaacgcttggaagttcccggtttcgaggcagacgacgtattagcgactctcgcaaagaaagccgaacgtgagggctatgaagtccagatcttgacagcagatcgcgatcttttccagcttttatctccgcgcatctcggtgttacacccggaagggcatcgtatcaccccggaatggctctgggagaaatatggtttgcgtcccgaacaatgggtggattttcgcgccttagcaggcgatccgagcgacaatattccgggagttaaaggtatcggcgagaagacggcgctcaagctccttaaagaatgggggtcgttggagaacttgcttaagaatttagatcaggtcaaaccagagtcagtgcgtgagaagattcttgctcacctcgaagacctcaaattaagccgcgaattgtcccgtgtacgcaccgatttgccgctcgaagttgatttcggtcgccgccgcgaacctgactgggagggtcttaaagcgtttttagagcgtcttgaatttggttcgctcttgcatgaattcggccttttagaaagcccgttactggccgaagaagcaccttggccaccgcccgagggcgcgtttttaggttaccgtttgagtcgcccggaaccgatgtgggccgaattactggctcttgcagcgtctgcccagggacgtgtgtatcgcgcggaagaccctcatggtgcgctccgcggcctcttcgaagtccgtggactccttgccaaagacttagctgttgttgcattgcgcgaaggtcttgatttacctccgactgatgatccaatgcttcttgcgtacctcttggacccgtcaaacacgacgcccgaaggcgtagcccgtcgttacggcggcgagtggaccgaagatgcagcgaaacgcgcgttattggccgaacgtttgcacgccaatttattaggacgtttgcaaggcgaggaacgtctcctctggctttacgaagaagtggagaaaccattgagtcgcgtgctcgcgcatatggaagctaccggtgtcaaattagacgtggcgtatttggagaatctcagccttgaagttgctgcccacatgcgccgcttggaggaagaagtattccgtttagcaggccgttcctttcgccttaactctcgcgatcagttagaacgtgtgttgttcgatgaacttggtctccctcctatcggcaagacagagaagaccggtaaacgtagcacttcagcggcggttttagaagctcttcgcgaagtccatcccattgtggactgtatcttgcagtaccgcgaactcgcgaaattgaaaggcacctatattgaccgtcttccggcattagtccacccgaaaacgggacgcctccatacccgcttcaaccaaacagccacggcgaccggtcgtttgtcctcctctgatccaaaccttcagaatattccagtacgtaccccattgggccagaagatccgccgtgcgtttgtagctgaggagggttggcgtttagtggccctcgattatcgtcaaattgaattacgtgtccttgcccatctttctggcgatgagaacctcatccgcgtgtttcaggaaggcaaagacattcacactcaaacggcaagctggatgtttggattatcagctgaagcgatcgatcctttgatgcgtcgtgcagcgaagaccatcaatttcggtgttctctacggtatgagtgcctttcgtttgtcgcaggaattaggcattccctatgaagaagctcaggcgttcattcagaaatactttcaaagctatcccaaagttaaagcatggatcgagaagactctccgtgaaggccgcacacgtggttacgtagagaccttatttggacgtcgccgctatgttcccgatttaaacgctcgcgtgaaaggcaagcgtgaagccgccgaacgcatggcgttcaacatgcctgtacagggcacggcagctgacctcatgaaacttgcaatggtgcgcctttttccacaattgcgtgaagttggtgcccgcatgctcttgcaggtccacgatgaactcttgttagaagcgccaaaagagcgtgcggaagaggtggcagccctcgcgaaagaagttatggaaggcgtgtggcccttagcggtgcctcttgaagtcgaagttggtattggcgaggattggctggctgccaaagga

SEQ ID NO: 4614 - protein, 841 aa, synthetic construct
  REGION 1..841: note = Variant of DNA polymerase I from Thermus sp. strain 2.9
MHHHHHHGGSGVLPVFEPKGRVLLVDGHHLAYRNFFALKGLTTSLGEPVQGVYGFAKSLLKALKEDGDVVIVVFDAKAPSFRHEAYEAYKAGRAPTPEDFPRQLALMKELVDLLGLERLEVPGFEADDVLATLAKKAEREGYEVQILTADRDLFQLLSPRISVLHPEGHRITPEWLWEKYGLRPEQWVDFRALAGDPSDNIPGVKGIGEKTALKLLKEWGSLENLLKNLDQVKPESVREKILAHLEDLKLSRELSRVRTDLPLEVDFGRRREPDWEGLKAFLERLEFGSLLHEFGLLESPLLAEEAPWPPPEGAFLGYRLSRPEPMWAELLALAASAQGRVYRAEDPHGALRGLFEVRGLLAKDLAVVALREGLDLPPTDDPMLLAYLLDPSNTTPEGVARRYGGEWTEDAAKRALLAERLHANLLGRLQGEERLLWLYEEVEKPLSRVLAHMEATGVKLDVAYLENLSLEVAAHMRRLEEEVFRLAGRSFRLNSRDQLERVLFDELGLPPIGKTEKTGKRSTSAAVLEALREVHPIVDCILQYRELAKLKGTYIDRLPALVHPKTGRLHTRFNQTATATGRLSSSDPNLQNIPVRTPLGQKIRRAFVAEEGWRLVALDYRQIELRVLAHLSGDENLIRVFQEGKDIHTQTASWMFGLSAEAIDPLMRRAAKTINFGVLYGMSAFRLSQELGIPYEEAQAFIQKYFQSYPKVKAWIEKTLREGRTRGYVETLFGRRRYVPDLNARVKGKREAAERMAFNMPVQGTAADLMKLAMVRLFPQLREVGARMLLQVHDELLLEAPKERAEEVAALAKEVMEGVWPLAVPLEVEVGIGEDWLAAKG

SEQ ID NO: 4615 - DNA, 2523 bp, synthetic construct
  misc_feature 1..2523: note = Variant of DNA polymerase I from Thermus sp. strain 2.9
  source 1..2523: mol_type = other DNA
atgcaccatcatcatcatcatggcggtagcggcgtgttaccggtgttcgagcctaaaggtcgcgtgcttctggttgatggccatcatctcgcgtatcgtaacttctttgccctgaaaggattaaccaccagcctgggcgagccggtacagggtgtctacggctttgcaaagtcgctcctgaaagctctgaaagaagacggtgatgtggtgattgttgtctttgatgcgaaagcgccaagttttcgccacgaagcgtacgaagcttacaaagccgggcgtgctccaacgccggaagactttcctcgccaattggcgcttatgaaggaattagtggatttgcttggcctcgaacgcttggaagttcccggtttcgaggcagacgacgtattagcgactctcgcaaagaaagccgaacgtgagggctatgaagtccagatcttgacagcagatcgcgatcttttccagcttttatctccgcgcatctcggtgttacacccggaagggcatcgtatcaccccggaatggctctgggagaaatatggtttgcgtcccgaacaatgggtggattttcgcgccttagcaggcgatccgagcgacaatattccgggagttaaaggtatcggcgagaagacggcgctcaagctccttaaagaatgggggtcgttggagaacttgcttaagaatttagatcaggtcaaaccagagtcagtgcgtgagaagattcttgctcacctcgaagacctcaaattaagccgcgaattgtcccgtgtacgcaccgatttgccgctcgaagttgatttcggtcgccgccgcgaacctgactgggagggtcttaaagcgtttttagagcgtcttgaatttggttcgctcttgcatgaattcggccttttagaaagcccgttactggccgaagaagcaccttggccaccgcccgagggcgcgtttttaggttaccgtttgagtcgcccggaaccgatgtgggccgaattactggctcttgcagcgtctgcccagggacgtgtgtatcgcgcggaagaccctcatggtgcgctccgcggcctcttcgaagtccgtggactccttgccaaagacttagctgttgttgcattgcgcgaaggtcttgatttacctccgactgatgatccaatgcttcttgcgtacctcttggacccgtcaaacacgacgcccgaaggcgtagcccgtcgttacggcggcgagtggaccgaagatgcagcgaaacgcgcgttattggccgaacgtttgcacgccaatttattaggacgtttgcaaggcgaggaacgtctcctctggctttacgaagaagtggagaaaccattgagtcgcgtgctcgcgcatatggaagctaccggtgtcaaattagacgtggcgtatttggagaatctcagccttgaagttgctgcccacatgcgccgcttggaggaagaagtattccgtttagcaggccgttcctttcgccttaactctcgcgatcagttagaacgtgtgttgttcgatgaacttggtctccctcctatcggcaagacagagaagaccggtaaacgtagcacttcagcggcggttttagaagctcttcgcgaagtccatcccattgtggacaagatcttgcagtaccgcgaactcgcgaaattgaaaggcacctatattgaccgtcttccggcattagtccacccgaaaacgggacgcctccatacccgcttcaaccaaacagccacggcgaccggtcgtttgtcctcctctgatccaaaccttcagaatattccagtacgtaccccattgggccagaagatccgccgtgcgtttgtagctgaggagggttggcgtttagtggccctcgattatcgtcaaattgaattacgtgtccttgcccatctttctggcgatgagaacctcatccgcgtgtttcaggaaggcaaagacattcacactcaaacggcaagctggatgtttggattatcagctgaagcgatcgatcctttgatgcgtcgtgcagcgaagaccatcaatttcggtgttctctacggtatgagtgcctttcgtttgtcgcaggaattaggcattccctatgaagaagctcaggcgttcattcagaaatactttcaaagctatccctgggttaaagcatggatcgagaagactctccgtgaaggccgcacacgtggttacgtagagaccttatttggacgtcgccgctatgttcccgatttaaacgctcgcgtgaaaggcaagcgtgaagccgccgaacgcatggcgttcaacatgcctgtacagggcacggcagctgacctcatgaaacttgcaatggtgcgcctttttccacaattgcgtgaagttggtgcccgcatgctcttgcaggtccacgatgaactcttgttagaagcgccaaaagagcgtgcggaagaggtggcagccctcgcgaaagaagttatggaaggcgtgtggcccttagcggtgcctcttgaagtcgaagttggtattggcgaggattggctggctgccaaagga

SEQ ID NO: 4616 - protein, 841 aa, synthetic construct
  REGION 1..841: note = Variant of DNA polymerase I from Thermus sp. strain 2.9
MHHHHHHGGSGVLPVFEPKGRVLLVDGHHLAYRNFFALKGLTTSLGEPVQGVYGFAKSLLKALKEDGDVVIVVFDAKAPSFRHEAYEAYKAGRAPTPEDFPRQLALMKELVDLLGLERLEVPGFEADDVLATLAKKAEREGYEVQILTADRDLFQLLSPRISVLHPEGHRITPEWLWEKYGLRPEQWVDFRALAGDPSDNIPGVKGIGEKTALKLLKEWGSLENLLKNLDQVKPESVREKILAHLEDLKLSRELSRVRTDLPLEVDFGRRREPDWEGLKAFLERLEFGSLLHEFGLLESPLLAEEAPWPPPEGAFLGYRLSRPEPMWAELLALAASAQGRVYRAEDPHGALRGLFEVRGLLAKDLAVVALREGLDLPPTDDPMLLAYLLDPSNTTPEGVARRYGGEWTEDAAKRALLAERLHANLLGRLQGEERLLWLYEEVEKPLSRVLAHMEATGVKLDVAYLENLSLEVAAHMRRLEEEVFRLAGRSFRLNSRDQLERVLFDELGLPPIGKTEKTGKRSTSAAVLEALREVHPIVDKILQYRELAKLKGTYIDRLPALVHPKTGRLHTRFNQTATATGRLSSSDPNLQNIPVRTPLGQKIRRAFVAEEGWRLVALDYRQIELRVLAHLSGDENLIRVFQEGKDIHTQTASWMFGLSAEAIDPLMRRAAKTINFGVLYGMSAFRLSQELGIPYEEAQAFIQKYFQSYPWVKAWIEKTLREGRTRGYVETLFGRRRYVPDLNARVKGKREAAERMAFNMPVQGTAADLMKLAMVRLFPQLREVGARMLLQVHDELLLEAPKERAEEVAALAKEVMEGVWPLAVPLEVEVGIGEDWLAAKG

SEQ ID NO: 4617 - DNA, 2523 bp, synthetic construct
  misc_feature 1..2523: note = Variant of DNA polymerase I from Thermus sp. strain 2.9
  source 1..2523: mol_type = other DNA
atgcaccatcatcatcatcatggcggtagcggcgtgttaccggtgttcgagcctaaaggtcgcgtgcttctggttgatggccatcatctcgcgtatcgtaacttctttgccctgaaaggattaaccaccagcctgggcgagccggtacagggtgtctacggctttgcaaagtcgctcctgaaagctctgaaagaagacggtgatgtggtgattgttgtctttgatgcgaaagcgccaagttttcgccacgaagcgtacgaagcttacaaagccgggcgtgctccaacgccggaagactttcctcgccaattggcgcttatgaaggaattagtggatttgcttggcctcgaacgcttggaagttcccggtttcgaggcagacgacgtattagcgactctcgcaaagaaagccgaacgtgagggctatgaagtccagatcttgacagcagatcgcgatcttttccagcttttatctccgcgcatctcggtgttacacccggaagggcatcgtatcaccccggaatggctctgggagaaatatggtttgcgtcccgaacaatgggtggattttcgcgccttagcaggcgatccgagcgacaatattccgggagttaaaggtatcggcgagaagacggcgctcaagctccttaaagaatgggggtcgttggagaacttgcttaagaatttagatcaggtcaaaccagagtcagtgcgtgagaagattcttgctcacctcgaagacctcaaattaagccgcgaattgtcccgtgtacgcaccgatttgccgctcgaagttgatttcggtcgccgccgcgaacctgactgggagggtcttaaagcgtttttagagcgtcttgaatttggttcgctcttgcatgaattcggccttttagaaagcccgttactggccgaagaagcaccttggccaccgcccgagggcgcgtttttaggttaccgtttgagtcgcccggaaccgatgtgggccgaattactggctcttgcagcgtctgcccagggacgtgtgtatcgcgcggaagaccctcatggtgcgctccgcggcctcttcgaagtccgtggactccttgccaaagacttagctgttgttgcattgcgcgaaggtcttgatttacctccgactgatgatccaatgcttcttgcgtacctcttggacccgtcaaacacgacgcccgaaggcgtagcccgtcgttacggcggcgagtggaccgaagatgcagcgaaacgcgcgttattggccgaacgtttgcacgccaatttattaggacgtttgcaaggcgaggaacgtctcctctggctttacgaagaagtggagaaaccattgagtcgcgtgctcgcgcatatggaagctaccggtgtcaaattagacgtggcgtatttggagaatctcagccttgaagttgctgcccacatgcgccgcttggaggaagaagtattccgtttagcaggccgttcctttcgccttaactctcgcgatcagttagaacgtgtgttgttcgatgaacttggtctccctcctatcggcaagacagagaagaccggtaaacgtagcacttcagcggcggttttagaagctcttcgcgaagtccatcccattgtggacaagatcttgcagtaccgcgaactcgcgaaattgaaaggcacctatattgaccgtcttccggcattagtccacccgaaaacgggacgcctccatacccgcttcaaccaaacagccacggcgaccggtcgtttgtcctcctctgatccaaaccttcagaatattccagtacgtaccccattgggccagaagatccgccgtgcgtttgtagctgaggagggttggcgtttagtggccctcgattatcgtcaaattgaattacgtgtccttgcccatctttctggcgatgagaacctcatccgcgtgtttcaggaaggcaaagacattcacactcaaacggcaagctggatgtttggattatcagctgaagcgatcgatcctttgatgcgtcgtgcagcgaagaccatcaatttcggtgttctctacggtatgagtgcctttcgtttgtcgcaggaattaggcattccctatgaagaagctcaggcgttcattcagaaatactttcaaagctatcccaaagttaaagcatggatcgagaagactctccgtgaaggccgcacacgtggttacgtagagaccttatttggacgtcgccgctatgttcccgatttaaacgctcgcgtgaaaggcaagcgtgaagccgccgaacgcatggcgttcaacatgcctgtacagggcacggcagctgacgctatgaaacttgcaatggtgcgcctttttccacaattgcgtgaagttggtgcccgcatgctcttgcaggtccacgatgaactcttgttagaagcgccaaaagagcgtgcggaagaggtggcagccctcgcgaaagaagttatggaaggcgtgtggcccttagcggtgcctcttgaagtcgaagttggtattggcgaggattggctggctgccaaagga

SEQ ID NO: 4618 - protein, 841 aa, synthetic construct
  REGION 1..841: note = Variant of DNA polymerase I from Thermus sp. strain 2.9
MHHHHHHGGSGVLPVFEPKGRVLLVDGHHLAYRNFFALKGLTTSLGEPVQGVYGFAKSLLKALKEDGDVVIVVFDAKAPSFRHEAYEAYKAGRAPTPEDFPRQLALMKELVDLLGLERLEVPGFEADDVLATLAKKAEREGYEVQILTADRDLFQLLSPRISVLHPEGHRITPEWLWEKYGLRPEQWVDFRALAGDPSDNIPGVKGIGEKTALKLLKEWGSLENLLKNLDQVKPESVREKILAHLEDLKLSRELSRVRTDLPLEVDFGRRREPDWEGLKAFLERLEFGSLLHEFGLLESPLLAEEAPWPPPEGAFLGYRLSRPEPMWAELLALAASAQGRVYRAEDPHGALRGLFEVRGLLAKDLAVVALREGLDLPPTDDPMLLAYLLDPSNTTPEGVARRYGGEWTEDAAKRALLAERLHANLLGRLQGEERLLWLYEEVEKPLSRVLAHMEATGVKLDVAYLENLSLEVAAHMRRLEEEVFRLAGRSFRLNSRDQLERVLFDELGLPPIGKTEKTGKRSTSAAVLEALREVHPIVDKILQYRELAKLKGTYIDRLPALVHPKTGRLHTRFNQTATATGRLSSSDPNLQNIPVRTPLGQKIRRAFVAEEGWRLVALDYRQIELRVLAHLSGDENLIRVFQEGKDIHTQTASWMFGLSAEAIDPLMRRAAKTINFGVLYGMSAFRLSQELGIPYEEAQAFIQKYFQSYPKVKAWIEKTLREGRTRGYVETLFGRRRYVPDLNARVKGKREAAERMAFNMPVQGTAADAMKLAMVRLFPQLREVGARMLLQVHDELLLEAPKERAEEVAALAKEVMEGVWPLAVPLEVEVGIGEDWLAAKG

SEQ ID NO: 4619 - DNA, 2523 bp, synthetic construct
  misc_feature 1..2523: note = Variant of DNA polymerase I from Thermus sp. strain 2.9
  source 1..2523: mol_type = other DNA
atgcaccatcatcatcatcatggcggtagcggcgtgttaccggtgttcgagcctaaaggtcgcgtgcttctggttgatggccatcatctcgcgtatcgtaacttctttgccctgaaaggattaaccaccagcctgggcgagccggtacagggtgtctacggctttgcaaagtcgctcctgaaagctctgaaagaagacggtgatgtggtgattgttgtctttgatgcgaaagcgccaagttttcgccacgaagcgtacgaagcttacaaagccgggcgtgctccaacgccggaagactttcctcgccaattggcgcttatgaaggaattagtggatttgcttggcctcgaacgcttggaagttcccggtttcgaggcagacgacgtattagcgactctcgcaaagaaagccgaacgtgagggctatgaagtccagatcttgacagcagatcgcgatcttttccagcttttatctccgcgcatctcggtgttacacccggaagggcatcgtatcaccccggaatggctctgggagaaatatggtttgcgtcccgaacaatgggtggattttcgcgccttagcaggcgatccgagcgacaatattccgggagttaaaggtatcggcgagaagacggcgctcaagctccttaaagaatgggggtcgttggagaacttgcttaagaatttagatcaggtcaaaccagagtcagtgcgtgagaagattcttgctcacctcgaagacctcaaattaagccgcgaattgtcccgtgtacgcaccgatttgccgctcgaagttgatttcggtcgccgccgcgaacctgactgggagggtcttaaagcgtttttagagcgtcttgaatttggttcgctcttgcatgaattcggccttttagaaagcccgttactggccgaagaagcaccttggccaccgcccgagggcgcgtttttaggttaccgtttgagtcgcccggaaccgatgtgggccgaattactggctcttgcagcgtctgcccagggacgtgtgtatcgcgcggaagaccctcatggtgcgctccgcggcctcttcgaagtccgtggactccttgccaaagacttagctgttgttgcattgcgcgaaggtcttgatttacctccgactgatgatccaatgcttcttgcgtacctcttggacccgtcaaacacgacgcccgaaggcgtagcccgtcgttacggcggcgagtggaccgaagatgcagcaaaacgcgcgttattggccgaacgtttgcacgccaatttattaggacgtttgcaaggcgaggaacgtctcctctggctttacgaagaagtggagaaaccattgagtcgcgtgctcgcgcatatggaagctaccggtgtcaaattagacgtggcgtatttggagaatctcagccttgaagttgctgcccacatgcgccgcttggaggaagaagtattccgtttagcaggccgttcctttcgccttaactctcgcgatcagttagaacgtgtgttgttcgatgaacttggtctccctcctatcggcaagacagagaagaccggtaaacgtagcacttcagcggcggttttagaagctcttcgcgaagtccatcccattgtggacaagatcttgcagtaccgcgaactcgcgaaattgaaaggcacctatattgacttgcttccggcattagtccacccgaaaacgggacgcctccatacccgcttcaaccaaacagccacggcgaccggtcgtttgtcctcctctgatccaaaccttcagaatattccagtacgtaccccattgggccagaagatccgccgtgcgtttgtagctgaggagggttggcgtttagtggccctcgattatcgtcaaattgaattacgtgtccttgcccatctttctggcgatgagaacctcatccgcgtgtttcaggaaggcaaagacattcacactcaaacggcaagctggatgtttggattatcagctgaagcgatcgatcctttgatgcgtcgtgcagcgaagaccatcaatttcggtgttctctacggtatgagtgcctttcgtttgtcgcaggaattaggcattccctatgaagaagctcaggcgttcattcagaaatactttcaaagctatcccaaagttaaagcatggatcgagaagactctccgtgaaggccgcacacgtggttacgtagagaccttatttggacgtcgccgctatgttcccgatttaaacgctcgcgtgaaaggcaagcgtgaagccgccgaacgcatggcgttcaacatgcctgtacagggcacggcagctgacctcatgaaacttgcaatggtgcgcctttttccacaattgcgtgaagttggtgcccgcatgctcttgcaggtccacgatgaactcttgttagaagcgccaaaagagcgtgcggaagaggtggcagccctcgcgaaagaagttatggaaggcgtgtggcccttagcggtgcctcttgaagtcgaagttggtattggcgaggattggctggctgccaaagga

SEQ ID NO: 4620 - protein, 841 aa, synthetic construct
  REGION 1..841: note = Variant of DNA polymerase I from Thermus sp. strain 2.9
MHHHHHHGGSGVLPVFEPKGRVLLVDGHHLAYRNFFALKGLTTSLGEPVQGVYGFAKSLLKALKEDGDVVIVVFDAKAPSFRHEAYEAYKAGRAPTPEDFPRQLALMKELVDLLGLERLEVPGFEADDVLATLAKKAEREGYEVQILTADRDLFQLLSPRISVLHPEGHRITPEWLWEKYGLRPEQWVDFRALAGDPSDNIPGVKGIGEKTALKLLKEWGSLENLLKNLDQVKPESVREKILAHLEDLKLSRELSRVRTDLPLEVDFGRRREPDWEGLKAFLERLEFGSLLHEFGLLESPLLAEEAPWPPPEGAFLGYRLSRPEPMWAELLALAASAQGRVYRAEDPHGALRGLFEVRGLLAKDLAVVALREGLDLPPTDDPMLLAYLLDPSNTTPEGVARRYGGEWTEDAAKRALLAERLHANLLGRLQGEERLLWLYEEVEKPLSRVLAHMEATGVKLDVAYLENLSLEVAAHMRRLEEEVFRLAGRSFRLNSRDQLERVLFDELGLPPIGKTEKTGKRSTSAAVLEALREVHPIVDKILQYRELAKLKGTYIDLLPALVHPKTGRLHTRFNQTATATGRLSSSDPNLQNIPVRTPLGQKIRRAFVAEEGWRLVALDYRQIELRVLAHLSGDENLIRVFQEGKDIHTQTASWMFGLSAEAIDPLMRRAAKTINFGVLYGMSAFRLSQELGIPYEEAQAFIQKYFQSYPKVKAWIEKTLREGRTRGYVETLFGRRRYVPDLNARVKGKREAAERMAFNMPVQGTAADLMKLAMVRLFPQLREVGARMLLQVHDELLLEAPKERAEEVAALAKEVMEGVWPLAVPLEVEVGIGEDWLAAKG

SEQ ID NO: 4621 - DNA, 2523 bp, synthetic construct
  misc_feature 1..2523: note = Variant of DNA polymerase I from Thermus sp. strain 2.9
  source 1..2523: mol_type = other DNA
atgcaccatcatcatcatcatggcggtagcggcgtgttaccggtgttcgagcctaaaggtcgcgtgcttctggttgatggccatcatctcgcgtatcgtaacttctttgccctgaaaggattaaccaccagcctgggcgagccggtacagggtgtctacggctttgcaaagtcgctcctgaaagctctgaaagaagacggtgatgtggtgattgttgtctttgatgcgaaagcgccaagttttcgccacgaagcgtacgaagcttacaaagccgggcgtgctccaacgccggaagactttcctcgccaattggcgcttatgaaggaattagtggatttgcttggcctcgaacgcttggaagttcccggtttcgaggcagacgacgtattagcgactctcgcaaagaaagccgaacgtgagggctatgaagtccagatcttgacagcagatcgcgatcttttccagcttttatctccgcgcatctcggtgttacacccggaagggcatcgtatcaccccggaatggctctgggagaaatatggtttgcgtcccgaacaatgggtggattttcgcgccttagcaggcgatccgagcgacaatattccgggagttaaaggtatcggcgagaagacggcgctcaagctccttaaagaatgggggtcgttggagaacttgcttaagaatttagatcaggtcaaaccagagtcagtgcgtgagaagattcttgctcacctcgaagacctcaaattaagccgcgaattgtcccgtgtacgcaccgatttgccgctcgaagttgatttcggtcgccgccgcgaacctgactgggagggtcttaaagcgtttttagagcgtcttgaatttggttcgctcttgcatgaattcggccttttagaaagcccgttactggccgaagaagcaccttggccaccgcccgagggcgcgtttttaggttaccgtttgagtcgcccggaaccgatgtgggccgaattactggctcttgcagcgtctgcccagggacgtgtgtatcgcgcggaagaccctcatggtgcgctccgcggcctcttcgaagtccgtggactccttgccaaagacttagctgttgttgcattgcgcgaaggtcttgatttacctccgactgatgatccaatgcttcttgcgtacctcttggacccgtcaaacacgacgcccgaaggcgtagcccgtcgttacggcggcgagtggaccgaagatgcagcgaaacgcgcgttattggccgaacgtttgcacgccaatttattaggacgtttgcaaggcgaggaacgtctcctctggctttacgaagaagtggagaaaccattgagtcgcgtgctcgcgcatatggaagctaccggtgtcaaattagactgggcgtatttggagaatctcagccttgaagttgctgcccacatgcgccgcttggaggaagaagtattccgtttagcaggccgttcctttcgccttaactctcgcgatcagttagaacgtgtgttgttcgatgaacttggtctccctcctatcggcaagacagagaagaccggtaaacgtagcacttcagcggcggttttagaagctcttcgcgaagtccatcccattgtggacaagatcttgcagtaccgcgaactcgcgaaattgaaaggcacctatattgaccgtcttccggcattagtccacccgaaaacgggacgcctccatacccgcttcaaccaaacagccacggcgaccggtcgtttgtcctcctctgatccaaaccttcagaatattccagtacgtaccccattgggccagaagatccgccgtgcgtttgtagctgaggagggttggcgtttagtggccctcgattatcgtcaaattgaattacgtgtccttgcccatctttctggcgatgagaacctcatccgcgtgtttcaggaaggcaaagacattcacactcaaacggcaagctggatgtttggattatcagctgaagcgatcgatcctttgatgcgtcgtgcagcgaagaccatcaatttcggtgttctctacggtatgagtgcctttcgtttgtcgcaggaattaggcattccctatgaagaagctcaggcgttcattcagaaatactttcaaagctatcccaaagttaaagcatggatcgagaagactctccgtgaaggccgcacacgtggttacgtagagaccttatttggacgtcgccgctatgttcccgatttaaacgctcgcgtgaaaggcaagcgtgaagccgccgaacgcatggcgttcaacatgcctgtacagggcacggcagctgacctcatgaaacttgcaatggtgcgcctttttccacaattgcgtgaagttggtgcccgcatgctcttgcaggtccacgatgaactcttgttagaagcgccaaaagagcgtgcggaagaggtggcagccctcgcgaaagaagttatggaaggcgtgtggcccttagcggtgcctcttgaagtcgaagttggtattggcgaggattggctggctgccaaagga

SEQ ID NO: 4622 - protein, 841 aa, synthetic construct
  REGION 1..841: note = Variant of DNA polymerase I from Thermus sp. strain 2.9
MHHHHHHGGSGVLPVFEPKGRVLLVDGHHLAYRNFFALKGLTTSLGEPVQGVYGFAKSLLKALKEDGDVVIVVFDAKAPSFRHEAYEAYKAGRAPTPEDFPRQLALMKELVDLLGLERLEVPGFEADDVLATLAKKAEREGYEVQILTADRDLFQLLSPRISVLHPEGHRITPEWLWEKYGLRPEQWVDFRALAGDPSDNIPGVKGIGEKTALKLLKEWGSLENLLKNLDQVKPESVREKILAHLEDLKLSRELSRVRTDLPLEVDFGRRREPDWEGLKAFLERLEFGSLLHEFGLLESPLLAEEAPWPPPEGAFLGYRLSRPEPMWAELLALAASAQGRVYRAEDPHGALRGLFEVRGLLAKDLAVVALREGLDLPPTDDPMLLAYLLDPSNTTPEGVARRYGGEWTEDAAKRALLAERLHANLLGRLQGEERLLWLYEEVEKPLSRVLAHMEATGVKLDWAYLENLSLEVAAHMRRLEEEVFRLAGRSFRLNSRDQLERVLFDELGLPPIGKTEKTGKRSTSAAVLEALREVHPIVDKILQYRELAKLKGTYIDRLPALVHPKTGRLHTRFNQTATATGRLSSSDPNLQNIPVRTPLGQKIRRAFVAEEGWRLVALDYRQIELRVLAHLSGDENLIRVFQEGKDIHTQTASWMFGLSAEAIDPLMRRAAKTINFGVLYGMSAFRLSQELGIPYEEAQAFIQKYFQSYPKVKAWIEKTLREGRTRGYVETLFGRRRYVPDLNARVKGKREAAERMAFNMPVQGTAADLMKLAMVRLFPQLREVGARMLLQVHDELLLEAPKERAEEVAALAKEVMEGVWPLAVPLEVEVGIGEDWLAAKG

SEQ ID NO: 4623 - DNA, 2523 bp, synthetic construct
  misc_feature 1..2523: note = Variant of DNA polymerase I from Thermus sp. strain 2.9
  source 1..2523: mol_type = other DNA
atgcaccatcatcatcatcatggcggtagcggcgtgttaccggtgttcgagcctaaaggtcgcgtgcttctggttgatggccatcatctcgcgtatcgtaacttctttgccctgaaaggattaaccaccagcctgggcgagccggtacagggtgtctacggctttgcaaagtcgctcctgaaagctctgaaagaagacggtgatgtggtgattgttgtctttgatgcgaaagcgccaagttttcgccacgaagcgtacgaagcttacaaagccgggcgtgctccaacgccggaagactttcctcgccaattggcgcttatgaaggaattagtggatttgcttggcctcgaacgcttggaagttcccggtttcgaggcagacgacgtattagcgactctcgcaaagaaagccgaacgtgagggctatgaagtccagatcttgacagcagatcgcgatcttttccagcttttatctccgcgcatctcggtgttacacccggaagggcatcgtatcaccccggaatggctctgggagaaatatggtttgcgtcccgaacaatgggtggattttcgcgccttagcaggcgatccgagcgacaatattccgggagttaaaggtatcggcgagaagacggcgctcaagctccttaaagaatgggggtcgttggagaacttgcttaagaatttagatcaggtcaaaccagagtcagtgcgtgagaagattcttgctcacctcgaagacctcaaattaagccgcgaattgtcccgtgtacgcaccgatttgccgctcgaagttgatttcggtcgccgccgcgaacctgactgggagggtcttaaagcgtttttagagcgtcttgaatttggttcgctcttgcatgaattcggccttttagaaagcccgttactggccgaagaagcaccttggccaccgcccgagggcgcgtttttaggttaccgtttgagtcgcccggaaccgatgtgggccgaattactggctcttgcagcgtctgcccagggacgtgtgtatcgcgcggaagaccctcatggtgcgctccgcggcctcttcgaagtccgtggactccttgccaaagacttagctgttgttgcattgcgcgaaggtcttgatttacctccgactgatgatccaatgcttcttgcgtacctcttggacccgtcaaacacgacgcccgaaggcgtagcccgtcgttacggcggcgagtggaccgaagatgcagcgaaacgcgcgttattggccgaacgtttgcacgccaatttattaggacgtttgcaaggcgaggaacgtctcctctggctttacgaagaagtggagaaaccattgagtcgcgtgctcgcgcatatggaagctaccggtgtcaaattagacgtggcgtatttggagaatctcagccttgaagttgctgagcacatgcgccgcttggaggaagaagtattccgtttagcaggccgttcctttcgccttaactctcgcgatcagttagaacgtgtgttgttcgatgaacttggtctccctcctatcggcaagacagagaagaccggtaaacgtagcacttcagcggcggttttagaagctcttcgcgaagtccatcccattgtggacaagatcttgcagtaccgcgaactcgcgaaattgaaaggcacctatattgaccgtcttccggcattagtccacccgaaaacgggacgcctccatacccgcttcaaccaaacagccacggcgaccggtcgtttgtcctcctctgatccaaaccttcagaatattccagtacgtaccccattgggccagaagatccgccgtgcgtttgtagctgaggagggttggcgtttagtggccctcgattatcgtcaaattgaattacgtgtccttgcccatctttctggcgatgagaacctcatccgcgtgtttcaggaaggcaaagacattcacactcaaacggcaagctggatgtttggattatcagctgaagcgatcgatcctttgatgcgtcgtgcagcgaagaccatcaatttcggtgttctctacggtatgagtgcctttcgtttgtcgcaggaattaggcattccctatgaagaagctcaggcgttcattcagaaatactttcaaagctatcccaaagttaaagcatggatcgagaagactctccgtgaaggccgcacacgtggttacgtagagaccttatttggacgtcgccgctatgttcccgatttaaacgctcgcgtgaaaggcaagcgtgaagccgccgaacgcatggcgttcaacatgcctgtacagggcacggcagctgacctcatgaaacttgcaatggtgcgcctttttccacaattgcgtgaagttggtgcccgcatgctcttgcaggtccacgatgaactcttgttagaagcgccaaaagagcgtgcggaagaggtggcagccctcgcgaaagaagttatggaaggcgtgtggcccttagcggtgcctcttgaagtcgaagttggtattggcgaggattggctggctgccaaagga

SEQ ID NO: 4624 - protein, 841 aa, synthetic construct
  REGION 1..841: note = Variant of DNA polymerase I from Thermus sp. strain 2.9
MHHHHHHGGSGVLPVFEPKGRVLLVDGHHLAYRNFFALKGLTTSLGEPVQGVYGFAKSLLKALKEDGDVVIVVFDAKAPSFRHEAYEAYKAGRAPTPEDFPRQLALMKELVDLLGLERLEVPGFEADDVLATLAKKAEREGYEVQILTADRDLFQLLSPRISVLHPEGHRITPEWLWEKYGLRPEQWVDFRALAGDPSDNIPGVKGIGEKTALKLLKEWGSLENLLKNLDQVKPESVREKILAHLEDLKLSRELSRVRTDLPLEVDFGRRREPDWEGLKAFLERLEFGSLLHEFGLLESPLLAEEAPWPPPEGAFLGYRLSRPEPMWAELLALAASAQGRVYRAEDPHGALRGLFEVRGLLAKDLAVVALREGLDLPPTDDPMLLAYLLDPSNTTPEGVARRYGGEWTEDAAKRALLAERLHANLLGRLQGEERLLWLYEEVEKPLSRVLAHMEATGVKLDVAYLENLSLEVAEHMRRLEEEVFRLAGRSFRLNSRDQLERVLFDELGLPPIGKTEKTGKRSTSAAVLEALREVHPIVDKILQYRELAKLKGTYIDRLPALVHPKTGRLHTRFNQTATATGRLSSSDPNLQNIPVRTPLGQKIRRAFVAEEGWRLVALDYRQIELRVLAHLSGDENLIRVFQEGKDIHTQTASWMFGLSAEAIDPLMRRAAKTINFGVLYGMSAFRLSQELGIPYEEAQAFIQKYFQSYPKVKAWIEKTLREGRTRGYVETLFGRRRYVPDLNARVKGKREAAERMAFNMPVQGTAADLMKLAMVRLFPQLREVGARMLLQVHDELLLEAPKERAEEVAALAKEVMEGVWPLAVPLEVEVGIGEDWLAAKG

SEQ ID NO: 4625 - DNA, 2523 bp, synthetic construct
  misc_feature 1..2523: note = Variant of DNA polymerase I from Thermus sp. strain 2.9
  source 1..2523: mol_type = other DNA
atgcaccatcatcatcatcatggcggtagcggcgtgttaccggtgttcgagcctaaaggtcgcgtgcttctggttgatggccatcatctcgcgtatcgtaacttctttgccctgaaaggattaaccaccagcctgggcgagccggtacagggtgtctacggctttgcaaagtcgctcctgaaagctctgaaagaagacggtgatgtggtgattgttgtctttgatgcgaaagcgccaagttttcgccacgaagcgtacgaagcttacaaagccgggcgtgctccaacgccggaagactttcctcgccaattggcgcttatgaaggaattagtggatttgcttggcctcgaacgcttggaagttcccggtttcgaggcagacgacgtattagcgactctcgcaaagaaagccgaacgtgagggctatgaagtccagatcttgacagcagatcgcgatcttttccagcttttatctccgcgcatctcggtgttacacccggaagggcatcgtatcaccccggaatggctctgggagaaatatggtttgcgtcccgaacaatgggtggattttcgcgccttagcaggcgatccgagcgacaatattccgggagttaaaggtatcggcgagaagacggcgctcaagctccttaaagaatgggggtcgttggagaacttgcttaagaatttagatcaggtcaaaccagagtcagtgcgtgagaagattcttgctcacctcgaagacctcaaattaagccgcgaattgtcccgtgtacgcaccgatttgccgctcgaagttgatttcggtcgccgccgcgaacctgactgggagggtcttaaagcgtttttagagcgtcttgaatttggttcgctcttgcatgaattcggccttttagaaagcccgttactggccgaagaagcaccttggccaccgcccgagggcgcgtttttaggttaccgtttgagtcgcccggaaccgatgtgggccgaattactggctcttgcagcgtctgcccagggacgtgtgtatcgcgcggaagaccctcatggtgcgctccgcggcctcttcgaagtccgtggactccttgccaaagacttagctgttgttgcattgcgcgaaggtcttgatttacctccgactgatgatccaatgcttcttgcgtacctcttggacccgtcaaacacgacgcccgaaggcgtagcccgtcgttacggcggcgagtggaccgaagatgcagcgaaacgcgcgttattggccgaacgtttgggggccaatttattaggacgtttgcaaggcgaggaacgtctcctctggctttacgaagaagtggagaaaccattgagtcgcgtgctcgcgcatatggaagctaccggtgtcaaattagacgtggcgtatttggagaatctcagccttgaagttgctgcccacatgcgccgcttggaggaagaagtattccgtttagcaggccgttcctttcgccttaactctcgcgatcagttagaacgtgtgttgttcgatgaacttggtctccctcctatcggcaagacagagaagaccggtaaacgtagcacttcagcggcggttttagaagctcttcgcgaagtccatcccattgtggacaagatcttgcagtaccgcgaactcgcgaaattgaaaggcacctatattgaccgtcttccggcattagtccacccgaaaacgggacgcctccatacccgcttcaaccaaacagccacggcgaccggtcgtttgtcctcctctgatccaaaccttcagaatattccagtacgtaccccattgggccagaagatccgccgtgcgtttgtagctgaggagggttggcgtttagtggccctcgattatcgtcaaattgaattacgtgtccttgcccatctttctggcgatgagaacctcatccgcgtgtttcaggaaggcaaagacattcacactcaaacggcaagctggatgtttggattatcagctgaagcgatcgatcctttgatgcgtcgtgcagcgaagaccatcaatttcggtgttctctacggtatgagtgcctttcgtttgtcgcaggaattaggcattccctatgaagaagctcaggcgttcattcagaaatactttcaaagctatcccaaagttaaagcatggatcgagaagactctccgtgaaggccgcacacgtggttacgtagagaccttatttggacgtcgccgctatgttcccgatttaaacgctcgcgtgaaaggcaagcgtgaagccgccgaacgcatggcgttcaacatgcctgtacagggcacggcagctgacctcatgaaacttgcaatggtgcgcctttttccacaattgcgtgaagttggtgcccgcatgctcttgcaggtccacgatgaactcttgttagaagcgccaaaagagcgtgcggaagaggtggcagccctcgcgaaagaagttatggaaggcgtgtggcccttagcggtgcctcttgaagtcgaagttggtattggcgaggattggctggctgccaaagga

SEQ ID NO: 4626 - protein, 841 aa, synthetic construct
  REGION 1..841: note = Variant of DNA polymerase I from Thermus sp. strain 2.9
MHHHHHHGGSGVLPVFEPKGRVLLVDGHHLAYRNFFALKGLTTSLGEPVQGVYGFAKSLLKALKEDGDVVIVVFDAKAPSFRHEAYEAYKAGRAPTPEDFPRQLALMKELVDLLGLERLEVPGFEADDVLATLAKKAEREGYEVQILTADRDLFQLLSPRISVLHPEGHRITPEWLWEKYGLRPEQWVDFRALAGDPSDNIPGVKGIGEKTALKLLKEWGSLENLLKNLDQVKPESVREKILAHLEDLKLSRELSRVRTDLPLEVDFGRRREPDWEGLKAFLERLEFGSLLHEFGLLESPLLAEEAPWPPPEGAFLGYRLSRPEPMWAELLALAASAQGRVYRAEDPHGALRGLFEVRGLLAKDLAVVALREGLDLPPTDDPMLLAYLLDPSNTTPEGVARRYGGEWTEDAAKRALLAERLGANLLGRLQGEERLLWLYEEVEKPLSRVLAHMEATGVKLDVAYLENLSLEVAAHMRRLEEEVFRLAGRSFRLNSRDQLERVLFDELGLPPIGKTEKTGKRSTSAAVLEALREVHPIVDKILQYRELAKLKGTYIDRLPALVHPKTGRLHTRFNQTATATGRLSSSDPNLQNIPVRTPLGQKIRRAFVAEEGWRLVALDYRQIELRVLAHLSGDENLIRVFQEGKDIHTQTASWMFGLSAEAIDPLMRRAAKTINFGVLYGMSAFRLSQELGIPYEEAQAFIQKYFQSYPKVKAWIEKTLREGRTRGYVETLFGRRRYVPDLNARVKGKREAAERMAFNMPVQGTAADLMKLAMVRLFPQLREVGARMLLQVHDELLLEAPKERAEEVAALAKEVMEGVWPLAVPLEVEVGIGEDWLAAKG

SEQ ID NO: 4627 - DNA, 2523 bp, synthetic construct
  misc_feature 1..2523: note = Variant of DNA polymerase I from Thermus sp. strain 2.9
  source 1..2523: mol_type = other DNA
atgcaccatcatcatcatcatggcggtagcggcgtgttaccggtgttcgagcctaaaggtcgcgtgcttctggttgatggccatcatctcgcgtatcgtaacttctttgccctgaaaggattaaccaccagcctgggcgagccggtacagggtgtctacggctttgcaaagtcgctcctgaaagctctgaaagaagacggtgatgtggtgattgttgtctttgatgcgaaagcgccaagttttcgccacgaagcgtacgaagcttacaaagccgggcgtgctccaacgccggaagactttcctcgccaattggcgcttatgaaggaattagtggatttgcttggcctcgaacgcttggaagttcccggtttcgaggcagacgacgtattagcgactctcgcaaagaaagccgaacgtgagggctatgaagtccagatcttgacagcagatcgcgatcttttccagcttttatctccgcgcatctcggtgttacacccggaagggcatcgtatcaccccggaatggctctgggagaaatatggtttgcgtcccgaacaatgggtggattttcgcgccttagcaggcgatccgagcgacaatattccgggagttaaaggtatcggcgagaagacggcgctcaagctccttaaagaatgggggtcgttggagaacttgcttaagaatttagatcaggtcaaaccagagtcagtgcgtgagaagattcttgctcacctcgaagacctcaaattaagccgcgaattgtcccgtgtacgcaccgatttgccgctcgaagttgatttcggtcgccgccgcgaacctgactgggagggtcttaaagcgtttttagagcgtcttgaatttggttcgctcttgcatgaattcggccttttagaaagcccgttactggccgaagaagcaccttggccaccgcccgagggcgcgtttttaggttaccgtttgagtcgcccggaaccgatgtgggccgaattactggctcttgcagcgtctgcccagggacgtgtgtatcgcgcggaagaccctcatggtgcgctccgcggcctcttcgaagtccgtggactccttgccaaagacttagctgttgttgcattgcgcgaaggtcttgatttacctccgactgatgatccaatgcttcttgcgtacctcttggacccgtcaaacacgacgcccgaaggcgtagcccgtcgttacggcggcgagtggaccgaagatgcagcgaaacgcgcgttattggccgaacgtttgcacgagaatttactgggacgtttgcaaggcgagaagcgtctcctctggctttacgaagaagtggagaaaccattgagtcgcgtgctcgcgcatatggaagctaccggtgtcaaattagacgtggcgtatttggagaatctcagccttgaagttgctgcccacatgcgccgcttggaggaagaagtagtccgtttagcaggccgttcctttcgccttaactctcgcgatcagttagaacgtgtgttgttcgatgaacttggtctccctcctatcggcaagacagagaagaccggtaaacgtagcacttcagcggcggttttagatgctcttcgctgtgtccatcccattgtggacaagatcttgcagtaccgcgaactcgcgaaattgaaaggcacctatattgaccgtcttccggcattagtccacccgaaaacgggacgcctccatacccgcttcaaccaaacagccacggcgaccggtcgtttgtcctcctctgatccaaaccttcagaatattccagtacgtaccccattgggccagaagatccgccgtgcgtttgtagctgaggagggttggcgtttagtggccctcgattatcgtcaaattgaattacgtgtccttgcccatctttctggcgatgagaacctcatccgcgtgtttgaagaaggcaaagacattcacactcaaacggcaagctggatgtttggattatcagctgaagcgatcgatcctttgatgcgtcgtgcagcgaagaccatcaatttcggtgttctctacggtatgagtgcctttcgtttgtcgcaggagttaggcattccctatgaagaagctcaggcgttcattcagaaatactttcaaagctatcccaaagttaaagcatggatcgagaagactctccgtgaaggccgcacacgtggttacgtagagaccttatttggacgtcgccgctatgttcccgatttaaacgctcgcgtgaaaggcaagcgtgaagccgccgaacgcatggcgttcaacatgcctgtacagggcacggcagctgacctcatgaaacttgcaatggtgcgcctttttccacaattgcgtgaagttggtgcccgcatgctcttgcaggtccacgatgaactcttgttagaagcgccaaaagagcgtgcggaagaggtggcagccctcgcgaaagaagttatggaaggcgtgtggcccttagcggtgcctcttgaagtcgaagttggtattggcgaggattggctggctgccaaagga

SEQ ID NO: 4628 - protein, 841 aa, synthetic construct
  REGION 1..841: note = Variant of DNA polymerase I from Thermus sp. strain 2.9
MHHHHHHGGSGVLPVFEPKGRVLLVDGHHLAYRNFFALKGLTTSLGEPVQGVYGFAKSLLKALKEDGDVVIVVFDAKAPSFRHEAYEAYKAGRAPTPEDFPRQLALMKELVDLLGLERLEVPGFEADDVLATLAKKAEREGYEVQILTADRDLFQLLSPRISVLHPEGHRITPEWLWEKYGLRPEQWVDFRALAGDPSDNIPGVKGIGEKTALKLLKEWGSLENLLKNLDQVKPESVREKILAHLEDLKLSRELSRVRTDLPLEVDFGRRREPDWEGLKAFLERLEFGSLLHEFGLLESPLLAEEAPWPPPEGAFLGYRLSRPEPMWAELLALAASAQGRVYRAEDPHGALRGLFEVRGLLAKDLAVVALREGLDLPPTDDPMLLAYLLDPSNTTPEGVARRYGGEWTEDAAKRALLAERLHENLLGRLQGEKRLLWLYEEVEKPLSRVLAHMEATGVKLDVAYLENLSLEVAAHMRRLEEEVVRLAGRSFRLNSRDQLERVLFDELGLPPIGKTEKTGKRSTSAAVLDALRCVHPIVDKILQYRELAKLKGTYIDRLPALVHPKTGRLHTRFNQTATATGRLSSSDPNLQNIPVRTPLGQKIRRAFVAEEGWRLVALDYRQIELRVLAHLSGDENLIRVFEEGKDIHTQTASWMFGLSAEAIDPLMRRAAKTINFGVLYGMSAFRLSQELGIPYEEAQAFIQKYFQSYPKVKAWIEKTLREGRTRGYVETLFGRRRYVPDLNARVKGKREAAERMAFNMPVQGTAADLMKLAMVRLFPQLREVGARMLLQVHDELLLEAPKERAEEVAALAKEVMEGVWPLAVPLEVEVGIGEDWLAAKG

SEQ ID NO: 4629 - DNA, 2523 bp, synthetic construct
  misc_feature 1..2523: note = Variant of DNA polymerase I from Thermus sp. strain 2.9
  source 1..2523: mol_type = other DNA
atgcaccatcatcatcatcatggcggtagcggcgtgttaccggtgttcgagcctaaaggtcgcgtgcttctggttgatggccatcatctcgcgtatcgtaacttctttgccctgaaaggattaaccaccagcctgggcgagccggtacagggtgtctacggctttgcaaagtcgctcctgaaagctctgaaagaagacggtgatgtggtgattgttgtctttgatgcgaaagcgccaagttttcgccacgaagcgtacgaagcttacaaagccgggcgtgctccaacgccggaagactttcctcgccaattggcgcttatgaaggaattagtggatttgcttggcctcgaacgcttggaagttcccggtttcgaggcagacgacgtattagcgactctcgcaaagaaagccgaacgtgagggctatgaagtccagatcttgacagcagatcgcgatcttttccagcttttatctccgcgcatctcggtgttacacccggaagggcatcgtatcaccccggaatggctctgggagaaatatggtttgcgtcccgaacaatgggtggattttcgcgccttagcaggcgatccgagcgacaatattccgggagttaaaggtatcggcgagaagacggcgctcaagctccttaaagaatgggggtcgttggagaacttgcttaagaatttagatcaggtcaaaccagagtcagtgcgtgagaagattcttgctcacctcgaagacctcaaattaagccgcgaattgtcccgtgtacgcaccgatttgccgctcgaagttgatttcggtcgccgccgcgaacctgactgggagggtcttaaagcgtttttagagcgtcttgaatttggttcgctcttgcatgaattcggccttttagaaagcccgttactggccgaagaagcaccttggccaccgcccgagggcgcgtttttaggttaccgtttgagtcgcccggaaccgatgtgggccgaattactggctcttgcagcgtctgcccagggacgtgtgtatcgcgcggaagaccctcatggtgcgctccgcggcctcttcgaagtccgtggactccttgccaaagacttagctgttgttgcattgcgcgaaggtcttgatttacctccgactgatgatccaatgcttcttgcgtacctcttggacccgtcaaacacgacgcccgaaggcgtagcccgtcgttacggcggcgagtggaccgaagatgcagcgaaacgcgcgttattggccgaacgtttgcacgccaatttattaggacgtttgcaaggcgaggaacgtctcctctggctttacgaagaagtggagaaaccattgagtcgcgtgctcgcgcatatggaagctaccggtgtcaaattagacgtggcgtatttggagaatctcagccttgaagttgctgcccacatgcgccgcttggaggaagaagtaggtcgtttagcaggccgttcctttcgccttaactctcgcgatcagttagaacgtgtgttgttcgatgaacttggtctccctcctatcggcaagacagagaagaccggtaaacgtagcacttcagcggcggttttagaagctcttcgcgaagtccatcccattgtggacaagatcttgcagtaccgcgaactcgcgaaattgaaaggcacctatattgaccgtcttccggcattagtccacccgaaaacgggacgcctccatacccgcttcaaccaaacagccacggcgaccggtcgtttgtcctcctctgatccaaaccttcagaatattccagtacgtaccccattgggccagaagatccgccgtgcgtttgtagctgaggagggttggcgtttagtggccctcgattatcgtcaaattgaattacgtgtccttgcccatctttctggcgatgagaacctcatccgcgtgtttcaggaaggcaaagacattcacactcaaacggcaagctggatgtttggattatcagctgaagcgatcgatcctttgatgcgtcgtgcagcgaagaccatcaatttcggtgttctctacggtatgagtgcctttcgtttgtcgcaggaattaggcattccctatgaagaagctcaggcgttcattcagaaatactttcaaagctatcccaaagttaaagcatggatcgagaagactctccgtgaaggccgcacacgtggttacgtagagaccttatttggacgtcgccgctatgttcccgatttaaacgctcgcgtgaaaggcaagcgtgaagccgccgaacgcatggcgttcaacatgcctgtacagggcacggcagctgacctcatgaaacttgcaatggtgcgcctttttccacaattgcgtgaagttggtgcccgcatgctcttgcaggtccacgatgaactcttgttagaagcgccaaaagagcgtgcggaagaggtggcagccctcgcgaaagaagttatggaaggcgtgtggcccttagcggtgcctcttgaagtcgaagttggtattggcgaggattggctggctgccaaagga

SEQ ID NO: 4630 - protein, 841 aa, synthetic construct
  REGION 1..841: note = Variant of DNA polymerase I from Thermus sp. strain 2.9
MHHHHHHGGSGVLPVFEPKGRVLLVDGHHLAYRNFFALKGLTTSLGEPVQGVYGFAKSLLKALKEDGDVVIVVFDAKAPSFRHEAYEAYKAGRAPTPEDFPRQLALMKELVDLLGLERLEVPGFEADDVLATLAKKAEREGYEVQILTADRDLFQLLSPRISVLHPEGHRITPEWLWEKYGLRPEQWVDFRALAGDPSDNIPGVKGIGEKTALKLLKEWGSLENLLKNLDQVKPESVREKILAHLEDLKLSRELSRVRTDLPLEVDFGRRREPDWEGLKAFLERLEFGSLLHEFGLLESPLLAEEAPWPPPEGAFLGYRLSRPEPMWAELLALAASAQGRVYRAEDPHGALRGLFEVRGLLAKDLAVVALREGLDLPPTDDPMLLAYLLDPSNTTPEGVARRYGGEWTEDAAKRALLAERLHANLLGRLQGEERLLWLYEEVEKPLSRVLAHMEATGVKLDVAYLENLSLEVAAHMRRLEEEVGRLAGRSFRLNSRDQLERVLFDELGLPPIGKTEKTGKRSTSAAVLEALREVHPIVDKILQYRELAKLKGTYIDRLPALVHPKTGRLHTRFNQTATATGRLSSSDPNLQNIPVRTPLGQKIRRAFVAEEGWRLVALDYRQIELRVLAHLSGDENLIRVFQEGKDIHTQTASWMFGLSAEAIDPLMRRAAKTINFGVLYGMSAFRLSQELGIPYEEAQAFIQKYFQSYPKVKAWIEKTLREGRTRGYVETLFGRRRYVPDLNARVKGKREAAERMAFNMPVQGTAADLMKLAMVRLFPQLREVGARMLLQVHDELLLEAPKERAEEVAALAKEVMEGVWPLAVPLEVEVGIGEDWLAAKG

SEQ ID NO: 4631 - DNA, 2523 bp, synthetic construct
  misc_feature 1..2523: note = Variant of DNA polymerase I from Thermus sp. strain 2.9
  source 1..2523: mol_type = other DNA
atgcaccatcatcatcatcatggcggtagcggcgtgttaccggtgttcgagcctaaaggtcgcgtgcttctggttgatggccatcatctcgcgtatcgtaacttctttgccctgaaaggattaaccaccagcctgggcgagccggtacagggtgtctacggctttgcaaagtcgctcctgaaagctctgaaagaagacggtgatgtggtgattgttgtctttgatgcgaaagcgccaagttttcgccacgaagcgtacgaagcttacaaagccgggcgtgctccaacgccggaagactttcctcgccaattggcgcttatgaaggaattagtggatttgcttggcctcgaacgcttggaagttcccggtttcgaggcagacgacgtattagcgactctcgcaaagaaagccgaacgtgagggctatgaagtccagatcttgacagcagatcgcgatcttttccagcttttatctccgcgcatctcggtgttacacccggaagggcatcgtatcaccccggaatggctctgggagaaatatggtttgcgtcccgaacaatgggtggattttcgcgccttagcaggcgatccgagcgacaatattccgggagttaaaggtatcggcgagaagacggcgctcaagctccttaaagaatgggggtcgttggagaacttgcttaagaatttagatcaggtcaaaccagagtcagtgcgtgagaagattcttgctcacctcgaagacctcaaattaagccgcgaattgtcccgtgtacgcaccgatttgccgctcgaagttgatttcggtcgccgccgcgaacctgactgggagggtcttaaagcgtttttagagcgtcttgaatttggttcgctcttgcatgaattcggccttttagaaagcccgttactggccgaagaagcaccttggccaccgcccgagggcgcgtttttaggttaccgtttgagtcgcccggaaccgatgtgggccgaattactggctcttgcagcgtctgcccagggacgtgtgtatcgcgcggaagaccctcatggtgcgctccgcggcctcttcgaagtccgtggactccttgccaaagacttagctgttgttgcattgcgcgaaggtcttgatttacctccgactgatgatccaatgcttcttgcgtacctcttggacccgtcaaacacgacgcccgaaggcgtagcccgtcgttacggcggcgagtggaccgaagatgcagcgaaacgcgcgttattggccgaacgtttgcacgccaatttattaggacgtttgcaaggcgaggaacgtctcctctggctttacgaagaagtggagaaaccattgagtcgcgtgctcgcgcatatggaagctaccggtgtcaaattagacgtggcgtatttggagaatctcagccttgaagttgctgcccacatgcgccgcttggaggaagaagtattccgtttagcaggccgttcctttcgccttaactctcgcgatcagttagaacgtgtgttgttcgatgaacttggtctccctcctatcggcaagacagagaagaccggtaaacgtagcacttcagcggcggttttagaagctcttcgcgaagtccatcccattgtggacaagatcttgcagtaccgcgaactcgcgaaattgaaaggcacctatattgaccgtcttccggcattagtccacccgaaaacgggacgcctccataccacgttcaaccaaacagccacggcgaccggtcgtttgtcctcctctgatccaaaccttcagaatattccagtacgtaccccattgggccagaagatccgccgtgcgtttgtagctgaggagggttggcgtttagtggccctcgattatcgtcaaattgaattacgtgtccttgcccatctttctggcgatgagaacctcatccgcgtgtttcaggaaggcaaagacattcacactcaaacggcaagctggatgtttggattatcagctgaagcgatcgatcctttgatgcgtcgtgcagcgaagaccatcaatttcggtgttctctacggtatgagtgcctttcgtttgtcgcaggaattaggcattccctatgaagaagctcaggcgttcattcagaaatactttcaaagctatcccaaagttaaagcatggatcgagaagactctccgtgaaggccgcacacgtggttacgtagagaccttatttggacgtcgccgctatgttcccgatttaaacgctcgcgtgaaaggcaagcgtgaagccgccgaacgcatggcgttcaacatgcctgtacagggcacggcagctgacctcatgaaacttgcaatggtgcgcctttttccacaattgcgtgaagttggtgcccgcatgctcttgcaggtccacgatgaactcttgttagaagcgccaaaagagcgtgcggaagaggtggcagccctcgcgaaagaagttatggaaggcgtgtggcccttagcggtgcctcttgaagtcgaagttggtattggcgaggattggctggctgccaaagga

SEQ ID NO: 4632 - protein, 841 aa, synthetic construct
  REGION 1..841: note = Variant of DNA polymerase I from Thermus sp. strain 2.9
MHHHHHHGGSGVLPVFEPKGRVLLVDGHHLAYRNFFALKGLTTSLGEPVQGVYGFAKSLLKALKEDGDVVIVVFDAKAPSFRHEAYEAYKAGRAPTPEDFPRQLALMKELVDLLGLERLEVPGFEADDVLATLAKKAEREGYEVQILTADRDLFQLLSPRISVLHPEGHRITPEWLWEKYGLRPEQWVDFRALAGDPSDNIPGVKGIGEKTALKLLKEWGSLENLLKNLDQVKPESVREKILAHLEDLKLSRELSRVRTDLPLEVDFGRRREPDWEGLKAFLERLEFGSLLHEFGLLESPLLAEEAPWPPPEGAFLGYRLSRPEPMWAELLALAASAQGRVYRAEDPHGALRGLFEVRGLLAKDLAVVALREGLDLPPTDDPMLLAYLLDPSNTTPEGVARRYGGEWTEDAAKRALLAERLHANLLGRLQGEERLLWLYEEVEKPLSRVLAHMEATGVKLDVAYLENLSLEVAAHMRRLEEEVFRLAGRSFRLNSRDQLERVLFDELGLPPIGKTEKTGKRSTSAAVLEALREVHPIVDKILQYRELAKLKGTYIDRLPALVHPKTGRLHTTFNQTATATGRLSSSDPNLQNIPVRTPLGQKIRRAFVAEEGWRLVALDYRQIELRVLAHLSGDENLIRVFQEGKDIHTQTASWMFGLSAEAIDPLMRRAAKTINFGVLYGMSAFRLSQELGIPYEEAQAFIQKYFQSYPKVKAWIEKTLREGRTRGYVETLFGRRRYVPDLNARVKGKREAAERMAFNMPVQGTAADLMKLAMVRLFPQLREVGARMLLQVHDELLLEAPKERAEEVAALAKEVMEGVWPLAVPLEVEVGIGEDWLAAKG

SEQ ID NO: 4633 - DNA, 2523 bp, synthetic construct
  misc_feature 1..2523: note = Variant of DNA polymerase I from Thermus sp. strain 2.9
  source 1..2523: mol_type = other DNA
atgcaccatcatcatcatcatggcggtagcggcgtgttaccggtgttcgagcctaaaggtcgcgtgcttctggttgatggccatcatctcgcgtatcgtaacttctttgccctgaaaggattaaccaccagcctgggcgagccggtacagggtgtctacggctttgcaaagtcgctcctgaaagctctgaaagaagacggtgatgtggtgattgttgtctttgatgcgaaagcgccaagttttcgccacgaagcgtacgaagcttacaaagccgggcgtgctccaacgccggaagactttcctcgccaattggcgcttatgaaggaattagtggatttgcttggcctcgaacgcttggaagttcccggtttcgaggcagacgacgtattagcgactctcgcaaagaaagccgaacgtgagggctatgaagtccagatcttgacagcagatcgcgatcttttccagcttttatctccgcgcatctcggtgttacacccggaagggcatcgtatcaccccggaatggctctgggagaaatatggtttgcgtcccgaacaatgggtggattttcgcgccttagcaggcgatccgagcgacaatattccgggagttaaaggtatcggcgagaagacggcgctcaagctccttaaagaatgggggtcgttggagaacttgcttaagaatttagatcaggtcaaaccagagtcagtgcgtgagaagattcttgctcacctcgaagacctcaaattaagccgcgaattgtcccgtgtacgcaccgatttgccgctcgaagttgatttcggtcgccgccgcgaacctgactgggagggtcttaaagcgtttttagagcgtcttgaatttggttcgctcttgcatgaattcggccttttagaaagcccgttactggccgaagaagcaccttggccaccgcccgagggcgcgtttttaggttaccgtttgagtcgcccggaaccgatgtgggccgaattactggctcttgcagcgtctgcccagggacgtgtgtatcgcgcggaagaccctcatggtgcgctccgcggcctcttcgaagtccgtggactccttgccaaagacttagctgttgttgcattgcgcgaaggtcttgatttacctccgactgatgatccaatgcttcttgcgtacctcttggacccgtcaaacacgacgcccgaaggcgtagcccgtcgttacggcggcgagtggaccgaagatgcagcgaaacgcgcgttattggccgaacgtttgcacgccaatttattaggacgtttgcaaggcgaggaacgtctcctctggctttacgaagaagtggagaaaccattgagtcgcgtgctcgcgcatatggaagctaccggtgtcaaattagacgtggcgtatttggagaatctcagccttgaagttgctgcccacatgcgccgcttggaggaagaagtattccgtttagcaggccgttcctttcgccttaactctcgcgatcagttagaacgtgtgttgttcgatgaacttggtctccctcctatcggcaagacagagaagaccggtaaacgtagcacttcagcggcggttttagaagctcttcgcgaagtccatcccattgtggacaagatcttgcagtaccgcgaactcgcgaaattgaaaggcacctatattgaccgtcttccggcattagtccacccgaaaacgggacgcctccatacccgcttcaaccaaacagccacggcgaccggtcgtttgtcctcctctgatgtgaaccttcagaatattccagtacgtaccccattgggccagaagatccgccgtgcgtttgtagctgaggagggttggcgtttagtggccctcgattatcgtcaaattgaattacgtgtccttgcccatctttctggcgatgagaacctcatccgcgtgtttcaggaaggcaaagacattcacactcaaacggcaagctggatgtttggattatcagctgaagcgatcgatcctttgatgcgtcgtgcagcgaagaccatcaatttcggtgttctctacggtatgagtgcctttcgtttgtcgcaggaattaggcattccctatgaagaagctcaggcgttcattcagaaatactttcaaagctatcccaaagttaaagcatggatcgagaagactctccgtgaaggccgcacacgtggttacgtagagaccttatttggacgtcgccgctatgttcccgatttaaacgctcgcgtgaaaggcaagcgtgaagccgccgaacgcatggcgttcaacatgcctgtacagggcacggcagctgacctcatgaaacttgcaatggtgcgcctttttccacaattgcgtgaagttggtgcccgcatgctcttgcaggtccacgatgaactcttgttagaagcgccaaaagagcgtgcggaagaggtggcagccctcgcgaaagaagttatggaaggcgtgtggcccttagcggtgcctcttgaagtcgaagttggtattggcgaggattggctggctgccaaagga

SEQ ID NO: 4634 - protein, 841 aa, synthetic construct
  REGION 1..841: note = Variant of DNA polymerase I from Thermus sp. strain 2.9
MHHHHHHGGSGVLPVFEPKGRVLLVDGHHLAYRNFFALKGLTTSLGEPVQGVYGFAKSLLKALKEDGDVVIVVFDAKAPSFRHEAYEAYKAGRAPTPEDFPRQLALMKELVDLLGLERLEVPGFEADDVLATLAKKAEREGYEVQILTADRDLFQLLSPRISVLHPEGHRITPEWLWEKYGLRPEQWVDFRALAGDPSDNIPGVKGIGEKTALKLLKEWGSLENLLKNLDQVKPESVREKILAHLEDLKLSRELSRVRTDLPLEVDFGRRREPDWEGLKAFLERLEFGSLLHEFGLLESPLLAEEAPWPPPEGAFLGYRLSRPEPMWAELLALAASAQGRVYRAEDPHGALRGLFEVRGLLAKDLAVVALREGLDLPPTDDPMLLAYLLDPSNTTPEGVARRYGGEWTEDAAKRALLAERLHANLLGRLQGEERLLWLYEEVEKPLSRVLAHMEATGVKLDVAYLENLSLEVAAHMRRLEEEVFRLAGRSFRLNSRDQLERVLFDELGLPPIGKTEKTGKRSTSAAVLEALREVHPIVDKILQYRELAKLKGTYIDRLPALVHPKTGRLHTRFNQTATATGRLSSSDVNLQNIPVRTPLGQKIRRAFVAEEGWRLVALDYRQIELRVLAHLSGDENLIRVFQEGKDIHTQTASWMFGLSAEAIDPLMRRAAKTINFGVLYGMSAFRLSQELGIPYEEAQAFIQKYFQSYPKVKAWIEKTLREGRTRGYVETLFGRRRYVPDLNARVKGKREAAERMAFNMPVQGTAADLMKLAMVRLFPQLREVGARMLLQVHDELLLEAPKERAEEVAALAKEVMEGVWPLAVPLEVEVGIGEDWLAAKG

SEQ ID NO: 4635 - DNA, 2523 bp, synthetic construct
  misc_feature 1..2523: note = Variant of DNA polymerase I from Thermus sp. strain 2.9
  source 1..2523: mol_type = other DNA
atgcaccatcatcatcatcatggcggtagcggcgtgttaccggtgttcgagcctaaaggtcgcgtgcttctggttgatggccatcatctcgcgtatcgtaacttctttgccctgaaaggattaaccaccagcctgggcgagccggtacagggtgtctacggctttgcaaagtcgctcctgaaagctctgaaagaagacggtgatgtggtgattgttgtctttgatgcgaaagcgccaagttttcgccacgaagcgtacgaagcttacaaagccgggcgtgctccaacgccggaagactttcctcgccaattggcgcttatgaaggaattagtggatttgcttggcctcgaacgcttggaagttcccggtttcgaggcagacgacgtattagcgactctcgcaaagaaagccgaacgtgagggctatgaagtccagatcttgacagcagatcgcgatcttttccagcttttatctccgcgcatctcggtgttacacccggaagggcatcgtatcaccccggaatggctctgggagaaatatggtttgcgtcccgaacaatgggtggattttcgcgccttagcaggcgatccgagcgacaatattccgggagttaaaggtatcggcgagaagacggcgctcaagctccttaaagaatgggggtcgttggagaacttgcttaagaatttagatcaggtcaaaccagagtcagtgcgtgagaagattcttgctcacctcgaagacctcaaattaagccgcgaattgtcccgtgtacgcaccgatttgccgctcgaagttgatttcggtcgccgccgcgaacctgactgggagggtcttaaagcgtttttagagcgtcttgaatttggttcgctcttgcatgaattcggccttttagaaagcccgttactggccgaagaagcaccttggccaccgcccgagggcgcgtttttaggttaccgtttgagtcgcccggaaccgatgtgggccgaattactggctcttgcagcgtctgcccagggacgtgtgtatcgcgcggaagaccctcatggtgcgctccgcggcctcttcgaagtccgtggactccttgccaaagacttagctgttgttgcattgcgcgaaggtcttgatttacctccgactgatgatccaatgcttcttgcgtacctcttggacccgtcaaacacgacgcccgaaggcgtagcccgtcgttacggcggcgagtggaccgaagatgcagcgaaacgcgcgttattggccgaacgtttgcacgccaatttattaggacgtttgcaaggcgaggaacgtctcctctggctttacgaagaagtggagaaaccattgagtcgcgtgctcgcgcatatggaagctaccggtgtcaaattagacgtggcgtatttggagaatctcagccttgaagttgctgcccacatgcgccgcttggaggaagaagtattccgtttagcaggccgttcctttcgccttaactctcgcgatcagttagaacgtgtgttgttcgatgaacttggtctccctcctatcggcaagacagagaagaccggtaaacgtagcacttcagcggcggttttagaagctcttcgcgaagtccatcccattgtggacaagatcttgcagtaccgcgaactcgcgaaattgaaaggcacctatattgaccgtcttccggcattagtccacccgaaaacgggacgcctccatacccgcttcaaccaaacagccacggcgaccggtcgtttgtcctcctctgatccaaaccttcagaatattccagtacgtaccccattgggccagaagatccgccgtgcgtttgtagctgaggagggttggcgtttagtggccctcgattatcgtcaaattgaattacgtgtccttgcccatctttctggcgatgagaacctcatccgcgtgtttcaggaaggcaaagacattcacactcaaacggcaagctggatgtttggattatcaagggaagcgatcgatcctttgatgcgtcgtgcagcgaagaccatcaatttcggtgttctctacggtatgagtgcctttcgtttgtcgcaggaattaggcattccctatgaagaagctcaggcgttcattcagaaatactttcaaagctatcccaaagttaaagcatggatcgagaagactctccgtgaaggccgcacacgtggttacgtagagaccttatttggacgtcgccgctatgttcccgatttaaacgctcgcgtgaaaggcaagcgtgaagccgccgaacgcatggcgttcaacatgcctgtacagggcacggcagctgacctcatgaaacttgcaatggtgcgcctttttccacaattgcgtgaagttggtgcccgcatgctcttgcaggtccacgatgaactcttgttagaagcgccaaaagagcgtgcggaagaggtggcagccctcgcgaaagaagttatggaaggcgtgtggcccttagcggtgcctcttgaagtcgaagttggtattggcgaggattggctggctgccaaagga

SEQ ID NO: 4636 - protein, 841 aa, synthetic construct
  REGION 1..841: note = Variant of DNA polymerase I from Thermus sp. strain 2.9
MHHHHHHGGSGVLPVFEPKGRVLLVDGHHLAYRNFFALKGLTTSLGEPVQGVYGFAKSLLKALKEDGDVVIVVFDAKAPSFRHEAYEAYKAGRAPTPEDFPRQLALMKELVDLLGLERLEVPGFEADDVLATLAKKAEREGYEVQILTADRDLFQLLSPRISVLHPEGHRITPEWLWEKYGLRPEQWVDFRALAGDPSDNIPGVKGIGEKTALKLLKEWGSLENLLKNLDQVKPESVREKILAHLEDLKLSRELSRVRTDLPLEVDFGRRREPDWEGLKAFLERLEFGSLLHEFGLLESPLLAEEAPWPPPEGAFLGYRLSRPEPMWAELLALAASAQGRVYRAEDPHGALRGLFEVRGLLAKDLAVVALREGLDLPPTDDPMLLAYLLDPSNTTPEGVARRYGGEWTEDAAKRALLAERLHANLLGRLQGEERLLWLYEEVEKPLSRVLAHMEATGVKLDVAYLENLSLEVAAHMRRLEEEVFRLAGRSFRLNSRDQLERVLFDELGLPPIGKTEKTGKRSTSAAVLEALREVHPIVDKILQYRELAKLKGTYIDRLPALVHPKTGRLHTRFNQTATATGRLSSSDPNLQNIPVRTPLGQKIRRAFVAEEGWRLVALDYRQIELRVLAHLSGDENLIRVFQEGKDIHTQTASWMFGLSREAIDPLMRRAAKTINFGVLYGMSAFRLSQELGIPYEEAQAFIQKYFQSYPKVKAWIEKTLREGRTRGYVETLFGRRRYVPDLNARVKGKREAAERMAFNMPVQGTAADLMKLAMVRLFPQLREVGARMLLQVHDELLLEAPKERAEEVAALAKEVMEGVWPLAVPLEVEVGIGEDWLAAKG

SEQ ID NO: 4637 - DNA, 2523 bp, synthetic construct
  misc_feature 1..2523: note = Variant of DNA polymerase I from Thermus sp. strain 2.9
  source 1..2523: mol_type = other DNA
atgcaccatcatcatcatcatggcggtagcggcgtgttaccggtgttcgagcctaaaggtcgcgtgcttctggttgatggccatcatctcgcgtatcgtaacttctttgccctgaaaggattaaccaccagcctgggcgagccggtacagggtgtctacggctttgcaaagtcgctcctgaaagctctgaaagaagacggtgatgtggtgattgttgtctttgatgcgaaagcgccaagttttcgccacgaagcgtacgaagcttacaaagccgggcgtgctccaacgccggaagactttcctcgccaattggcgcttatgaaggaattagtggatttgcttggcctcgaacgcttggaagttcccggtttcgaggcagacgacgtattagcgactctcgcaaagaaagccgaacgtgagggctatgaagtccagatcttgacagcagatcgcgatcttttccagcttttatctccgcgcatctcggtgttacacccggaagggcatcgtatcaccccggaatggctctgggagaaatatggtttgcgtcccgaacaatgggtggattttcgcgccttagcaggcgatccgagcgacaatattccgggagttaaaggtatcggcgagaagacggcgctcaagctccttaaagaatgggggtcgttggagaacttgcttaagaatttagatcaggtcaaaccagagtcagtgcgtgagaagattcttgctcacctcgaagacctcaaattaagccgcgaattgtcccgtgtacgcaccgatttgccgctcgaagttgatttcggtcgccgccgcgaacctgactgggagggtcttaaagcgtttttagagcgtcttgaatttggttcgctcttgcatgaattcggccttttagaaagcccgttactggccgaagaagcaccttggccaccgcatgagggcgcgtttttaggttaccgtttgagtcgcccggaaccgatgtgggccgaattactggctcttgcagcgtctgcccagggacgtgtgtatcgcgcggaagaccctcatggtgcgctccgcggcctcttcgaagtccgtggactccttgccaaagacttagctgttgttgcattgcgcgaaggtcttgatttacctccgactgatgatccaatgcttcttgcgtacctcttggacccgtcaaacacgacgcccgaaggcgtagcccgtcgttacggcggcgagtggaccgaagatgcagcgaaacgcgcgttattggccgaacgtttgcacgccaatttattaggacgtttgcaaggcgaggaacgtctcctctggctttacgaagaagtggagaaaccattgagtcgcgtgctcgcgcatatggaagctaccggtgtcaaattagacgtggcgtatttggagaatctcagccttgaagttgctgcccacatgcgccgcttggaggaagaagtattccgtttagcaggccgttcctttcgccttaactctcgcgatcagttagaacgtgtgttgttcgatgaacttggtctccctcctatcggcaagacagagaagaccggtaaacgtagcacttcagcggcggttttagaagctcttcgcgaagtccatcccattgtggacaagatcttgcagtaccgcgaactcgcgaaattgaaaggcacctatattgaccgtcttccggcattagtccacccgaaaacgggacgcctccatacccgcttcaaccaaacagccacggcgaccggtcgtttgtcctcctctgatccaaaccttcagaatattccagtacgtaccccattgggccagaagatccgccgtgcgtttgtagctgaggagggttggcgtttagtggccctcgattatcgtcaaattgaattacgtgtccttgcccatctttctggcgatgagaacctcatccgcgtgtttcaggaaggcaaagacattcacactcaaacggcaagctggatgtttggattatcagctgaagcgatcgatcctttgatgcgtcgtgcagcgaagaccatcaatttcggtgttctctacggtatgagtgcctttcgtttgtcgcaggaattaggcattccctatgaagaagctcaggcgttcattcagaaatactttcaaagctatcccaaagttaaagcatggatcgagaagactctccgtgaaggccgcacacgtggttacgtagagaccttatttggacgtcgccgctatgttcccgatttaaacgctcgcgtgaaaggcaagcgtgaagccgccgaacgcatggcgttcaacatgcctgtacagggcacggcagctgacctcatgaaacttgcaatggtgcgcctttttccacaattgcgtgaagttggtgcccgcatgctcttgcaggtccacgatgaactcttgttagaagcgccaaaagagcgtgcggaagaggtggcagccctcgcgaaagaagttatggaaggcgtgtggcccttagcggtgcctcttgaagtcgaagttggtattggcgaggattggctggctgccaaagga

SEQ ID NO: 4638 - protein, 841 aa, synthetic construct
  REGION 1..841: note = Variant of DNA polymerase I from Thermus sp. strain 2.9
MHHHHHHGGSGVLPVFEPKGRVLLVDGHHLAYRNFFALKGLTTSLGEPVQGVYGFAKSLLKALKEDGDVVIVVFDAKAPSFRHEAYEAYKAGRAPTPEDFPRQLALMKELVDLLGLERLEVPGFEADDVLATLAKKAEREGYEVQILTADRDLFQLLSPRISVLHPEGHRITPEWLWEKYGLRPEQWVDFRALAGDPSDNIPGVKGIGEKTALKLLKEWGSLENLLKNLDQVKPESVREKILAHLEDLKLSRELSRVRTDLPLEVDFGRRREPDWEGLKAFLERLEFGSLLHEFGLLESPLLAEEAPWPPHEGAFLGYRLSRPEPMWAELLALAASAQGRVYRAEDPHGALRGLFEVRGLLAKDLAVVALREGLDLPPTDDPMLLAYLLDPSNTTPEGVARRYGGEWTEDAAKRALLAERLHANLLGRLQGEERLLWLYEEVEKPLSRVLAHMEATGVKLDVAYLENLSLEVAAHMRRLEEEVFRLAGRSFRLNSRDQLERVLFDELGLPPIGKTEKTGKRSTSAAVLEALREVHPIVDKILQYRELAKLKGTYIDRLPALVHPKTGRLHTRFNQTATATGRLSSSDPNLQNIPVRTPLGQKIRRAFVAEEGWRLVALDYRQIELRVLAHLSGDENLIRVFQEGKDIHTQTASWMFGLSAEAIDPLMRRAAKTINFGVLYGMSAFRLSQELGIPYEEAQAFIQKYFQSYPKVKAWIEKTLREGRTRGYVETLFGRRRYVPDLNARVKGKREAAERMAFNMPVQGTAADLMKLAMVRLFPQLREVGARMLLQVHDELLLEAPKERAEEVAALAKEVMEGVWPLAVPLEVEVGIGEDWLAAKG

SEQ ID NO: 4639 - DNA, 2523 bp, synthetic construct
  misc_feature 1..2523: note = Variant of DNA polymerase I from Thermus sp. strain 2.9
  source 1..2523: mol_type = other DNA
atgcaccatcatcatcatcatggcggtagcggcgtgttaccggtgttcgagcctaaaggtcgcgtgcttctggttgatggccatcatctcgcgtatcgtaacttctttgccctgaaaggattaaccaccagcctgggcgagccggtacagggtgtctacggctttgcaaagtcgctcctgaaagctctgaaagaagacggtgatgtggtgattgttgtctttgatgcgaaagcgccaagttttcgccacgaagcgtacgaagcttacaaagccgggcgtgctccaacgccggaagactttcctcgccaattggcgcttatgaaggaattagtggatttgcttggcctcgaacgcttggaagttcccggtttcgaggcagacgacgtattagcgactctcgcaaagaaagccgaacgtgagggctatgaagtccagatcttgacagcagatcgcgatcttttccagcttttatctccgcgcatctcggtgttacacccggaagggcatcgtatcaccccggaatggctctgggagaaatatggtttgcgtcccgaacaatgggtggattttcgcgccttagcaggcgatccgagcgacaatattccgggagttaaaggtatcggcgagaagacggcgctcaagctccttaaagaatgggggtcgttggagaacttgcttaagaatttagatcaggtcaaaccagagtcagtgcgtgagaagattcttgctcacctcgaagacctcaaattaagccgcgaattgtcccgtgtacgcaccgatttgccgctcgaagttgatttcggtcgccgccgcgaacctgactgggagggtcttaaagcgtttttagagcgtcttgaatttggttcgctcctgcatgaattcggccttttagaaagcccgttagtggccgaagaagcaccttggccaccgcccgagggcgcgtttttaggttaccgtttgagtcgcccggaaccgatgtgggccgaattactggctcttgcagcgtctgcccagggacgtgtgtatcgcgcggaagaccctcatggtgcgctccgcggcctcttcgaagtccgtggactccttgccaaagacttagctgttgttgcattgcgcgaaggtcttgatttacctccgactgatgatccaatgcttcttgcgtacctcttggacccgtcaaacacgacgcccgaaggcgtagcccgtcgttacggcggcgagtggaccgaagatgcagcgaaacgcgcgttattggccgaacgtttgcacgaaaatttattaggacgtttgcaaggcgagaaacgtctcctctggctttacgaagaagtggagaaaccattgagtcgcgtgctcgcgcatatggaagctaccggtgtcaaattagacgtggcgtatttggagaatctcagccttgaagttgctgcccacatgcgccgcttggaggaagaagtattccgtttagcaggccgttcctttcgccttaactctcgcgatcagttagaacgtgtgttgttcgatgaacttggtctccctcctatcggcaagacagagaagaccggtaaacgtagcacttcagcagcggttttagacgctcttcgcgaagtccatcccattgtggacaagatcttgcagtaccgcgaactcgcgaaattgaaaggcacctatattgaccgtcttccggcattagtccacccgaaaacgggacgcctccatacccgcttcaaccaaacagccacggcgaccggtcgtttgtcctcctctgatccaaaccttcagaatattccagtacgtaccccattgggccagaagatccgccgtgcgtttgtagctgaggagggttggcgtttagtggccctcgattatcgtcaaattgaattacgtgtccttgcccatctttctggcgatgagaacctcatccgcgtgtttcaggaaggcaaagacattcacactcaaacggcaagctggatgtttggattatcagctgaagcgatcgatcctttgatgcgtcgtgcagcgaagaccatcaatttcggtgttctctacggtatgagtgcatttcgtttgtcgcaggaattaggcattcccaaggaagaagctcaggcgttcattcagaaatactttcaaagctatcccaaagttaaagcatggatcgagaagactctccgtgaaggccgcacacgtggttacgtagagaccttatttggacgtcgccgctatgttcccgatttaaacgctcgcgtgaaaggcaagcgtgaagccgccgaacgcatggcgttcaacatgcctgtacagggcacggcagctgacctcatgaaacttgcaatggtgcgcctttttccacaattgcgtgaagttggtgcccgcatgctcttgcaggtccacgatgaactcttgttagaagcgccaaaagagcgtgcggaagaggtggcagccctcgcgaaagaagttatggaaggcgtgtggcccttagcggtgcctcttgaagtcgaagttggtattggcgaggattggctggctgccaaagga

SEQ ID NO: 4640 - protein, 841 aa, synthetic construct
  REGION 1..841: note = Variant of DNA polymerase I from Thermus sp. strain 2.9
MHHHHHHGGSGVLPVFEPKGRVLLVDGHHLAYRNFFALKGLTTSLGEPVQGVYGFAKSLLKALKEDGDVVIVVFDAKAPSFRHEAYEAYKAGRAPTPEDFPRQLALMKELVDLLGLERLEVPGFEADDVLATLAKKAEREGYEVQILTADRDLFQLLSPRISVLHPEGHRITPEWLWEKYGLRPEQWVDFRALAGDPSDNIPGVKGIGEKTALKLLKEWGSLENLLKNLDQVKPESVREKILAHLEDLKLSRELSRVRTDLPLEVDFGRRREPDWEGLKAFLERLEFGSLLHEFGLLESPLVAEEAPWPPPEGAFLGYRLSRPEPMWAELLALAASAQGRVYRAEDPHGALRGLFEVRGLLAKDLAVVALREGLDLPPTDDPMLLAYLLDPSNTTPEGVARRYGGEWTEDAAKRALLAERLHENLLGRLQGEKRLLWLYEEVEKPLSRVLAHMEATGVKLDVAYLENLSLEVAAHMRRLEEEVFRLAGRSFRLNSRDQLERVLFDELGLPPIGKTEKTGKRSTSAAVLDALREVHPIVDKILQYRELAKLKGTYIDRLPALVHPKTGRLHTRFNQTATATGRLSSSDPNLQNIPVRTPLGQKIRRAFVAEEGWRLVALDYRQIELRVLAHLSGDENLIRVFQEGKDIHTQTASWMFGLSAEAIDPLMRRAAKTINFGVLYGMSAFRLSQELGIPKEEAQAFIQKYFQSYPKVKAWIEKTLREGRTRGYVETLFGRRRYVPDLNARVKGKREAAERMAFNMPVQGTAADLMKLAMVRLFPQLREVGARMLLQVHDELLLEAPKERAEEVAALAKEVMEGVWPLAVPLEVEVGIGEDWLAAKG

SEQ ID NO: 4641 - DNA, 2523 bp, synthetic construct
  misc_feature 1..2523: note = Variant of DNA polymerase I from Thermus sp. strain 2.9
  source 1..2523: mol_type = other DNA
atgcaccatcatcatcatcatggcggtagcggcgtgttaccggtgttcgagcctaaaggtcgcgtgcttctggttgatggccatcatctcgcgtatcgtaacttctttgccctgaaaggattaaccaccagcctgggcgagccggtacagggtgtctacggctttgcaaagtcgctcctgaaagctctgaaagaagacggtgatgtggtgattgttgtctttgatgcgaaagcgccaagttttcgccacgaagcgtacgaagcttacaaagccgggcgtgctccaacgccggaagactttcctcgccaattggcgcttatgaaggaattagtggatttgcttggcctcgaacgcttggaagttcccggtttcgaggcagacgacgtattagcgactctcgcaaagaaagccgaacgtgagggctatgaagtccagatcttgacagcagatcgcgatcttttccagcttttatctccgcgcatctcggtgttacacccggaagggcatcgtatcaccccggaatggctctgggagaaatatggtttgcgtcccgaacaatgggtggattttcgcgccttagcaggcgatccgagcgacaatattccgggagttaaaggtatcggcgagaagacggcgctcaagctccttaaagaatgggggtcgttggagaacttgcttaagaatttagatcaggtcaaaccagagtcagtgcgtgagaagattcttgctcacctcgaagacctcaaattaagccgcgaattgtcccgtgtacgcaccgatttgccgctcgaagttgatttcggtcgccgccgcgaacctgactgggagggtcttaaagcgtttttagagcgtcttgaatttggttcgctcttgcatgaattcggccttttagaaagcccgttactggccgaagaagcaccttggccaccgcccgagggcgcgtttttaggttaccgtttgagtcgcccggaaccgatgtgggccgaattactggctcttgcagcgtctgcccagggacgtgtgtatcgcgcggaagaccctcatggtgcgctccgcggcctcttcgaagtccgtggactccttgccaaagacttagctgttgttgcattgcgcgaaggtcttgatttacctccgactgatgatccaatgcttcttgcgtacctcttggacccgtcaaacacgacgcccgaaggcgtagcccgtcgttacggcggcgagtggaccgaagatgcagcgaaacgcgcgttattggccgaacgtttgcacgccaatttattaggacgtttgcaaggcgaggaacgtctcctctggctttacgaagaagtggagaaaccattgagtcgcgtgctcgcgcatatggaagctaccggtgtcaaattagacgtggcgtatttggagaatctcagccttgaagttgctgcccacatgcgccgcttggaggaagaagtattccgtttagcaggccgttcctttcgccttaactctcgcgatcagttagaacgtgtgttgttcgatgaacttggtctccctcctatcggcaagacagagaagaccggtaaacgtagcacttcagcggcggttttagaagctcttcgcgaagtccatcccattgtggacaagatcttgcagtaccgcgaactcgcgaaattgaaaggcacctatattgaccgtcttccggcattagtccacccgaaaacgggacgcctccatacccgcttcaaccaaacagccacggcgaccggtcgtttgtcctcctctgattttaaccttcagaatattccagtacgtaccccattgggccagaagatccgccgtgcgtttgtagctgaggagggttggcgtttagtggccctcgattatcgtcaaattgaattacgtgtccttgcccatctttctggcgatgagaacctcatccgcgtgtttcaggaaggcaaagacattcacactcaaacggcaagctggatgtttggattatcagctgaagcgatcgatcctttgatgcgtcgtgcagcgaagaccatcaatttcggtgttctctacggtatgagtgcctttcgtttgtcgcaggaattaggcattccctatgaagaagctcaggcgttcattcagaaatactttcaaagctatcccaaagttaaagcatggatcgagaagactctccgtgaaggccgcacacgtggttacgtagagaccttatttggacgtcgccgctatgttcccgatttaaacgctcgcgtgaaaggcaagcgtgaagccgccgaacgcatggcgttcaacatgcctgtacagggcacggcagctgacctcatgaaacttgcaatggtgcgcctttttccacaattgcgtgaagttggtgcccgcatgctcttgcaggtccacgatgaactcttgttagaagcgccaaaagagcgtgcggaagaggtggcagccctcgcgaaagaagttatggaaggcgtgtggcccttagcggtgcctcttgaagtcgaagttggtattggcgaggattggctggctgccaaagga

SEQ ID NO: 4642 - protein, 841 aa, synthetic construct
  REGION 1..841: note = Variant of DNA polymerase I from Thermus sp. strain 2.9
MHHHHHHGGSGVLPVFEPKGRVLLVDGHHLAYRNFFALKGLTTSLGEPVQGVYGFAKSLLKALKEDGDVVIVVFDAKAPSFRHEAYEAYKAGRAPTPEDFPRQLALMKELVDLLGLERLEVPGFEADDVLATLAKKAEREGYEVQILTADRDLFQLLSPRISVLHPEGHRITPEWLWEKYGLRPEQWVDFRALAGDPSDNIPGVKGIGEKTALKLLKEWGSLENLLKNLDQVKPESVREKILAHLEDLKLSRELSRVRTDLPLEVDFGRRREPDWEGLKAFLERLEFGSLLHEFGLLESPLLAEEAPWPPPEGAFLGYRLSRPEPMWAELLALAASAQGRVYRAEDPHGALRGLFEVRGLLAKDLAVVALREGLDLPPTDDPMLLAYLLDPSNTTPEGVARRYGGEWTEDAAKRALLAERLHANLLGRLQGEERLLWLYEEVEKPLSRVLAHMEATGVKLDVAYLENLSLEVAAHMRRLEEEVFRLAGRSFRLNSRDQLERVLFDELGLPPIGKTEKTGKRSTSAAVLEALREVHPIVDKILQYRELAKLKGTYIDRLPALVHPKTGRLHTRFNQTATATGRLSSSDFNLQNIPVRTPLGQKIRRAFVAEEGWRLVALDYRQIELRVLAHLSGDENLIRVFQEGKDIHTQTASWMFGLSAEAIDPLMRRAAKTINFGVLYGMSAFRLSQELGIPYEEAQAFIQKYFQSYPKVKAWIEKTLREGRTRGYVETLFGRRRYVPDLNARVKGKREAAERMAFNMPVQGTAADLMKLAMVRLFPQLREVGARMLLQVHDELLLEAPKERAEEVAALAKEVMEGVWPLAVPLEVEVGIGEDWLAAKG

SEQ ID NO: 4643 - DNA, 2523 bp, synthetic construct
  misc_feature 1..2523: note = Variant of DNA polymerase I from Thermus sp. strain 2.9
  source 1..2523: mol_type = other DNA
atgcaccatcatcatcatcatggcggtagcggcgtgttaccggtgttcgagcctaaaggtcgcgtgcttctggttgatggccatcatctcgcgtatcgtaacttctttgccctgaaaggattaaccaccagcctgggcgagccggtacagggtgtctacggctttgcaaagtcgctcctgaaagctctgaaagaagacggtgatgtggtgattgttgtctttgatgcgaaagcgccaagttttcgccacgaagcgtacgaagcttacaaagccgggcgtgctccaacgccggaagactttcctcgccaattggcgcttatgaaggaattagtggatttgcttggcctcgaacgcttggaagttcccggtttcgaggcagacgacgtattagcgactctcgcaaagaaagccgaacgtgagggctatgaagtccagatcttgacagcagatcgcgatcttttccagcttttatctccgcgcatctcggtgttacacccggaagggcatcgtatcaccccggaatggctctgggagaaatatggtttgcgtcccgaacaatgggtggattttcgcgccttagcaggcgatccgagcgacaatattccgggagttaaaggtatcggcgagaagacggcgctcaagctccttaaagaatgggggtcgttggagaacttgcttaagaatttagatcaggtcaaaccagagtcagtgcgtgagaagattcttgctcacctcgaagacctcaaattaagccgcgaattgtcccgtgtacgcaccgatttgccgctcgaagttgatttcggtcgccgccgcgaacctgactgggagggtcttaaagcgtttttagagcgtcttgaatttggttcgctcttgcatgaattcggccttttagaaagcccgttactggccgaagaagcaccttggccaccgcccgagggcgcgtttttaggttaccgtttgagtcgcccggaaccgatgtgggccgaattactggctcttgcagcgtctgcccagggacgtgtgtatcgcgcggaagaccctcatggtgcgctccgcggcctcttcgaagtccgtggactccttgccaaagacttagctgttgttgcattgcgcgaaggtcttgatttacctccgactgatgatccaatgcttcttgcgtacctcttggacccgacgaacacgacgcccgaaggcgtagcccgtcgttacggcggcgagtggaccgaagatgcagcgaaacgcgcgttattggccgaacgtttgcacgccaatttattaggacgtttgcaaggcgaggaacgtctcctctggctttacgaagaagtggagaaaccattgagtcgcgtgctcgcgcatatggaagctaccggtgtcaaattagacgtggcgtatttggagaatctcagccttgaagttgctgcccacatgcgccgcttggaggaagaagtattccgtttagcaggccgttcctttcgccttaactctcgcgatcagttagaacgtgtgttgttcgatgaacttggtctccctcctatcggcaagacagagaagaccggtaaacgtagcacttcagcggcggttttagaagctcttcgcgaagtccatcccattgtggacaagatcttgcagtaccgcgaactcgcgaaattgaaaggcacctatattgaccgtcttccggcattagtccacccgaaaacgggacgcctccatacccgcttcaaccaaacagccacggcgaccggtcgtttgtcctcctctgatccaaaccttcagaatattccagtacgtaccccattgggccagaagatccgccgtgcgtttgtagctgaggagggttggcgtttagtggccctcgattatcgtcaaattgaattacgtgtccttgcccatctttctggcgatgagaacctcatccgcgtgtttcaggaaggcaaagacattcacactcaaacggcaagctggatgtttggattatcagctgaagcgatcgatcctttgatgcgtcgtgcagcgaagaccatcaatttcggtgttctctacggtatgagtgcctttcgtttgtcgcaggaattaggcattccctatgaagaagctcaggcgttcattcagaaatactttcaaagctatcccaaagttaaagcatggatcgagaagactctccgtgaaggccgcacacgtggttacgtagagaccttatttggacgtcgccgctatgttcccgatttaaacgctcgcgtgaaaggcaagcgtgaagccgccgaacgcatggcgttcaacatgcctgtacagggcacggcagctgacctcatgaaacttgcaatggtgcgcctttttccacaattgcgtgaagttggtgcccgcatgctcttgcaggtccacgatgaactcttgttagaagcgccaaaagagcgtgcggaagaggtggcagccctcgcgaaagaagttatggaaggcgtgtggcccttagcggtgcctcttgaagtcgaagttggtattggcgaggattggctggctgccaaagga

SEQ ID NO: 4644 - protein, 841 aa, synthetic construct
  REGION 1..841: note = Variant of DNA polymerase I from Thermus sp. strain 2.9
MHHHHHHGGSGVLPVFEPKGRVLLVDGHHLAYRNFFALKGLTTSLGEPVQGVYGFAKSLLKALKEDGDVVIVVFDAKAPSFRHEAYEAYKAGRAPTPEDFPRQLALMKELVDLLGLERLEVPGFEADDVLATLAKKAEREGYEVQILTADRDLFQLLSPRISVLHPEGHRITPEWLWEKYGLRPEQWVDFRALAGDPSDNIPGVKGIGEKTALKLLKEWGSLENLLKNLDQVKPESVREKILAHLEDLKLSRELSRVRTDLPLEVDFGRRREPDWEGLKAFLERLEFGSLLHEFGLLESPLLAEEAPWPPPEGAFLGYRLSRPEPMWAELLALAASAQGRVYRAEDPHGALRGLFEVRGLLAKDLAVVALREGLDLPPTDDPMLLAYLLDPTNTTPEGVARRYGGEWTEDAAKRALLAERLHANLLGRLQGEERLLWLYEEVEKPLSRVLAHMEATGVKLDVAYLENLSLEVAAHMRRLEEEVFRLAGRSFRLNSRDQLERVLFDELGLPPIGKTEKTGKRSTSAAVLEALREVHPIVDKILQYRELAKLKGTYIDRLPALVHPKTGRLHTRFNQTATATGRLSSSDPNLQNIPVRTPLGQKIRRAFVAEEGWRLVALDYRQIELRVLAHLSGDENLIRVFQEGKDIHTQTASWMFGLSAEAIDPLMRRAAKTINFGVLYGMSAFRLSQELGIPYEEAQAFIQKYFQSYPKVKAWIEKTLREGRTRGYVETLFGRRRYVPDLNARVKGKREAAERMAFNMPVQGTAADLMKLAMVRLFPQLREVGARMLLQVHDELLLEAPKERAEEVAALAKEVMEGVWPLAVPLEVEVGIGEDWLAAKG

SEQ ID NO: 4645 - DNA, 2523 bp, synthetic construct
  misc_feature 1..2523: note = Variant of DNA polymerase I from Thermus sp. strain 2.9
  source 1..2523: mol_type = other DNA
atgcaccatcatcatcatcatggcggtagcggcgtgttaccggtgttcgagcctaaaggtcgcgtgcttctggttgatggccatcatctcgcgtatcgtaacttctttgccctgaaaggattaaccaccagcctgggcgagccggtacagggtgtctacggctttgcaaagtcgctcctgaaagctctgaaagaagacggtgatgtggtgattgttgtctttgatgcgaaagcgccaagttttcgccacgaagcgtacgaagcttacaaagccgggcgtgctccaacgccggaagactttcctcgccaattggcgcttatgaaggaattagtggatttgcttggcctcgaacgcttggaagttcccggtttcgaggcagacgacgtattagcgactctcgcaaagaaagccgaacgtgagggctatgaagtccagatcttgacagcagatcgcgatcttttccagcttttatctccgcgcatctcggtgttacacccggaagggcatcgtatcaccccggaatggctctgggagaaatatggtttgcgtcccgaacaatgggtggattttcgcgccttagcaggcgatccgagcgacaatattccgggagttaaaggtatcggcgagaagacggcgctcaagctccttaaagaatgggggtcgttggagaacttgcttaagaatttagatcaggtcaaaccagagtcagtgcgtgagaagattcttgctcacctcgaagacctcaaattaagccgcgaattgtccagtgtacgcaccgatttgccgctcgaagttgatttcggtcgccgccgcgaacctgactgggagggtcttaaagcgtttttagagcgtcttgaatttggttcgctcttgcatgaattcggccttttagaaagcccgttactggccgaagaagcaccttggccaccgcccgagggcgcgtttttaggttaccgtttgagtcgcccggaaccgatgtgggccgaattactggctcttgcagcgtctgcccagggacgtgtgtatcgcgcggaagaccctcatggtgcgctccgcggcctcttcgaagtccgtggactccttgccaaagacttagctgttgttgcattgcgcgaaggtcttgatttacctccgactgatgatccaatgcttcttgcgtacctcttggacccgtcaaacacgacgcccgaaggcgtagcccgtcgttacggcggcgagtggaccgaagatgcagcgaaacgcgcgttattggccgaacgtttgcacgccaatttattaggacgtttgcaaggcgaggaacgtctcctctggctttacgaagaagtggagaaaccattgagtcgcgtgctcgcgcatatggaatttaccggtgtcaaattagacgtggcgtatttggagaatctcagccttgaagttgctgcccacatgcgccgcttggaggaagaagtattccgtttagcaggccgttcctttcgccttaactctcgcgatcagttagaacgtgtgttgttcgatgaacttggtctccctcctatcggcaagacagagaagaccggtaaacgtagcacttcagcggcggttttagaagctcttcgcgaagtccatcccattgtggacaagatcttgcagtaccgcgaactcgcgaaattgaaaggcacctatattgaccgtcttccggcattagtccacccgaaaacgggacgcctccatacccgcttcaaccaaacagccacggcgaccggtcgtttgtcctcctctgatccaaaccttcagaatattccagtacgtaccccattgggccagaagatccgccgtgcgtttgtagctgaggagggttggcgtttagtggccctcgattatcgtcaaattgaattacgtgtccttgcccatctttctggcgatgagaacctcatccgcgtgtttcaggaaggcaaagacattcacacccaaacggcaagctggatgtttggattatcagctgaagcgatcgatcctttgatgcgtcgtgcagcgaagaccatcaatttcggtgttctctacggtatgagtgcctttcgtttgtcgcaggaattaggcattccctatgaagaagctcaggcgttcattcagaaatactttcaaagctatcccaaagttaaagcatggatcgagaagactctccgtgaaggccgcacacgtggttacgtagagaccttatttggacgtcgccgctatgttcccgatttaaacgctcgcgtgaaaggcaagcgtgaagccgccgaacgcatggcgttcaacatgcctgtacagggcacggcagctgacctcatgaaacttgcaatggtgcgcctttttccacaattgcgtgaagttggtgcccgcatgctcttgcaggtccacgatgaactcttgttagaagcgccaaaagagcgtgcggaagaggtggcagccctcgcgaaagaagttatggaaggcgtgtggcccttagcggtgcctcttgaagtcgaagttggtattggcgaggattggctggctgccaaagga

SEQ ID NO: 4646 - protein, 841 aa, synthetic construct
  REGION 1..841: note = Variant of DNA polymerase I from Thermus sp. strain 2.9
MHHHHHHGGSGVLPVFEPKGRVLLVDGHHLAYRNFFALKGLTTSLGEPVQGVYGFAKSLLKALKEDGDVVIVVFDAKAPSFRHEAYEAYKAGRAPTPEDFPRQLALMKELVDLLGLERLEVPGFEADDVLATLAKKAEREGYEVQILTADRDLFQLLSPRISVLHPEGHRITPEWLWEKYGLRPEQWVDFRALAGDPSDNIPGVKGIGEKTALKLLKEWGSLENLLKNLDQVKPESVREKILAHLEDLKLSRELSSVRTDLPLEVDFGRRREPDWEGLKAFLERLEFGSLLHEFGLLESPLLAEEAPWPPPEGAFLGYRLSRPEPMWAELLALAASAQGRVYRAEDPHGALRGLFEVRGLLAKDLAVVALREGLDLPPTDDPMLLAYLLDPSNTTPEGVARRYGGEWTEDAAKRALLAERLHANLLGRLQGEERLLWLYEEVEKPLSRVLAHMEFTGVKLDVAYLENLSLEVAAHMRRLEEEVFRLAGRSFRLNSRDQLERVLFDELGLPPIGKTEKTGKRSTSAAVLEALREVHPIVDKILQYRELAKLKGTYIDRLPALVHPKTGRLHTRFNQTATATGRLSSSDPNLQNIPVRTPLGQKIRRAFVAEEGWRLVALDYRQIELRVLAHLSGDENLIRVFQEGKDIHTQTASWMFGLSAEAIDPLMRRAAKTINFGVLYGMSAFRLSQELGIPYEEAQAFIQKYFQSYPKVKAWIEKTLREGRTRGYVETLFGRRRYVPDLNARVKGKREAAERMAFNMPVQGTAADLMKLAMVRLFPQLREVGARMLLQVHDELLLEAPKERAEEVAALAKEVMEGVWPLAVPLEVEVGIGEDWLAAKG

SEQ ID NO: 4647 - DNA, 2523 bp, synthetic construct
  misc_feature 1..2523: note = Variant of DNA polymerase I from Thermus sp. strain 2.9
  source 1..2523: mol_type = other DNA
atgcaccatcatcatcatcatggcggtagcggcgtgttaccggtgttcgagcctaaaggtcgcgtgcttctggttgatggccatcatctcgcgtatcgtaacttctttgccctgaaaggattaaccaccagcctgggcgagccggtacagggtgtctacggctttgcaaagtcgctcctgaaagctctgaaagaagacggtgatgtggtgattgttgtctttgatgcgaaagcgccaagttttcgccacgaagcgtacgaagcttacaaagccgggcgtgctccaacgccggaagactttcctcgccaattggcgcttatgaaggaattagtggatttgcttggcctcgaacgcttggaagttcccggtttcgaggcagacgacgtattagcgactctcgcaaagaaagccgaacgtgagggctatgaagtccagatcttgacagcagatcgcgatcttttccagcttttatctccgcgcatctcggtgttacacccggaagggcatcgtatcaccccggaatggctctgggagaaatatggtttgcgtcccgaacaatgggtggattttcgcgccttagcaggcgatccgagcgacaatattccgggagttaaaggtatcggcgagaagacggcgctcaagctccttaaagaatgggggtcgttggagaacttgcttaagaatttagatcaggtcaaaccagagtcagtgcgtgagaagattcttgctcacctcgaagacctcaaattaagccgcgaattgtcccgtgtacgcaccgatttgccgctcgaagttgatttcggtcgccgccgcgaacctgactgggagggtcttaaagcgtttttagagcgtcttgaatttggttcgctcttgcatgaattcggccttttagaaagcccgttactggccgaagaagcaccttggccaccgcccgagggcgcgtttttaggttaccgtttgagtcgcccggaaccgatgtgggccgaattactggctcttgcagcgtctgcccagggacgtgtgtatcgcgcggaagaccctcatggtgcgctccgcggcctcttcgaagtccgtggactccttgccaaagacttagctgttgttgcattgcgcgaaggtcttgatttacctccgactgatgatccaatgcttcttgcgtacctcttggacccgtcaaacacgacgcccgaaggcgtagcccgtcgttacggcggcgagtggaccgaagatgcagcgaaacgcgcgttattggccgaacgtttgcacgccaatttattaggacgtttgcaaggcgaggaacgtctcctctggctttacgaagaagtggagaaaccattgagtcgcgtgctcgcgcatatggaacagaccggtgtcaaattagacgtggcgtatttggagaatctcagccttgaagttgctgcccacatgcgccgcttggaggaagaagtattccgtttagcaggccgttcctttcgccttaactctcgcgatcagttagaacgtgtgttgttcgatgaacttggtctccctcctatcggcaagacagagaagaccggtaaacgtagcacttcagcggcggttttagaagctcttcgcgaagtccatcccattgtggacaagatcttgcagtaccgcgaactcgcgaaattgaaaggcacctatattgaccgtcttccggcattagtccacccgaaaacgggacgcctccatacccgcttcaaccaaacagccacggcgaccggtcgtttgtcctcctctgatccaaaccttcagaatattccagtacgtaccccattgggccagaagatccgccgtgcgtttgtagctgaggagggttggcgtttagtggccctcgattatcgtcaaattgaattacgtgtccttgcccatctttctggcgatgagaacctcatccgcgtgtttcaggaaggcaaagacattcacactcaaacggcaagctggatgtttggattatcagctgaagcgatcgatcctttgatgcgtcgtgcagcgaagaccatcaatttcggtgttctctacggtatgagtgcctttcgtttgtcgcaggaattaggcattccctatgaagaagctcaggcgttcattcagaaatactttcaaagctatcccaaagttaaagcatggatcgagaagactctccgtgaaggccgcacacgtggttacgtagagaccttatttggacgtcgccgctatgttcccgatttaaacgctcgcgtgaaaggcaagcgtgaagccgccgaacgcatggcgttcaacatgcctgtacagggcacggcagctgacctcatgaaacttgcaatggtgcgcctttttccacaattgcgtgaagttggtgcccgcatgctcttgcaggtccacgatgaactcttgttagaagcgccaaaagagcgtgcggaagaggtggcagccctcgcgaaagaagttatggaaggcgtgtggcccttagcggtgcctcttgaagtcgaagttggtattggcgaggattggctggctgccaaagga

SEQ ID NO: 4648 - protein, 841 aa, synthetic construct
  REGION 1..841: note = Variant of DNA polymerase I from Thermus sp. strain 2.9
MHHHHHHGGSGVLPVFEPKGRVLLVDGHHLAYRNFFALKGLTTSLGEPVQGVYGFAKSLLKALKEDGDVVIVVFDAKAPSFRHEAYEAYKAGRAPTPEDFPRQLALMKELVDLLGLERLEVPGFEADDVLATLAKKAEREGYEVQILTADRDLFQLLSPRISVLHPEGHRITPEWLWEKYGLRPEQWVDFRALAGDPSDNIPGVKGIGEKTALKLLKEWGSLENLLKNLDQVKPESVREKILAHLEDLKLSRELSRVRTDLPLEVDFGRRREPDWEGLKAFLERLEFGSLLHEFGLLESPLLAEEAPWPPPEGAFLGYRLSRPEPMWAELLALAASAQGRVYRAEDPHGALRGLFEVRGLLAKDLAVVALREGLDLPPTDDPMLLAYLLDPSNTTPEGVARRYGGEWTEDAAKRALLAERLHANLLGRLQGEERLLWLYEEVEKPLSRVLAHMEQTGVKLDVAYLENLSLEVAAHMRRLEEEVFRLAGRSFRLNSRDQLERVLFDELGLPPIGKTEKTGKRSTSAAVLEALREVHPIVDKILQYRELAKLKGTYIDRLPALVHPKTGRLHTRFNQTATATGRLSSSDPNLQNIPVRTPLGQKIRRAFVAEEGWRLVALDYRQIELRVLAHLSGDENLIRVFQEGKDIHTQTASWMFGLSAEAIDPLMRRAAKTINFGVLYGMSAFRLSQELGIPYEEAQAFIQKYFQSYPKVKAWIEKTLREGRTRGYVETLFGRRRYVPDLNARVKGKREAAERMAFNMPVQGTAADLMKLAMVRLFPQLREVGARMLLQVHDELLLEAPKERAEEVAALAKEVMEGVWPLAVPLEVEVGIGEDWLAAKG

SEQ ID NO: 4649 - DNA, 2523 bp, synthetic construct
  misc_feature 1..2523: note = Variant of DNA polymerase I from Thermus sp. strain 2.9
  source 1..2523: mol_type = other DNA
atgcaccatcatcatcatcatggcggtagcggcgtgttaccggtgttcgagcctaaaggtcgcgtgcttctggttgatggccatcatctcgcgtatcgtaacttctttgccctgaaaggattaaccaccagcctgggcgagccggtacagggtgtctacggctttgcaaagtcgctcctgaaagctctgaaagaagacggtgatgtggtgattgttgtctttgatgcgaaagcgccaagttttcgccacgaagcgtacgaagcttacaaagccgggcgtgctccaacgccggaagactttcctcgccaattggcgcttatgaaggaattagtggatttgcttggcctcgaacgcttggaagttcccggtttcgaggcagacgacgtattagcgactctcgcaaagaaagccgaacgtgagggctatgaagtccagatcttgacaggggatcgcgatcttttccagcttttatctccgcgcatctcggtgttacacccggaagggcatcgtatcaccccggaatggctctgggagaaatatggtttgcgtcccgaacaatgggtggattttcgcgccttagcaggcgatccgagcgacaatattccgggagttaaaggtatcggcgagaagacggcgctcaagctccttaaagaatgggggtcgttggagaacttgcttaagaatttagatcaggtcaaaccagagtcagtgcgtgagaagattcttgctcacctcgaagacctcaaattaagccgcgaattgtcccgtgtacgcaccgatttgccgctcgaagttgatttcggtcgccgccgcgaacctgactgggagggtcttaaagcgtttttagagcgtcttgaatttggttcgctcttgcatgaattcggccttttagaaagcccgttactggccgaagaagcaccttggccaccgcccgagggcgcgtttttaggttaccgtttgagtcgcccggaaccgatgtgggccgaattactggctcttgcagcgtctgcccagggacgtgtgtatcgcgcggaagaccctcatggtgcgctccgcggcctcttcgaagtccgtggactccttgccaaagacttagctgttgttgcattgcgcgaaggtcttgatttacctccgactgatgatccaatgcttcttgcgtacctcttggacccgtcaaacacgacgcccgaaggcgtagcccgtcgttacggcggcgagtggaccgaagatgcagcgaaacgcgcgttattggccgaacgtttgcacgccaatttattaggacgtttgcaaggcgaggaacgtctcctctggctttacgaagaagtggagaaaccattgagtcgcgtgctcgcgcatatggaagctaccggtgtcaaattagacgtggcgtatttggagaatctcagccttgaagttgctgcccacatgcgccgcttggaggaagaagtattccgtttagcaggccgttcctttcgccttaactctcgcgatcagttagaacgtgtgttgttcgatgaacttggtctccctcctatcggcaagacagagaagaccggtaaacgtagcacttcagcggcggttttagaagctcttcgcgaagtccatcccattgtggacaagatcttgcagtaccgcgaactcgcgaaattgaaaggcacctatattgaccgtcttccggcattagtccacccgaaaacgggacgcctccatacccgcttcaaccaaacagccacggcgaccggtcgtttgtcctcctctgatccaaaccttcagaatattccagtacgtaccccattgggccagaagatccgccgtgcgtttgtagctgaggagggttggcgtttagtggccctcgattatcgtcaaattgaattacgtgtccttgcccatctttctggcgatgagaacctcatccgcgtgtttcaggaaggcaaagacattcacactcaaacggcaagctggatgtttggattatcagctgaagcgatcgatcctttgatgcgtcgtgcagcgaagaccatcaatttcggtgttctctacggtatgagtgcctttcgtttgtcgcaggaattaggcattccctatgaagaagctcaggcgttcattcagaaatactttcaaagctatcccaaagttaaagcatggatcgagaagactctccgtgaaggccgcacacgtggttacgtagagaccttatttggacgtcgccgctatgttcccgatttaaacgctcgcgtgaaaggcaagcgtgaagccgccgaacgcatggcgttcaacatgcctgtacagggcacggcagctgacctcatgaaacttgcaatggtgcgcctttttccacaattgcgtgaagttggtgcccgcatgctcttgcaggtccacgatgaactcttgttagaagcgccaaaagagcgtgcggaagaggtggcagccctcgcgaaagaagttatggaaggcgtgtggcccttagcggtgcctcttgaagtcgaagttggtattggcgaggattggctggctgccaaagga

SEQ ID NO: 4650 - protein, 841 aa, synthetic construct
  REGION 1..841: note = Variant of DNA polymerase I from Thermus sp. strain 2.9
MHHHHHHGGSGVLPVFEPKGRVLLVDGHHLAYRNFFALKGLTTSLGEPVQGVYGFAKSLLKALKEDGDVVIVVFDAKAPSFRHEAYEAYKAGRAPTPEDFPRQLALMKELVDLLGLERLEVPGFEADDVLATLAKKAEREGYEVQILTGDRDLFQLLSPRISVLHPEGHRITPEWLWEKYGLRPEQWVDFRALAGDPSDNIPGVKGIGEKTALKLLKEWGSLENLLKNLDQVKPESVREKILAHLEDLKLSRELSRVRTDLPLEVDFGRRREPDWEGLKAFLERLEFGSLLHEFGLLESPLLAEEAPWPPPEGAFLGYRLSRPEPMWAELLALAASAQGRVYRAEDPHGALRGLFEVRGLLAKDLAVVALREGLDLPPTDDPMLLAYLLDPSNTTPEGVARRYGGEWTEDAAKRALLAERLHANLLGRLQGEERLLWLYEEVEKPLSRVLAHMEATGVKLDVAYLENLSLEVAAHMRRLEEEVFRLAGRSFRLNSRDQLERVLFDELGLPPIGKTEKTGKRSTSAAVLEALREVHPIVDKILQYRELAKLKGTYIDRLPALVHPKTGRLHTRFNQTATATGRLSSSDPNLQNIPVRTPLGQKIRRAFVAEEGWRLVALDYRQIELRVLAHLSGDENLIRVFQEGKDIHTQTASWMFGLSAEAIDPLMRRAAKTINFGVLYGMSAFRLSQELGIPYEEAQAFIQKYFQSYPKVKAWIEKTLREGRTRGYVETLFGRRRYVPDLNARVKGKREAAERMAFNMPVQGTAADLMKLAMVRLFPQLREVGARMLLQVHDELLLEAPKERAEEVAALAKEVMEGVWPLAVPLEVEVGIGEDWLAAKG

SEQ ID NO: 4651 - DNA, 2523 bp, synthetic construct
  misc_feature 1..2523: note = Variant of DNA polymerase I from Thermus sp. strain 2.9
  source 1..2523: mol_type = other DNA
atgcaccatcatcatcatcatggcggtagcggcgtgttaccggtgttcgagcataaaggtcgcgtgcttctggttgatggccatcatctcgcgtatcgtaacttctttgccctgaaaggattaaccaccagcctgggcgagccggtacagggtgtctacggctttgcaaagtcgctcctgaaagctctgaaagaagacggtgatgtggtgattgttgtctttgatgcgaaagcgccaagttttcgccacgaagcgtacgaagcttacaaagccgggcgtgctccaacgccggaagactttcctcgccaattggcgcttatgaaggaattagtggatttgcttggcctcgaacgcttggaagttcccggtttcgaggcagacgacgtattagcgactctcgcaaagaaagccgaacgtgagggctatgaagtccagatcttgacagcagatcgcgatcttttccagcttttatctccgcgcatctcggtgttacacccggaagggcatcgtatcaccccggaatggctctgggagaaatatggtttgcgtcccgaacaatgggtggattttcgcgccttagcaggcgatccgagcgacaatattccgggagttaaaggtatcggcgagaagacggcgctcaagctccttaaagaatgggggtcgttggagaacttgcttaagaatttagatcaggtcaaaccagagtcagtgcgtgagaagattcttgctcacctcgaagacctcaaattaagccgcgaattgtcccgtgtacgcaccgatttgccgctcgaagttgatttcggtcgccgccgcgaacctgactgggagggtcttaaagcgtttttagagcgtcttgaatttggttcgctccagcatgaattcggccttttagaaagcccgttagtggccgaagaagcaccttggccaccgcccgagggcgcgtttttaggttaccgtttgagtcgcccggaaccgatgtgggccgaattactggctcttgcagcgtctgcccagggacgtgtgtatcgcgcggaagaccctcatggtgcgctccgcggcctcttcgaagtccgtggactccttgccaaagacttagctgttgttgcattgcgcgaaggtcttgatttacctccgactgatgatccaatgcttcttgcgtacctcttggacccgtcaaacacgacgcccgaaggcgtagcccgtcgttacggcggcgagtggaccgaagatgcagcgaaacgcgcgttattggccgaacgtttgcacgaaaatttattaggacgtttgcaaggcgaggaacgtctcctctggctttacgaagaagtggagaaaccattgagtcgcgtgctcgcgcatatggaagctaccggtgtcaaattagacgtggcgtatttggagaatctcagccttgaagttgctgcccacatgcgccgcttggaggaagaagtattccgtttagcaggccgttcctttcgccttaactctcgcgatcagttagaacgtgtgttgttcgatgaacttggtctccctcctatcggcaagacagagaagaccggtaaacgtagcacttcagcagcggttttagaggctcttcgcgaagtccatcccattgtggacaagatcttgcagtaccgcgaactcgcgaaattgaaaggcacctatattgaccgtcttccggcattagtccacccgaaaacgggacgcctccatacccgcttcaaccaaacagccacggcgaccggtcgtttgtcctcctctgatccaaaccttcagaatattccagtacgtaccccattgggccagaagatccgccgtgcgtttgtagctgaggagggttggcgtttagtggccctcgattatcgtcaaattgaattacgtgtccttgcccatctttctggcgatgagaacctcatccgcgtgtttcaggaaggcaaagacattcacactcaaacggcaagctggatgtttggattatcagctgaagcgatcgatcctttgatgcgtcgtgcagcgaagaccatcaatttcggtgttctctacggtatgagtccatttcgtttgtcgcaggaattaggcattccctatgaagaagctcaggcgttcattcagaaatactttcaaagctatcccaaagttaaagcatggatcgagaagactctccgtgaaggccgcacacgtggttacgtagagaccttatttggacgtcgccgctatgttcccgatttaaacgctcgcgtgaaaggcaagcgtgaagccgccgaacgcatggcgttcaacatgcctgtacagggcacggcagctgacctcatgaaacttgcaatggtgcgcctttttccacaattgcgtgaagttggtgcccgcatgctcttgcaggtccacgatgaactcttgttagaagcgccaaaagagcgtgcggaagaggtggcagccctcgcgaaagaagttatggaaggcgtgtggcccttagcggtgcctcttgaagtcgaagttggtattggcgaggattggctggctgccaaagga

SEQ ID NO: 4652 - protein, 841 aa, synthetic construct
  REGION 1..841: note = Variant of DNA polymerase I from Thermus sp. strain 2.9
MHHHHHHGGSGVLPVFEHKGRVLLVDGHHLAYRNFFALKGLTTSLGEPVQGVYGFAKSLLKALKEDGDVVIVVFDAKAPSFRHEAYEAYKAGRAPTPEDFPRQLALMKELVDLLGLERLEVPGFEADDVLATLAKKAEREGYEVQILTADRDLFQLLSPRISVLHPEGHRITPEWLWEKYGLRPEQWVDFRALAGDPSDNIPGVKGIGEKTALKLLKEWGSLENLLKNLDQVKPESVREKILAHLEDLKLSRELSRVRTDLPLEVDFGRRREPDWEGLKAFLERLEFGSLQHEFGLLESPLVAEEAPWPPPEGAFLGYRLSRPEPMWAELLALAASAQGRVYRAEDPHGALRGLFEVRGLLAKDLAVVALREGLDLPPTDDPMLLAYLLDPSNTTPEGVARRYGGEWTEDAAKRALLAERLHENLLGRLQGEERLLWLYEEVEKPLSRVLAHMEATGVKLDVAYLENLSLEVAAHMRRLEEEVFRLAGRSFRLNSRDQLERVLFDELGLPPIGKTEKTGKRSTSAAVLEALREVHPIVDKILQYRELAKLKGTYIDRLPALVHPKTGRLHTRFNQTATATGRLSSSDPNLQNIPVRTPLGQKIRRAFVAEEGWRLVALDYRQIELRVLAHLSGDENLIRVFQEGKDIHTQTASWMFGLSAEAIDPLMRRAAKTINFGVLYGMSPFRLSQELGIPYEEAQAFIQKYFQSYPKVKAWIEKTLREGRTRGYVETLFGRRRYVPDLNARVKGKREAAERMAFNMPVQGTAADLMKLAMVRLFPQLREVGARMLLQVHDELLLEAPKERAEEVAALAKEVMEGVWPLAVPLEVEVGIGEDWLAAKG

SEQ ID NO: 4653 - DNA, 2523 bp, synthetic construct
  misc_feature 1..2523: note = Variant of DNA polymerase I from Thermus sp. strain 2.9
  source 1..2523: mol_type = other DNA
atgcaccatcatcatcatcatggcggtagcggcgtgttaccggtgttcgagcctaaaggtcgcgtgcttctggttgatggccatcatctcgcgtatcgtaacttctttgccctgaaaggattaaccaccagcctgggcgagccggtacagggtgtctacggctttgcaaagtcgctcctgaaagctctgaaagaagacggtgatgtggtgattgttgtctttgatgcgaaagcgccaagttttcgccacgaagcgtacgaagcttacaaagccgggcgtgctccaacgccggaagactttcctcgccaattggcgcttatgaaggaattagtggatttgcttggcctcgaacgcttggaagttcccggtttcgaggcagacgacgtattagcgactctcgcaaagaaagccgaacgtgagggctatgaagtccagatcttgacagcagatcgcgatcttttccagcttttatctccgcgcatctcggtgttacacccggaagggcatcgtatcaccccggaatggctctgggagaaatatggtttgcgtcccgaacaatgggtggattttcgcgccttagcaggcgatccgagcgacaatattccgggagttaaaggtatcggcgagaagacggcgctcaagctccttaaagaatgggggtcgttggagaacttgcttaagaatttagatcaggtcaaaccagagtcagtgcgtgagaagattcttgctcacctcgaagacctcaaattaagccgcgaattgtcccgtgtacgcaccgatttgccgctcgaagttgatttcggtcgccgccgcgaacctgactgggagggtcttaaagcgtttttagagcgtcttgaatttggttcgctcttgcatgaattcggccttttagaaagcccgttactggccgaagaagcaccttggccaccgcccgagggcgcgtttttaggttaccgtttgagtcgcccggaaccgatgtgggccgaattactggctcttgcagcgtctgcccagggacgtgtgtatcgcgcggaagaccctcatggtgcgctccgcggcctcttcgaagtccgtggactccttgccaaagacttagctgttgttgcattgcgcgaaggtcttgatttacctccgactgatgatccaatgcttcttgcgtacctcttggacccgtcaaacacgacgcccgaaggcgtagcccgtcgttacggcggcgagtggaccgaagatgcagcgaaacgcgcgttattggccgaacgtttgcacgccaatttattaggacgtttgcaaggcgaggaacgtctcctctggctttacgaagaagtggagaaaccattgagtcgcgtgctcgcgcatatggaagctaccggtgtcaaattagacgtggcgtatttggagaatctcagccttgaagttgctgcccacatgcgccgcttgggggaagaagtattccgtttagcaggccgttcctttcgccttaactctcgcgatcagttagaacgtgtgttgttcgatgaacttggtctccctcctatcggcaagacagagaagaccggtaaacgtagcacttcagcggcggttttagaagctcttcgcgaagtccatcccattgtggacaagatcttgcagtaccgcgaactcgcgaaattgaaaggcacctatattgaccgtcttccggcattagtccacccgaaaacgggacgcctccatacccgcttcaaccaaacagccacggcgaccggtcgtttgtcctcctctgatccaaaccttcagaatattccagtacgtaccccattgggccagaagatccgccgtgcgtttgtagctgaggagggttggcgtttagtggccctcgattatcgtcaaattgaattacgtgtccttgcccatctttctggcgatgagaacctcatccgcgtgtttcaggaaggcaaagacattcacactcaaacggcaagctggatgtttggattatcagctgaagcgatcgatcctttgatgcgtcgtgcagcgaagaccatcaatttcggtgttctctacggtatgagtgcctttcgtttgtcgcaggaattaggcattccctatgaagaagctcaggcgttcattcagaaatactttcaaagctatcccaaagttaaagcatggatcgagaagactctccgtgaaggccgcacacgtggttacgtagagaccttatttggacgtcgccgctatgttcccgatttaaacgctcgcgtgaaaggcaagcgtgaagccgccgaacgcatggcgttcaacatgcctgtacagggcacggcagctgacctcatgaaacttgcaatggtgcgcctttttccacaattgcgtgaagttggtgcccgcatgctcttgcaggtccacgatgaactcttgttagaagcgccaaaagagcgtgcggaagaggtggcagccctcgcgaaagaagttatggaaggcgtgtggcccttagcggtgcctcttgaagtcgaagttggtattggcgaggattggctggctgccaaagga

SEQ ID NO: 4654 - protein, 841 aa, synthetic construct
  REGION 1..841: note = Variant of DNA polymerase I from Thermus sp. strain 2.9
MHHHHHHGGSGVLPVFEPKGRVLLVDGHHLAYRNFFALKGLTTSLGEPVQGVYGFAKSLLKALKEDGDVVIVVFDAKAPSFRHEAYEAYKAGRAPTPEDFPRQLALMKELVDLLGLERLEVPGFEADDVLATLAKKAEREGYEVQILTADRDLFQLLSPRISVLHPEGHRITPEWLWEKYGLRPEQWVDFRALAGDPSDNIPGVKGIGEKTALKLLKEWGSLENLLKNLDQVKPESVREKILAHLEDLKLSRELSRVRTDLPLEVDFGRRREPDWEGLKAFLERLEFGSLLHEFGLLESPLLAEEAPWPPPEGAFLGYRLSRPEPMWAELLALAASAQGRVYRAEDPHGALRGLFEVRGLLAKDLAVVALREGLDLPPTDDPMLLAYLLDPSNTTPEGVARRYGGEWTEDAAKRALLAERLHANLLGRLQGEERLLWLYEEVEKPLSRVLAHMEATGVKLDVAYLENLSLEVAAHMRRLGEEVFRLAGRSFRLNSRDQLERVLFDELGLPPIGKTEKTGKRSTSAAVLEALREVHPIVDKILQYRELAKLKGTYIDRLPALVHPKTGRLHTRFNQTATATGRLSSSDPNLQNIPVRTPLGQKIRRAFVAEEGWRLVALDYRQIELRVLAHLSGDENLIRVFQEGKDIHTQTASWMFGLSAEAIDPLMRRAAKTINFGVLYGMSAFRLSQELGIPYEEAQAFIQKYFQSYPKVKAWIEKTLREGRTRGYVETLFGRRRYVPDLNARVKGKREAAERMAFNMPVQGTAADLMKLAMVRLFPQLREVGARMLLQVHDELLLEAPKERAEEVAALAKEVMEGVWPLAVPLEVEVGIGEDWLAAKG

SEQ ID NO: 4655 - DNA, 2523 bp, synthetic construct
  misc_feature 1..2523: note = Variant of DNA polymerase I from Thermus sp. strain 2.9
  source 1..2523: mol_type = other DNA
atgcaccatcatcatcatcatggcggtagcggcgtgttaccggtgttcgagcctaaaggtcgcgtgcttctggttgatggccatcatctcgcgtatcgtaacttctttgccctgaaaggattaaccaccagcctgggcgagccggtacagggtgtctacggctttgcaaagtcgctcctgaaagctctgaaagaagacggtgatgtggtgattgttgtctttgatgcgaaagcgccaagttttcgccacgaagcgtacgaagcttacaaagccgggcgtgctccaacgccggaagactttcctcgccaattggcgcttatgaaggaattagtggatttgcttggcctcgaacgcttggaagttcccggtttcgaggcagacgacgtattagcgactctcgcaaagaaagccgaacgtgagggctatgaagtccagatcttgacagcagatcgcgatcttttccagcttttatctccgcgcatctcggtgttacacccggaagggcatcgtatcaccccggaatggctctgggagaaatatggtttgcgtcccgaacaatgggtggattttcgcgccttagcaggcgatccgagcgacaatattccgggagttaaaggtatcggcgagaagacggcgctcaagctccttaaagaatgggggtcgttggagaacttgcttaagaatttagatcaggtcaaaccagagtcagtgcgtgagaagattcttgctcacctcgaagacctcaaattaagccgcgaattgtcccgtgtacgcaccgatttgccgctcgaagttgatttcggtcgccgccgcgaacctgactgggagggtcttaaagcgtttttagagcgtcttgaatttggttcgctcttgcatgaattcggccttttagaaagcccgttactggccgaagaagcaccttggccaccgcccgagggcgcgtttttaggttaccgtttgagtcgcccggaaccgatgtgggccgaattactggctcttgcagcgtctgcccagggacgtgtgtatcgcgcggaagaccctcatggtgcgctccgcggcctcttcgaagtccgtggactccttgccaaagacttagctgttgttgcattgcgcgaaggtcttgatttacctccgactgatgatccaatgcttcttgcgtacctcttggacccgtcaaacacgacgcccgaaggcgtagcccgtcgttacggcggcgagtggaccgaagatgcagcgaaacgcgcgttattggccgaacgtttgcacgccaatttattaggacgtttgcaaggcgaggaacgtctcctctggctttacgaagaagtggagaaaccattgagtcgcgtgctcgcgcatatggaagctaccggtgtcaaattagacgtggcgtatttggagaatctcagccttgaagttgctgcccacatgcgccgcttggaggaagaagtattccgtttagcaggccgttcctttcgccttaactctcgcgatcagttagaacgtgtgttgttcgatgaacttggtctccctcctatcggcaagacagagaagaccggtaaacgtagcacttcagcggcggttttagaagctcttcgcgaagtccatcccattgtggacaagatcttgcagtaccgcgaactcgcgaaattgaaaggcacctatattgaccgtcttccggcattagtccacccgaaaacgggacgcctccatacccgcttcaaccaaacagccacggcgaccggtcgtttgtcctcctctgatccaaaccttcagaatattccagtacgtaccccattgggccagaagatccgccgtgcgtttgtagctgaggagggttggcgtttagtggccctcgattatcgtcaaattgaattacgtgtccttgcccatctttctggcgatgagaacctcatccgcgtgtttcaggaaggcaaagacattcacactcaaacggcaagctggatgtttggattatcagctgaagcgatcgatcctttgatgcgtcgtgcagcgaagaccatcaatttcggtgttctctacggtatgagtgcctttcgtttgtcgcaggaattaggcattccctatgaagaagctcaggcgttcattcagaaatactttcaaagctatcccaaagttaaagcatggatcgagaagactctccgtgaaggccgcacacgtggttacgtagagaccttatttggacgtcgccgcatggttcccgatttaaacgctcgcgtgaaaggcaagcgtgaagccgccgaacgcatggcgttcaacatgcctgtacagggcacggcagctgacctcatgaaacttgcaatggtgcgcctttttccacaattgcgtgaagttggtgcccgcatgctcttgcaggtccacgatgaactcttgttagaagcgccaaaagagcgtgcggaagaggtggcagccctcgcgaaagaagttatggaaggcgtgtggcccttagcggtgcctcttgaagtcgaagttggtattggcgaggattggctggctgccaaagga

SEQ ID NO: 4656 - protein, 841 aa, synthetic construct
  REGION 1..841: note = Variant of DNA polymerase I from Thermus sp. strain 2.9
MHHHHHHGGSGVLPVFEPKGRVLLVDGHHLAYRNFFALKGLTTSLGEPVQGVYGFAKSLLKALKEDGDVVIVVFDAKAPSFRHEAYEAYKAGRAPTPEDFPRQLALMKELVDLLGLERLEVPGFEADDVLATLAKKAEREGYEVQILTADRDLFQLLSPRISVLHPEGHRITPEWLWEKYGLRPEQWVDFRALAGDPSDNIPGVKGIGEKTALKLLKEWGSLENLLKNLDQVKPESVREKILAHLEDLKLSRELSRVRTDLPLEVDFGRRREPDWEGLKAFLERLEFGSLLHEFGLLESPLLAEEAPWPPPEGAFLGYRLSRPEPMWAELLALAASAQGRVYRAEDPHGALRGLFEVRGLLAKDLAVVALREGLDLPPTDDPMLLAYLLDPSNTTPEGVARRYGGEWTEDAAKRALLAERLHANLLGRLQGEERLLWLYEEVEKPLSRVLAHMEATGVKLDVAYLENLSLEVAAHMRRLEEEVFRLAGRSFRLNSRDQLERVLFDELGLPPIGKTEKTGKRSTSAAVLEALREVHPIVDKILQYRELAKLKGTYIDRLPALVHPKTGRLHTRFNQTATATGRLSSSDPNLQNIPVRTPLGQKIRRAFVAEEGWRLVALDYRQIELRVLAHLSGDENLIRVFQEGKDIHTQTASWMFGLSAEAIDPLMRRAAKTINFGVLYGMSAFRLSQELGIPYEEAQAFIQKYFQSYPKVKAWIEKTLREGRTRGYVETLFGRRRMVPDLNARVKGKREAAERMAFNMPVQGTAADLMKLAMVRLFPQLREVGARMLLQVHDELLLEAPKERAEEVAALAKEVMEGVWPLAVPLEVEVGIGEDWLAAKG

SEQ ID NO: 4657 - DNA, 2523 bp, synthetic construct
  misc_feature 1..2523: note = Variant of DNA polymerase I from Thermus sp. strain 2.9
  source 1..2523: mol_type = other DNA
atgcaccatcatcatcatcatggcggtagcggcgtgttaccggtgttcgagcctaaaggtcgcgtgcttctggttgatggccatcatctcgcgtatcgtaacttctttgccctgaaaggattaaccaccagcctgggcgagccggtacagggtgtctacggctttgcaaagtcgctcctgaaagctctgaaagaagacggtgatgtggtgattgttgtctttgatgcgaaagcgccaagttttcgccacgaagcgtacgaagcttacaaagccgggcgtgctccaacgccggaagactttcctcgccaattggcgcttatgaaggaattagtggatttgcttggcctcgaacgcttggaagttcccggtttcgaggcagacgacgtattagcgactctcgcaaagaaagccgaacgtgagggctatgaagtccagatcttgacagcagatcgcgatcttttccagcttttatctccgcgcatctcggtgttacacccggaagggcatcgtatcaccccggaatggctctgggagaaatatggtttgcgtcccgaacaatgggtggattttcgcgccttagcaggcgatccgagcgacaatattccgggagttaaaggtatcggcgagaagacggcgctcaagctccttaaagaatgggggtcgttggagaacttgcttaagaatttagatcaggtcaaaccagagtcagtgcgtgagaagattcttgctcacctcgaagacctcaaattaagccgcgaattgtcccgtgtacgcaccgatttgccgctcgaagttgatttcggtcgccgccgcgaacctgactgggagggtcttaaagcgtttttagagcgtcttgaatttggttcgctcttgcatgaattcggccttttagaaagcccgttactggccgaagaagcaccttggccaccgcccgagggcgcgtttttaggttaccgtttgagtcgcccggaaccgatgtgggccgaattactggctcttgcagcgtctgcccagggacgtgtgtatcgcgcggaagaccctcatggtgcgctccgcggcctcttcgaagtccgtggactccttgccaaagacttagctgttgttgcattgcgcgaaggtcttgatttacctccgactgatgatccaatgcttcttgcgtacctcttggacccgtcaaacacgacgcccgaaggcgtagcccgtcgttacggcggcgagtggaccgaagatgcagcgaaacgcgcgttattggccgaacgtttgcacgccaatttattaggacgtttgcaaggcgaggaacgtctcctctggctttacgaagaagtggagaaaccattgagtcgcgtgctcgcgcatatggaagctaccggtgtcaaattagacgtggcgtatttggagaatctcagccttgaagttgctgcccacatgcgccgcttggaggaagaagtattccgtttagcaggccgttcctttcgccttaactctcgcgatcagttagaacgtgtgttgttcgatgaacttggtctccctcctatcggcaagacagagaagaccggtaaacgtagcacttcagcggcggttttagaagctcttcgcgaagtccatcccattgtggacaagatcttgcagtaccgcgaactcgcgaaattgaaaggcacctatattgaccgtcttccggcattagtccacccgaaaacgggacgcctccatacccgcttcaaccaaacagccacggcgaccggtcgtttgtcctcctctgatccaaaccttcagaatattccagtacgtaccccattgggccagaagatccgccgtgcgtttgtagctgaggagggttggcgtttagtggccctcgattatcgtcaaattgaattacgtgtccttgcccatctttctggcgatgagaacctcatccgcgtgtttcaggaaggcaaagacattcacactcaaacggcaagctggatgtttggattatcagctgaagcgatcgatcctttgatgcgtcgtgcagcgaagaccatcaatttcggtgttctctacggtatgagtgcctttcgtttgtcgcaggaattaggcattccctatgaagaagctcaggcgttcattcagaaatactttcaaagctatcccaaagttaaagcatggatcgagaagactctccgtgaaggccgcacacgtggttacgtagagaccttatttggacgtcgccgctatgttcccgatttaaacgctcgcgtgaaaggcaagcgtgaagccgccgaacgcatggcgttcaacatgcctgtacagggcacggcagctgacctcatgaaacttgcaatggtgcgcctttttccacaattgcgtgaagttggtgcccgcatgctcttgcaggtccacgatgaactcttgttagaacctccaaaagagcgtgcggaagaggtggcagccctcgcgaaagaagttatggaaggcgtgtggcccttagcggtgcctcttgaagtcgaagttggtattggcgaggattggctggctgccaaagga

SEQ ID NO: 4658 - protein, 841 aa, synthetic construct
  REGION 1..841: note = Variant of DNA polymerase I from Thermus sp. strain 2.9
MHHHHHHGGSGVLPVFEPKGRVLLVDGHHLAYRNFFALKGLTTSLGEPVQGVYGFAKSLLKALKEDGDVVIVVFDAKAPSFRHEAYEAYKAGRAPTPEDFPRQLALMKELVDLLGLERLEVPGFEADDVLATLAKKAEREGYEVQILTADRDLFQLLSPRISVLHPEGHRITPEWLWEKYGLRPEQWVDFRALAGDPSDNIPGVKGIGEKTALKLLKEWGSLENLLKNLDQVKPESVREKILAHLEDLKLSRELSRVRTDLPLEVDFGRRREPDWEGLKAFLERLEFGSLLHEFGLLESPLLAEEAPWPPPEGAFLGYRLSRPEPMWAELLALAASAQGRVYRAEDPHGALRGLFEVRGLLAKDLAVVALREGLDLPPTDDPMLLAYLLDPSNTTPEGVARRYGGEWTEDAAKRALLAERLHANLLGRLQGEERLLWLYEEVEKPLSRVLAHMEATGVKLDVAYLENLSLEVAAHMRRLEEEVFRLAGRSFRLNSRDQLERVLFDELGLPPIGKTEKTGKRSTSAAVLEALREVHPIVDKILQYRELAKLKGTYIDRLPALVHPKTGRLHTRFNQTATATGRLSSSDPNLQNIPVRTPLGQKIRRAFVAEEGWRLVALDYRQIELRVLAHLSGDENLIRVFQEGKDIHTQTASWMFGLSAEAIDPLMRRAAKTINFGVLYGMSAFRLSQELGIPYEEAQAFIQKYFQSYPKVKAWIEKTLREGRTRGYVETLFGRRRYVPDLNARVKGKREAAERMAFNMPVQGTAADLMKLAMVRLFPQLREVGARMLLQVHDELLLEPPKERAEEVAALAKEVMEGVWPLAVPLEVEVGIGEDWLAAKG

SEQ ID NO: 4659 - DNA, 2523 bp, synthetic construct
  misc_feature 1..2523: note = Variant of DNA polymerase I from Thermus sp. strain 2.9
  source 1..2523: mol_type = other DNA
atgcaccatcatcatcatcatggcggtagcggcgtgttaccggtgttcgagcctaaaggtcgcgtgcttctggttgatggccatcatctcgcgtatcgtaacttctttgccctgaaaggattaaccaccagcctgggcgagccggtacagggtgtctacggctttgcaaagtcgctcctgaaagctctgaaagaagacggtgatgtggtgattgttgtctttgatgcgaaagcgccaagttttcgccacgaagcgtacgaagcttacaaagccgggcgtgctccaacgccggaagactttcctcgccaattggcgcttatgaaggaattagtggatttgcttggcctcgaacgcttggaagttcccggtttcgaggcagacgacgtattagcgactctcgcaaagaaagccgaacgtgagggctatgaagtccagatcttgacagcagatcgcgatcttttccagcttttatctccgcgcatctcggtgttacacccggaagggcatcgtatcaccccggaatggctctgggagaaatatggtttgcgtcccgaacaatgggtggattttcgcgccttagcaggcgatccgagcgacaatattccgggagttaaaggtatcggcgagaagacggcgctcaagctccttaaagaatgggggtcgttggagaacttgcttaagaatttagatcaggtcaaaccagagtcagtgcgtgagaagattcttgctcacctcgaagacctcaaattaagccgcgaattgtcccgtgtacgcaccgatttgccgctcgaagttgatttcggtcgccgccgcgaacctgactgggagggtcttaaagcgtttttagagcgtcttgaatttggttcgctcttgcatgaattcggccttttagaaagcccgttactggccgaagaagcaccttggccaccgcccgagggcgcgtttttaggttaccgtttgagtcgcccggaaccgatgtgggccgaattactggctcttgcagcgtctgcccagggacgtgtgtatcgcgcggaagaccctcatggtgcgctccgcggcctcttcgaagtccgtggactccttgccaaagacttagctgttgttgcattgcgcgaaggtcttgatttacctccgactgatgatccaatgcttcttgcgtacctcttggacccgtcaaacacgacgcccgaaggcgtagcccgtcgttacggcggcgagtggaccgaagatgcagcgaaacgcgcgttattggccgaacgtttgcacgccaatttattaggacgtttgcaaggcgaggaacgtctcctctggctttacgaagaagtggagaaaccattgagtcgcgtgctcgcgcatatggaagctaccggtgtcaaattagacgtggcgtatttggagaatctcagccttgaagttgctgcccacatgcgccgcttggaggaagaagtattccgtttagcaggccgttcctttcgccttaactctcgcgatcagttagaacgtgtgttgttcgatgaacttggtctccctcctatcggcaagacagagaagaccggtaaacgtagcacttcagcggcggttttagaagctcttcgcgaagtccatcccattgtggacaagatcttgcagtaccgcgaactcgcgaaattgaaaggcacctatattgaccgtcttccggcattagtccacccgaaaacgggacgcctccatacccgcttcaaccaaacagccacggcgaccggtcgtttgtcctcctctgatccaaaccttcagaatattccagtacgtaccccattgggccagaagatccgccgtgcgtttgtagctgaggagggttggcgtttagtggccctcgattatcgtcaaattgaattacgtgtccttgcccatctttctggcgatgagaacctcatccgcgtgtttcaggaaggcaaagacattcacactcaaacggcaagctggatgtttggattatcagctgaagcgatcgatcctttgatgcgtcgtgcagcgaagaccatcaatttcggtgttctctacggtatgagtgcctttcgtttgtcgcaggaattaggcattccctatgaagaagctcaggcgttcattcagaaatactttcaaagctatcccaaagttaaagcagttatcgagaagactctccgtgaaggccgcacacgtggttacgtagagaccttatttggacgtcgccgctatgttcccgatttaaacgctcgcgtgaaaggcaagcgtgaagccgccgaacgcatggcgttcaacatgcctgtacagggcacggcagctgacctcatgaaacttgcaatggtgcgcctttttccacaattgcgtgaagttggtgcccgcatgctcttgcaggtccacgatgaactcttgttagaagcgccaaaagagcgtgcggaagaggtggcagccctcgcgaaagaagttatggaaggcgtgtggcccttagcggtgcctcttgaagtcgaagttggtattggcgaggattggctggctgccaaagga

SEQ ID NO: 4660 - protein, 841 aa, synthetic construct
  REGION 1..841: note = Variant of DNA polymerase I from Thermus sp. strain 2.9
MHHHHHHGGSGVLPVFEPKGRVLLVDGHHLAYRNFFALKGLTTSLGEPVQGVYGFAKSLLKALKEDGDVVIVVFDAKAPSFRHEAYEAYKAGRAPTPEDFPRQLALMKELVDLLGLERLEVPGFEADDVLATLAKKAEREGYEVQILTADRDLFQLLSPRISVLHPEGHRITPEWLWEKYGLRPEQWVDFRALAGDPSDNIPGVKGIGEKTALKLLKEWGSLENLLKNLDQVKPESVREKILAHLEDLKLSRELSRVRTDLPLEVDFGRRREPDWEGLKAFLERLEFGSLLHEFGLLESPLLAEEAPWPPPEGAFLGYRLSRPEPMWAELLALAASAQGRVYRAEDPHGALRGLFEVRGLLAKDLAVVALREGLDLPPTDDPMLLAYLLDPSNTTPEGVARRYGGEWTEDAAKRALLAERLHANLLGRLQGEERLLWLYEEVEKPLSRVLAHMEATGVKLDVAYLENLSLEVAAHMRRLEEEVFRLAGRSFRLNSRDQLERVLFDELGLPPIGKTEKTGKRSTSAAVLEALREVHPIVDKILQYRELAKLKGTYIDRLPALVHPKTGRLHTRFNQTATATGRLSSSDPNLQNIPVRTPLGQKIRRAFVAEEGWRLVALDYRQIELRVLAHLSGDENLIRVFQEGKDIHTQTASWMFGLSAEAIDPLMRRAAKTINFGVLYGMSAFRLSQELGIPYEEAQAFIQKYFQSYPKVKAVIEKTLREGRTRGYVETLFGRRRYVPDLNARVKGKREAAERMAFNMPVQGTAADLMKLAMVRLFPQLREVGARMLLQVHDELLLEAPKERAEEVAALAKEVMEGVWPLAVPLEVEVGIGEDWLAAKG

SEQ ID NO: 4661 - DNA, 2523 bp, synthetic construct
  misc_feature 1..2523: note = Variant of DNA polymerase I from Thermus sp. strain 2.9
  source 1..2523: mol_type = other DNA
atgcaccatcatcatcatcatggcggtagcggcgtgttaccggtgttcgagcctaaaggtcgcgtgcttctggttgatggccatcatctcgcgtatcgtaacttctttgccctgaaaggattaaccaccagcctgggcgagccggtacagggtgtctacggctttgcaaagtcgctcctgaaagctctgaaagaagacggtgatgtggtgattgttgtctttgatgcgaaagcgccaagttttcgccacgaagcgtacgaagcttacaaagccgggcgtgctccaacgccggaagactttcctcgccaattggcgcttatgaaggaattagtggatttgcttggcctcgaacgcttggaagttcccggtttcgaggcagacgacgtattagcgactctcgcaaagaaagccgaacgtgagggctatgaagtccagatcttgacagcagatcgcgatcttttccagcttttatctccgcgcatctcggtgttacacccggaagggcatcgtatcaccccggaatggctctgggagaaatatggtttgcgtcccgaacaatgggtggattttcgcgccttagcaggcgatccgagcgacaatattccgggagttaaaggtatcggcgagaagacggcgctcaagctccttaaagaatgggggtcgttggagaacttgcttaagaatttagatcaggtcaaaccagagtcagtgcgtgagaagattcttgctcacctcgaagacctcaaattaagccgcgaattgtcccgtgtacgcaccgatttgccgctcgaagttgatttcggtcgccgccgcgaacctgactgggagggtcttaaagcgtttttagagcgtcttgaatttggttcgctcttgcatgaattcggccttttagaaagcccgttactggccgaagaagcaccttggccaccgcccgagggcgcgtttttaggttaccgtttgagtcgcccggaaccgatgtgggccgaattactggctcttgcagcgtctgcccagggacgtgtgtatcgcgcggaagaccctcatggtgcgctccgcggcctcttcgaagtccgtggactccttgccaaagacttagctgttgttgcattgcgcgaaggtcttgatttacctccgactgatgatccaatgcttcttgcgtacctcttggacccgtcaaacacgacgcccgaaggcgtagcccgtcgttacggcggcgagtggaccgaagatgcagcgaaacgcgcgttattggccgaacgtttgcacgccaatttattaggacgtttgcaaggcgaggaacgtctcctctggctttacgaagaagtggagaaaccattgagtcgcgtgctcgcgcatatggaagctaccggtgtcaaattagacgtggcgtatttggagaatctcagccttgaagttgctagtcacatgcgccgcttggaggaagaagtattccgtttagcaggccgttcctttcgccttaactctcgcgatcagttagaacgtgtgttgttcgatgaacttggtctccctcctatcggcaagacagagaagaccggtaaacgtagcacttcagcggcggttttagaagctcttcgcgaagtccatcccattgtggacaagatcttgcagtaccgcgaactcgcgaaattgaaaggcacctatattgaccgtcttccggcattagtccacccgaaaacgggacgcctccatacccgcttcaaccaaacagccacggcgaccggtcgtttgtcctcctctgatccaaaccttcagaatattccagtacgtaccccattgggccagaagatccgccgtgcgtttgtagctgaggagggttggcgtttagtggccctcgattatcgtcaaattgaattacgtgtccttgcccatctttctggcgatgagaacctcatccgcgtgtttcaggaaggcaaagacattcacactcaaacggcaagctggatgtttggattatcagctgaagcgatcgatcctttgatgcgtcgtgcagcgaagaccatcaatttcggtgttctctacggtatgagtgcctttcgtttgtcgcaggaattaggcattccctatgaagaagctcaggcgttcattcagaaatactttcaaagctatcccaaagttaaagcatggatcgagaagactctccgtgaaggccgcacacgtggttacgtagagaccttatttggacgtcgccgctatgttcccgatttaaacgctcgcgtgaaaggcaagcgtgaagccgccgaacgcatggcgttcaacatgcctgtacagggcacggcagctgacctcatgaaacttgcaatggtgcgcctttttccacaattgcgtgaagttggtgcccgcatgctcttgcaggtccacgatgaactcttgttagaagcgccaaaagagcgtgcggaagaggtggcagccctcgcgaaagaagttatggaaggcgtgtggcccttagcggtgcctcttgaagtcgaagttggtattggcgaggattggctggctgccaaagga

SEQ ID NO: 4662 - protein, 841 aa, synthetic construct
  REGION 1..841: note = Variant of DNA polymerase I from Thermus sp. strain 2.9
MHHHHHHGGSGVLPVFEPKGRVLLVDGHHLAYRNFFALKGLTTSLGEPVQGVYGFAKSLLKALKEDGDVVIVVFDAKAPSFRHEAYEAYKAGRAPTPEDFPRQLALMKELVDLLGLERLEVPGFEADDVLATLAKKAEREGYEVQILTADRDLFQLLSPRISVLHPEGHRITPEWLWEKYGLRPEQWVDFRALAGDPSDNIPGVKGIGEKTALKLLKEWGSLENLLKNLDQVKPESVREKILAHLEDLKLSRELSRVRTDLPLEVDFGRRREPDWEGLKAFLERLEFGSLLHEFGLLESPLLAEEAPWPPPEGAFLGYRLSRPEPMWAELLALAASAQGRVYRAEDPHGALRGLFEVRGLLAKDLAVVALREGLDLPPTDDPMLLAYLLDPSNTTPEGVARRYGGEWTEDAAKRALLAERLHANLLGRLQGEERLLWLYEEVEKPLSRVLAHMEATGVKLDVAYLENLSLEVASHMRRLEEEVFRLAGRSFRLNSRDQLERVLFDELGLPPIGKTEKTGKRSTSAAVLEALREVHPIVDKILQYRELAKLKGTYIDRLPALVHPKTGRLHTRFNQTATATGRLSSSDPNLQNIPVRTPLGQKIRRAFVAEEGWRLVALDYRQIELRVLAHLSGDENLIRVFQEGKDIHTQTASWMFGLSAEAIDPLMRRAAKTINFGVLYGMSAFRLSQELGIPYEEAQAFIQKYFQSYPKVKAWIEKTLREGRTRGYVETLFGRRRYVPDLNARVKGKREAAERMAFNMPVQGTAADLMKLAMVRLFPQLREVGARMLLQVHDELLLEAPKERAEEVAALAKEVMEGVWPLAVPLEVEVGIGEDWLAAKG

SEQ ID NO: 4663 - DNA, 2523 bp, synthetic construct
  misc_feature 1..2523: note = Variant of DNA polymerase I from Thermus sp. strain 2.9
  source 1..2523: mol_type = other DNA
atgcaccatcatcatcatcatggcggtagcggcgtgttaccggtgttcgagcctaaaggtcgcgtgcttctggttgatggccatcatctcgcgtatcgtaacttctttgccctgaaaggattaaccaccagcctgggcgagccggtacagggtgtctacggctttgcaaagtcgctcctgaaagctctgaaagaagacggtgatgtggtgattgttgtctttgatgcgaaagcgccaagttttcgccacgaagcgtacgaagcttacaaagccgggcgtgctccaacgccggaagactttcctcgccaattggcgcttatgaaggaattagtggatttgcttggcctcgaacgcttggaagttcccggtttcgaggcagacgacgtattagcgactctcgcaaagaaagccgaacgtgagggctatgaagtccagatcttgacagcagatcgcgatcttttccagcttttatctccgcgcatctcggtgttacacccggaagggcatcgtatcaccccggaatggctctgggagaaatatggtttgcgtcccgaacaatgggtggattttcgcgccttagcaggcgatccgagcgacaatattccgggagttaaaggtatcggcgagaagacggcgctcaagctccttaaagaatgggggtcgttggagaacttgcttaagaatttagatcaggtcaaaccagagtcagtgcgtgagaagattcttgctcacctcgaagacctcaaattaagccgcgaattgtcccgtgtacgcaccgatttgccgctcgaagttgatttcggtcgccgccgcgaacctgactgggagggtcttaaagcgtttttagagcgtcttgaatttggttcgctcttgcatgaattcggccttttagaaagcccgttactggccgaagaagcaccttggccaccgcccgagggcgcgtttttaggttaccgtttgagtcgcccggaaccgatgtgggccgaattactggctcttgcagcgtctgcccagggacgtgtgtatcgcgcggaagaccctcatggtgcgctccgcggcctcttcgaagtccgtggactccttgccaaagacttagctgttgttgcattgcgcgaaggtcttgatttacctccgactgatgatccaatgcttcttgcgtacctcttggacccgtcaaacacgacgcccgaaggcgtagcccgtcgttacggcggcgagtggaccgaagatgcagcgaaacgcgcgttattggccgaacgtttgcacgccaatttattaggacgtttgcaaggcgaggaacgtctcctctggctttacgaagaagtggagaaaccattgagtcgcgtgctcgcgcatatggaagctaccggtgtcaaattagacgtggcgtatttggagaatctcagccttgaagttgctgcccacatgcgccgcttggaggaagaagtattccgtttagcaggccgttcctttcgccttaactctcgcgatgatttagaacgtgtgttgttcgatgaacttggtctccctcctatcggcaagacagagaagaccggtaaacgtagcacttcagcggcggttttagaagctcttcgcgaagtccatcccattgtggacaagatcttgcagtaccgcgaactcgcgaaattgaaaggcacctatattgaccgtcttccggcattagtccacccgaaaacgggacgcctccatacccgcttcaaccaaacagccacggcgaccggtcgtttgtcctcctctgatccaaaccttcagaatattccagtacgtaccccattgggccagaagatccgccgtgcgtttgtagctgaggagggttggcgtttagtggccctcgattatcgtcaaattgaattacgtgtccttgcccatctttctggcgatgagaacctcatccgcgtgtttcaggaaggcaaagacattcacactcaaacggcaagctggatgtttggattatcagctgaagcgatcgatcctttgatgcgtcgtgcagcgaagaccatcaatttcggtgttctctacggtatgagtgcctttcgtttgtcgcaggaattaggcattccctatgaagaagctcaggcgttcattcagaaatactttcaaagctatcccaaagttaaagcatggatcgagaagactctccgtgaaggccgcacacgtggttacgtagagaccttatttggacgtcgccgctatgttcccgatttaaacgctcgcgtgaaaggcaagcgtgaagccgccgaacgcatggcgttcaacatgcctgtacagggcacggcagctgacctcatgaaacttgcaatggtgcgcctttttccacaattgcgtgaagttggtgcccgcatgctcttgcaggtccacgatgaactcttgttagaagcgccaaaagagcgtgcggaagaggtggcagccctcgcgaaagaagttatggaaggcgtgtggcccttagcggtgcctcttgaagtcgaagttggtattggcgaggattggctggctgccaaagga

SEQ ID NO: 4664 - protein, 841 aa, synthetic construct
  REGION 1..841: note = Variant of DNA polymerase I from Thermus sp. strain 2.9
MHHHHHHGGSGVLPVFEPKGRVLLVDGHHLAYRNFFALKGLTTSLGEPVQGVYGFAKSLLKALKEDGDVVIVVFDAKAPSFRHEAYEAYKAGRAPTPEDFPRQLALMKELVDLLGLERLEVPGFEADDVLATLAKKAEREGYEVQILTADRDLFQLLSPRISVLHPEGHRITPEWLWEKYGLRPEQWVDFRALAGDPSDNIPGVKGIGEKTALKLLKEWGSLENLLKNLDQVKPESVREKILAHLEDLKLSRELSRVRTDLPLEVDFGRRREPDWEGLKAFLERLEFGSLLHEFGLLESPLLAEEAPWPPPEGAFLGYRLSRPEPMWAELLALAASAQGRVYRAEDPHGALRGLFEVRGLLAKDLAVVALREGLDLPPTDDPMLLAYLLDPSNTTPEGVARRYGGEWTEDAAKRALLAERLHANLLGRLQGEERLLWLYEEVEKPLSRVLAHMEATGVKLDVAYLENLSLEVAAHMRRLEEEVFRLAGRSFRLNSRDDLERVLFDELGLPPIGKTEKTGKRSTSAAVLEALREVHPIVDKILQYRELAKLKGTYIDRLPALVHPKTGRLHTRFNQTATATGRLSSSDPNLQNIPVRTPLGQKIRRAFVAEEGWRLVALDYRQIELRVLAHLSGDENLIRVFQEGKDIHTQTASWMFGLSAEAIDPLMRRAAKTINFGVLYGMSAFRLSQELGIPYEEAQAFIQKYFQSYPKVKAWIEKTLREGRTRGYVETLFGRRRYVPDLNARVKGKREAAERMAFNMPVQGTAADLMKLAMVRLFPQLREVGARMLLQVHDELLLEAPKERAEEVAALAKEVMEGVWPLAVPLEVEVGIGEDWLAAKG

SEQ ID NO: 4665 - DNA, 2523 bp, synthetic construct
  misc_feature 1..2523: note = Variant of DNA polymerase I from Thermus sp. strain 2.9
  source 1..2523: mol_type = other DNA
atgcaccatcatcatcatcatggcggtagcggcgtgttaccggtgttcgagcataaaggtcgcgtgcttctggttgatggccatcatctcgcgtatcgtaacttctttgccctgaaaggattaaccaccagcctgggcgagccggtacagggtgtctacggctttgcaaagtcgctcctgaaagctctgaaagaagacggtgatgtggtgattgttgtctttgatgcgaaagcgccaagttttcgccacgaagcgtacgaagcttacaaagccgggcgtgctccaacgccggaagactttcctcgccaattggcgcttatgaaggaattagtggatttgcttggcctcgaacgcttggaagttcccggtttcgaggcagacgacgtattagcgactctcgcaaagaaagccgaacgtgagggctatgaagtccagatcttgacagcagatcgcgatcttttccagcttttatctccgcgcatctcggtgttacacccggaagggcatcgtatcaccccggaatggctctgggagaaatatggtttgcgtcccgaacaatgggtggattttcgcgccttagcaggcgatccgagcgacaatattccgggagttaaaggtatcggcgagaagacggcgctcaagctccttaaagaatgggggtcgttggagaacttgcttaagaatttagatcaggtcaaaccagagtcagtgcgtgagaagattcttgctcacctcgaagacctcgagttaagccgcgaattgtcccgtgtacgcaccgatttgccgctcgaagttgatttcggtcgccgccgcgaacctgactgggagggtcttaaagcgtttttagagcgtcttgaatttggttcgctcttgcatgaattcggccttttagaaagcccgttagtggccgaagaagcaccttggccaccgcccgagggcgcgtttttaggttaccgtttgagtcgcccggaaccgatgtgggccgaattactggctcttgcagcgtctgcccagggacgtgtgtatcgcgcggaagaccctcatggtgcgctccgcggcctcttcgaagtccgtggactccttgccaaagacttagctgttgttgcattgcgcgaaggtcttgatttacctccgactgatgatccaatgcttcttgcgtacctcttggacccgtcaaacacgacgcccgaaggcgtagcccgtcgttacggcggcgagtggaccgaagatgcagcgaaacgcgcgttattggccgaacgtttgcacgagaatttactgggacgtttgcaaggcgaggagcgtctcctctggctttacgaagaagtggagaaaccattgagtcgtgtgctcgctcatatggaagctaccggtgtcaaattagacgtggcgtatttggagaatctcagccttgaagttgctgcccacatgcgccgcttggaggaagaagtagtccgtttagcaggccgttcctttcgccttaactctcgcgatcagttagaacgtgtgttgttcgatgaacttggtctccctcctatcggcaagacagagaagaccggtaaacgtagcacttcagcggcggttttagaagctcttcgcgaagtccatcccattgtggacaagatcttgcagtaccgcgaaatggcgaaattgaaaggcacctatattgaccgtcttccggcattagtccacccgaaaacgggacgcctccatacccgcttcaaccaaacagccacggcgaccggtcgtttgtcctcctctgatccaaaccttcagaatattccagtacgtaccccattgggccagaagatccgccgtgcgtttgtagctgaggagggttggcgtttagtggccctcgattatcgtcaaattgaattacgtgtccttgcccatctttctggcgatgagaacctcatccgcgtgtttcaggaaggcaaagacattcacactcaaacggcaagctggatgtttggattatcagctgaagcgatcgatcctttgatgcgtcgtgcagcgaagaccatcaatttcggtgttctctacggtatgagtgcctttcgtttgtcgcaggagttaggcattcccaaagaagaagctcaggcgttcattcagaaatactttcaaagctatcccaaagttaaagcatggatcgagaagactctccgtgaaggccgcacacgtggttacgtagagaccttatttggacgtcgccgctatgttcccgatttaaacgctcgcgtgaaaggcaagcgtgaagccgccgaacgcatggcgttcaacatgcctgtacagggcacggcagctgacctcatgaaacttgcaatggtgcgcctttttccacaattgcgtgaagttggtgcccgcatgctcttgcaggtccacgatgaactcttgttagaagcgccaaaagagcgtgcggaagaggtggcagccctcgcgaaagaagttatggaaggcgtgtggcccttagcggtgcctcttgaagtcgaagttggtattggcgaggattggctggctgccaaagga

SEQ ID NO: 4666 - protein, 841 aa, synthetic construct
  REGION 1..841: note = Variant of DNA polymerase I from Thermus sp. strain 2.9
MHHHHHHGGSGVLPVFEHKGRVLLVDGHHLAYRNFFALKGLTTSLGEPVQGVYGFAKSLLKALKEDGDVVIVVFDAKAPSFRHEAYEAYKAGRAPTPEDFPRQLALMKELVDLLGLERLEVPGFEADDVLATLAKKAEREGYEVQILTADRDLFQLLSPRISVLHPEGHRITPEWLWEKYGLRPEQWVDFRALAGDPSDNIPGVKGIGEKTALKLLKEWGSLENLLKNLDQVKPESVREKILAHLEDLELSRELSRVRTDLPLEVDFGRRREPDWEGLKAFLERLEFGSLLHEFGLLESPLVAEEAPWPPPEGAFLGYRLSRPEPMWAELLALAASAQGRVYRAEDPHGALRGLFEVRGLLAKDLAVVALREGLDLPPTDDPMLLAYLLDPSNTTPEGVARRYGGEWTEDAAKRALLAERLHENLLGRLQGEERLLWLYEEVEKPLSRVLAHMEATGVKLDVAYLENLSLEVAAHMRRLEEEVVRLAGRSFRLNSRDQLERVLFDELGLPPIGKTEKTGKRSTSAAVLEALREVHPIVDKILQYREMAKLKGTYIDRLPALVHPKTGRLHTRFNQTATATGRLSSSDPNLQNIPVRTPLGQKIRRAFVAEEGWRLVALDYRQIELRVLAHLSGDENLIRVFQEGKDIHTQTASWMFGLSAEAIDPLMRRAAKTINFGVLYGMSAFRLSQELGIPKEEAQAFIQKYFQSYPKVKAWIEKTLREGRTRGYVETLFGRRRYVPDLNARVKGKREAAERMAFNMPVQGTAADLMKLAMVRLFPQLREVGARMLLQVHDELLLEAPKERAEEVAALAKEVMEGVWPLAVPLEVEVGIGEDWLAAKG

SEQ ID NO: 4667 - DNA, 2523 bp, synthetic construct
  misc_feature 1..2523: note = Variant of DNA polymerase I from Thermus sp. strain 2.9
  source 1..2523: mol_type = other DNA
atgcaccatcatcatcatcatggcggtagcggcgtgttaccggtgttcgagcataaaggtcgcgtgcttctggttgatggccatcatctcgcgtatcgtaacttctttgccctgaaaggattaaccaccagcctgggcgagccggtacagggtgtctacggctttgcaaagtcgctcctgaaagctctgaaagaagacggtgatgtggtgattgttgtctttgatgcgaaagcgccaagttttcgccacgaagcgtacgaagcttacaaagccgggcgtgctccaacgccggaagactttcctcgccaattgtttcttatgaaggaattagtggatttgcttggcctcgaacgcttggaagttcccggtttcgaggcagacgacgtattagcgactctcgcaaagaaagccgaacgtgagggctatgaagtccagatcttgacagcagatcgcgatcttttccagcttttatctccgcgcatctcggtgttacacccggaagggcatcgtatcaccccggaatggctctgggagaaatatggtttgcgtcccgaacaatgggtggattttcgcgccttagcaggcgatccgagcgacaatattccgggagttaaaggtatcggcgagaagacggcgctcaagctccttaaagaatgggggtcgttggagaacttgcttaagaatttagatcaggtcaaaccagagtcagtgcgtgagaagattcttgctcacctcgaagacctcaagttaagccgcgaattgtcccgtgtacgcaccgatttgccgctcgaagttgatttcggtcgccgccgcgaacctgactgggagggtcttaaagcgtttttagagcgtcttgaatttggttcgctcttgcatgaattcggccttttagaaagcccgttactggccgaagaagcaccttggccaccgcccgagggcgcgtttttaggttaccgtttgacccgcccggaaccgatgtgggccgaattactggctcttgcagcgtctgcccagggacgtgtgtatcgcgcggaagaccctcatggtgcgctccgcggcctcttcgaagtccgtggactccttgccaaagacttagctgttgttgcattgcgcgaaggtcttgatttacctccgactgatgatccaatgcttcttgcgtacctcttggacccgtcaaacacgacgcccgaaggcgtagcccgtcgttacggcggcgagtggaccgaagatgcagcgaaacgcgcgttattggccgaacgtttgcacgcgaatttactgggacgtttgcaaggcgaggaacgtctcctctggctttacgaagaagtggagaaaccattgagtcgtgtgctcgctcatatggaagctaccggtgtcaaattagacgtggcgtatttggagaatctcagccttgaagttgctgcccacatgcgccgcttggaggaagaagtattccgtttagcaggccgttcctttcgccttaactctcgcgatcagttagaacgtgtgttgttcgatgaacttggtctccctcctatcggcaagacagagaagaccggtaaacgtagcacttcagcggcggttttagaagctcttcgcgaagtccatcccattgtggacaagatcttgcagtaccgcgaaatggcgaaattgaaaggcacctatattgaccgtcttccggcattagtccacccgaaaacgggacgcctccatacccgcttcaaccaaacagccacggcgaccggtcgtttgtcctcctctgatccaaaccttcagaatattccagtacgtacccctttgggccagaagatccgccgtgcgtttgtagctgaggagggttggcgtttagtggccctcgattatcgtcaaattgaattacgtgtccttgcccatctttctggcgatgagaacctcatccgcgtgtttcaagaaggcaaagacattcacactcaaacggcaagctggatgtttggattatcagctgaagcgatcgatcctttgatgcgtcgtgcagcgaagacgatcaatttcggtgttctctacggtatgagtgcctttcgtttgtcgcaggaattaggcattccctatgaagaagctcaggcgttcattcagaaatactttcaaagctatcccaaagttaaagcatggatcgagaagactctccgtgaaggccgcacccgtggttacgtagagaccttatttggacgtcgccgctatgttcccgatttaaacgctcgcgtgaaaggcaagcgtgaagccgccgaacgcatggcgttcaacatgcctgtacagggcacggcagctgacctcatgaaacttgcaatggtgcgcctttttccacaattgcgtgaagttggtgcccgcatgctcttgcaggtccatgatgaactcttgctggaagcgccaaaagagcgtgcggaagaggtggcagccctcgcgaaagaagttatggaaggcgtgtggcccttagcggtgcctcttgaagtcgaagttggtattggcgaggattggctggctgccaaagga

SEQ ID NO: 4668 - protein, 841 aa, synthetic construct
  REGION 1..841: note = Variant of DNA polymerase I from Thermus sp. strain 2.9
MHHHHHHGGSGVLPVFEHKGRVLLVDGHHLAYRNFFALKGLTTSLGEPVQGVYGFAKSLLKALKEDGDVVIVVFDAKAPSFRHEAYEAYKAGRAPTPEDFPRQLFLMKELVDLLGLERLEVPGFEADDVLATLAKKAEREGYEVQILTADRDLFQLLSPRISVLHPEGHRITPEWLWEKYGLRPEQWVDFRALAGDPSDNIPGVKGIGEKTALKLLKEWGSLENLLKNLDQVKPESVREKILAHLEDLKLSRELSRVRTDLPLEVDFGRRREPDWEGLKAFLERLEFGSLLHEFGLLESPLLAEEAPWPPPEGAFLGYRLTRPEPMWAELLALAASAQGRVYRAEDPHGALRGLFEVRGLLAKDLAVVALREGLDLPPTDDPMLLAYLLDPSNTTPEGVARRYGGEWTEDAAKRALLAERLHANLLGRLQGEERLLWLYEEVEKPLSRVLAHMEATGVKLDVAYLENLSLEVAAHMRRLEEEVFRLAGRSFRLNSRDQLERVLFDELGLPPIGKTEKTGKRSTSAAVLEALREVHPIVDKILQYREMAKLKGTYIDRLPALVHPKTGRLHTRFNQTATATGRLSSSDPNLQNIPVRTPLGQKIRRAFVAEEGWRLVALDYRQIELRVLAHLSGDENLIRVFQEGKDIHTQTASWMFGLSAEAIDPLMRRAAKTINFGVLYGMSAFRLSQELGIPYEEAQAFIQKYFQSYPKVKAWIEKTLREGRTRGYVETLFGRRRYVPDLNARVKGKREAAERMAFNMPVQGTAADLMKLAMVRLFPQLREVGARMLLQVHDELLLEAPKERAEEVAALAKEVMEGVWPLAVPLEVEVGIGEDWLAAKG

SEQ ID NO: 4669 - DNA, 2523 bp, synthetic construct
  misc_feature 1..2523: note = Variant of DNA polymerase I from Thermus sp. strain 2.9
  source 1..2523: mol_type = other DNA
atgcaccatcatcatcatcatggcggtagcggcgtgttaccggtgttcgagcataaaggtcgcgtgcttctggttgatggccatcatctcgcgtatcgtaacttctttgccctgaaaggattaaccaccagcctgggcgagccggtacagggtgtctacggctttgcaaagtcgctcctgaaagctctgaaagaagacggtgatgtggtgattgttgtctttgatgcgaaagcgccaagttttcgccacgaagcgtacgaagcttacaaagccgggcgtgctccaacgccggaagactttcctcgccaattggcgcttatgaaggaattagtggatttgcttggcctcgaacgcttggaagttcccggtttcgaggcagacgacgtattagcgactctcgcaaagaaagccgaacgtgagggctatgaagtccagatcttgacagcagatcgcgatcttttccagcttttatctccgcgcatctcggtgttacacccggaagggcatcgtatcaccccggaatggctctgggagaaatatggtttgcgtcccgaacaatgggtggattttcgcgccttagcaggcgatccgagcgacaatattccgggagttaaaggtatcggcgagaagacggcgctcaagctccttaaagaatgggggtcgttggagaacttgcttaagaatttagatcaggtcaaaccagagtcagtgcgtgagaagattcttgctcacctcgaagacctcaaattaagccgcgaattgtcccgtgtacgcaccgatttgccgctcgaagttgatttcggtcgccgccgcgaacctgactgggagggtcttaaagcgtttttagagcgtcttgaatttggttcgctccagcatgaattcggccttttagaaagcccgttagtggccgaagaagcaccttggccaccgcccgagggcgcgtttttaggttaccgtttgagtcgcccggaaccgatgtgggccgaattactggctcttgcagcgtctgcccagggacgtgtgtatcgcgcggaagaccctcatggtgcgctccgcggcctcttcgaagtccgtggactccttgccaaagacttagctgttgttgcattgcgcgaaggtcttgatttacctccgactgatgatccaatgcttcttgcgtacctcttggacccgtcaaacacgacgcccgaaggcgtagcccgtcgttacggcggcgagtggaccgaagatgcagcgaaacgcgcgttattggccgaacgtttgcacgcaaatttattaggacgtttgcaaggcgaggaacgtctcctctggctttacgaagaagtggagaaaccattgagtcgcgtgctcgcgcatatggaagctaccggtgtcaaattagacgtggcgtatttggagaatctcagccttgaagttgctgcccacatgcgccgcttggaggaagaagtattccgtttagcaggccgttcctttcgccttaactctcgcgatcagttagaacgtgtgttgttcgatgaacttggtctccctcctatcggcaagacagagaagaccggtaaacgtagcacttcacgcgcggttttagaggctcttcgcgaagtccatcccattgtggacaagatcttgcagtaccgcgaaatggcgaaattgaaaggcacctatattgaccgtcttccggcattagtccacccgaaaacgggacgcctccatacccgcttcaaccaaacagccacggcgaccggtcgtttgtcctcctctgatccaaaccttcagaatattccagtacgtaccccattgggccagaagatccgccgtgcgtttgtagctgaggagggttggcgtttagtggccctcgattatcgtcaaattgaattacgtgtccttgcccatctttctggcgatgagaacctcatccgcgtgtttcaggaaggcaaagacattcacactcaaacggcaagctggatgtttggattaggtgctgaagcgatcgatcctttgatgcgtcgtgcagcgaagaccatcaatttcggtgttctctacggtatgagtccatttcgtttgtcgcaggaattaggcattcccaaggaagaagctcaggcgttcattcagaaatactttcaaagctatcccaaagttaaagcatggatcgagaagactctccgtgaaggccgcacacgtggttacgtagagaccttatttggacgtcgccgctatgttcccgatttaaacgctcgcgtgaaaggcaagcgtgaagccgccgaacgcatggcgttcaacatgcctgtacagggcacggcagctgacctcatgaaacttgcaatggtgcgcctttttccacaattgcgtgaagttggtgcccgcatgctcttgcaggtccacgatgaactcttgttagaagcgccaaaagagcgtgcggaagaggtggcagccctcgcgaaagaagttatggaaggcgtgtggcccttagcggtgcctcttgaagtcgaagttggtattggcgaggattggctggctgccaaagga

SEQ ID NO: 4670 - protein, 841 aa, synthetic construct
  REGION 1..841: note = Variant of DNA polymerase I from Thermus sp. strain 2.9
MHHHHHHGGSGVLPVFEHKGRVLLVDGHHLAYRNFFALKGLTTSLGEPVQGVYGFAKSLLKALKEDGDVVIVVFDAKAPSFRHEAYEAYKAGRAPTPEDFPRQLALMKELVDLLGLERLEVPGFEADDVLATLAKKAEREGYEVQILTADRDLFQLLSPRISVLHPEGHRITPEWLWEKYGLRPEQWVDFRALAGDPSDNIPGVKGIGEKTALKLLKEWGSLENLLKNLDQVKPESVREKILAHLEDLKLSRELSRVRTDLPLEVDFGRRREPDWEGLKAFLERLEFGSLQHEFGLLESPLVAEEAPWPPPEGAFLGYRLSRPEPMWAELLALAASAQGRVYRAEDPHGALRGLFEVRGLLAKDLAVVALREGLDLPPTDDPMLLAYLLDPSNTTPEGVARRYGGEWTEDAAKRALLAERLHANLLGRLQGEERLLWLYEEVEKPLSRVLAHMEATGVKLDVAYLENLSLEVAAHMRRLEEEVFRLAGRSFRLNSRDQLERVLFDELGLPPIGKTEKTGKRSTSRAVLEALREVHPIVDKILQYREMAKLKGTYIDRLPALVHPKTGRLHTRFNQTATATGRLSSSDPNLQNIPVRTPLGQKIRRAFVAEEGWRLVALDYRQIELRVLAHLSGDENLIRVFQEGKDIHTQTASWMFGLGAEAIDPLMRRAAKTINFGVLYGMSPFRLSQELGIPKEEAQAFIQKYFQSYPKVKAWIEKTLREGRTRGYVETLFGRRRYVPDLNARVKGKREAAERMAFNMPVQGTAADLMKLAMVRLFPQLREVGARMLLQVHDELLLEAPKERAEEVAALAKEVMEGVWPLAVPLEVEVGIGEDWLAAKG

SEQ ID NO: 4671 - DNA, 2523 bp, synthetic construct
  misc_feature 1..2523: note = Variant of DNA polymerase I from Thermus sp. strain 2.9
  source 1..2523: mol_type = other DNA
atgcaccatcatcatcatcatggcggtagcggcgtgttaccggtgttcgagcctaaaggtcgcgtgcttctggttgatggccatcatctcgcgtatcgtaacttctttgccctgaaaggattaaccaccagcctgggcgagccggtacagggtgtctacggctttgcaaagtcgctcctgaaagctctgaaagaagacggtgatgtggtgattgttgtctttgatgcgaaagcgccaagttttcgccacgaagcgtacgaagcttacaaagccgggcgtgctccaacgccggaagactttcctcgccaattggcgcttatgaaggaattagtggatttgcttggcctcgaacgcttggaagttcccggtttcgaggcagacgacgtattagcgactctcgcaaagaaagccgaacgtgagggctatgaagtccagatcttgacagcagatcgcgatcttttccagcttttatctccgcgcatctcggtgttacacccggaagggcatcgtatcaccccggaatggctctgggagaaatatggtttgcgtcccgaacaatgggtggattttcgcgccttagcaggcgatccgagcgacaatattccgggagttaaaggtatcggcgagaagacggcgctcaagctccttaaagaatgggggtcgttggagaacttgcttaagaatttagatcaggtcaaaccagagtcagtgcgtgagaagattcttgctcacctcgaagacctcaaattaagccgcgaattgtcccgtgtacgcaccgatttgccgctcgaagttgatttcggtcgccgccgcgaacctgactgggagggtcttaaagcgtttttagagcgtcttgaatttggttcgctcttgcatgaattcggccttttagaaagcccgttactggccgaagaagcaccttggccaccgcccgagggcgcgtttttaggttaccgtttgagtcgcccggaaccgatgtgggccgaattactggctcttgcagcgtctgcccagggacgtgtgtatcgcgcggaagaccctcatggtgcgctccgcggcctcttcgaagtccgtggactccttgccaaagacttagctgttgttgcattgcgcgaaggtcttgatttacctccgactgatgatccaatgcttcttgcgtacctcttggacccgtcaaacacgacgcccgaaggcgtagcccgtcgttacggcggcgagtggaccgaagatgcagcgaaacgcgcgttattggccgaacgtttgcacgccaatttattaggacgtttgcaaggcgaggaacgtctcctctggctttacgaagaagtggagaaaccattgagtcgcgtgctcgcgcatatggaagctaccggtgtcaaattagacgtggcgtatttggagaatctcagccttgaagttgctgcccacatgcgccgcttggaggaagaagtattccgtttagcaggccgttcctttcgccttaactctcgcgatcagttagaacgtgtgttgttcgatgaacttggtctccctcctatcggcaagacagagaagaccggtaaacgtagcacttcagcggcggttttagaagctcttcgcgaagtccatcccattgtggacaagatcttgcagtaccgcgaactcgcgaaagggaaaggcacctatattgaccgtcttccggcattagtccacccgaaaacgggacgcctccatacccgcttcaaccaaacagccacggcgaccggtcgtttgtcctcctctgatccaaaccttcagaatattccagtacgtaccccattgggccagaagatccgccgtgcgtttgtagctgaggagggttggcgtttagtggccctcgattatcgtcaaattgaattacgtgtccttgcccatctttctggcgatgagaacctcatccgcgtgtttcaggaaggcaaagacattcacactcaaacggcaagctggatgtttggattatcagctgaagcgatcgatcctttgatgcgtcgtgcagcgaagaccatcaatttcggtgttctctacggtatgagtgcctttcgtttgtcgcaggaattaggcattccctatgaagaagctcaggcgttcattcagaaatactttcaaagctatcccaaagttaaagcatggatcgagaagactctccgtgaaggccgcacacgtggttacgtagagaccttatttggacgtcgccgctatgttcccgatttaaacgctcgcgtgaaaggcaagcgtgaagccgccgaacgcatggcgttcaacatgcctgtacagggcacggcagctgacctcatgaaacttgcaatggtgcgcctttttccacaattgcgtgaagttggtgcccgcatgctcttgcaggtccacgatgaactcttgttagaagcgccaaaagagcgtgcggaagaggtggcagccctcgcgaaagaagttatggaaggcgtgtggcccttagcggtgcctcttgaagtcgaagttggtattggcgaggattggctggctgccaaagga

SEQ ID NO: 4672 - protein, 841 aa, synthetic construct
  REGION 1..841: note = Variant of DNA polymerase I from Thermus sp. strain 2.9
MHHHHHHGGSGVLPVFEPKGRVLLVDGHHLAYRNFFALKGLTTSLGEPVQGVYGFAKSLLKALKEDGDVVIVVFDAKAPSFRHEAYEAYKAGRAPTPEDFPRQLALMKELVDLLGLERLEVPGFEADDVLATLAKKAEREGYEVQILTADRDLFQLLSPRISVLHPEGHRITPEWLWEKYGLRPEQWVDFRALAGDPSDNIPGVKGIGEKTALKLLKEWGSLENLLKNLDQVKPESVREKILAHLEDLKLSRELSRVRTDLPLEVDFGRRREPDWEGLKAFLERLEFGSLLHEFGLLESPLLAEEAPWPPPEGAFLGYRLSRPEPMWAELLALAASAQGRVYRAEDPHGALRGLFEVRGLLAKDLAVVALREGLDLPPTDDPMLLAYLLDPSNTTPEGVARRYGGEWTEDAAKRALLAERLHANLLGRLQGEERLLWLYEEVEKPLSRVLAHMEATGVKLDVAYLENLSLEVAAHMRRLEEEVFRLAGRSFRLNSRDQLERVLFDELGLPPIGKTEKTGKRSTSAAVLEALREVHPIVDKILQYRELAKGKGTYIDRLPALVHPKTGRLHTRFNQTATATGRLSSSDPNLQNIPVRTPLGQKIRRAFVAEEGWRLVALDYRQIELRVLAHLSGDENLIRVFQEGKDIHTQTASWMFGLSAEAIDPLMRRAAKTINFGVLYGMSAFRLSQELGIPYEEAQAFIQKYFQSYPKVKAWIEKTLREGRTRGYVETLFGRRRYVPDLNARVKGKREAAERMAFNMPVQGTAADLMKLAMVRLFPQLREVGARMLLQVHDELLLEAPKERAEEVAALAKEVMEGVWPLAVPLEVEVGIGEDWLAAKG

SEQ ID NO: 4673 - DNA, 2523 bp, synthetic construct
  misc_feature 1..2523: note = Variant of DNA polymerase I from Thermus sp. strain 2.9
  source 1..2523: mol_type = other DNA
atgcaccatcatcatcatcatggcggtagcggcgtgttaccggtgttcgagcctaaaggtcgcgtgcttctggttgatggccatcatctcgcgtatcgtaacttctttgccctgaaaggattaaccaccagcctgggcgagccggtacagggtgtctacggctttgcaaagtcgctcctgaaagctctgaaagaagacggtgatgtggtgattgttgtctttgatgcgaaagcgccaagttttcgccacgaagcgtacgaagcttacaaagccgggcgtgctccaacgccggaagactttcctcgccaattggcgcttatgaaggaattagtggatttgcttggcctcgaacgcttggaagttcccggtttcgaggcagacgacgtattagcgactctcgcaaagaaagccgaacgtgagggctatgaagtccagatcttgacagcagatcgcgatcttttccagcttttatctccgcgcatctcggtgttacacccggaagggcatcgtatcaccccggaatggctctgggagaaatatggtttgcgtcccgaacaatgggtggattttcgcgccttagcaggcgatccgagcgacaatattccgggagttaaaggtatcggcgagaagacggcgctcaagctccttaaagaatgggggtcgttggagaacttgcttaagaatttagatcaggtcaaaccagagtcagtgcgtgagaagattcttgctcacctcgaagacctcaaattaagccgcgaattgtcccgtgtacgcaccgatttgccgctcgaagttgatttcggtcgccgccgcgaacctgactgggagggtcttaaagcgtttttagagcgtcttgaatttggttcgctcttgcatgaattcggccttttagaaagcccgttactggccgaagaagcaccttggccaccgcccgagggcgcgtttttaggttaccgtttgagtcgcccggaaccgatgtgggccgaattactggctcttgcagcgtctgcccagggacgtgtgtatcgcgcggaagaccctcatggtgcgctccgcggcctcttcgaagtccgtggactccttgccaaagacttagctgttgttgcattgcgcgaaggtcttgatttacctccgactgatgatccaatgcttcttgcgtacctcttggacccgtcaaacacgacgcccgaaggcgtagcccgtcgttacggcggcgagtggaccgaagatgcagcgaaacgcgcgttattggccgaacgtttgcacgccaatttattaggacgtttgcaaggcgaggaacgtctcctctggctttacgaagaagtggagaaaccattgagtcgcgtgctcgcgcatatggaagctaccggtgtcaaattagacgtggcgtatttggagaatctcagccttgaagttgctgcccacatgcgccgcttggaggaagaagtattccgtttagcaggccgttcctttcgccttaactctcgcgatcagttagaacgtgtgttgttcgatgaacttggtctccctcctatcggcaagacagagaagaccggtaaacgtagcacttcagcggcggttttagaagctcttcgcgaagtccatcccattgtggacaagatcttgcagtaccgcgaactcgcgaaattgaaaggcacctatattgaccgtcttccggcattagtccacccgaaaacgggacgcctccatacccgcttcaaccaaacagccacggcgaccggtcgtttgtcctcctctgatccaaaccttcagaatattccagtacgtaccccattgggccagaagatccgccgtgcgtttgtagctgaggagggttggcgtttagtggccctcgattatcgtcaaattgaattacgtgtccttgcccatctttctggcgatgagaacctcatccgcgtgtttcaggaaggcaaagacattcacactcaaacggcaagctgggcgtttggattatcagctgaagcgatcgatcctttgatgcgtcgtgcagcgaagaccatcaatttcggtgttctctacggtatgagtgcctttcgtttgtcgcaggaattaggcattccctatgaagaagctcaggcgttcattcagaaatactttcaaagctatcccaaagttaaagcatggatcgagaagactctccgtgaaggccgcacacgtggttacgtagagaccttatttggacgtcgccgctatgttcccgatttaaacgctcgcgtgaaaggcaagcgtgaagccgccgaacgcatggcgttcaacatgcctgtacagggcacggcagctgacctcatgaaacttgcaatggtgcgcctttttccacaattgcgtgaagttggtgcccgcatgctcttgcaggtccacgatgaactcttgttagaagcgccaaaagagcgtgcggaagaggtggcagccctcgcgaaagaagttatggaaggcgtgtggcccttagcggtgcctcttgaagtcgaagttggtattggcgaggattggctggctgccaaagga

SEQ ID NO: 4674 - protein, 841 aa, synthetic construct
  REGION 1..841: note = Variant of DNA polymerase I from Thermus sp. strain 2.9
MHHHHHHGGSGVLPVFEPKGRVLLVDGHHLAYRNFFALKGLTTSLGEPVQGVYGFAKSLLKALKEDGDVVIVVFDAKAPSFRHEAYEAYKAGRAPTPEDFPRQLALMKELVDLLGLERLEVPGFEADDVLATLAKKAEREGYEVQILTADRDLFQLLSPRISVLHPEGHRITPEWLWEKYGLRPEQWVDFRALAGDPSDNIPGVKGIGEKTALKLLKEWGSLENLLKNLDQVKPESVREKILAHLEDLKLSRELSRVRTDLPLEVDFGRRREPDWEGLKAFLERLEFGSLLHEFGLLESPLLAEEAPWPPPEGAFLGYRLSRPEPMWAELLALAASAQGRVYRAEDPHGALRGLFEVRGLLAKDLAVVALREGLDLPPTDDPMLLAYLLDPSNTTPEGVARRYGGEWTEDAAKRALLAERLHANLLGRLQGEERLLWLYEEVEKPLSRVLAHMEATGVKLDVAYLENLSLEVAAHMRRLEEEVFRLAGRSFRLNSRDQLERVLFDELGLPPIGKTEKTGKRSTSAAVLEALREVHPIVDKILQYRELAKLKGTYIDRLPALVHPKTGRLHTRFNQTATATGRLSSSDPNLQNIPVRTPLGQKIRRAFVAEEGWRLVALDYRQIELRVLAHLSGDENLIRVFQEGKDIHTQTASWAFGLSAEAIDPLMRRAAKTINFGVLYGMSAFRLSQELGIPYEEAQAFIQKYFQSYPKVKAWIEKTLREGRTRGYVETLFGRRRYVPDLNARVKGKREAAERMAFNMPVQGTAADLMKLAMVRLFPQLREVGARMLLQVHDELLLEAPKERAEEVAALAKEVMEGVWPLAVPLEVEVGIGEDWLAAKG

SEQ ID NO: 4675 - DNA, 2523 bp, synthetic construct
  misc_feature 1..2523: note = Variant of DNA polymerase I from Thermus sp. strain 2.9
  source 1..2523: mol_type = other DNA
atgcaccatcatcatcatcatggcggtagcggcgtgttaccggtgttcgagcctaaaggtcgcgtgcttctggttgatggccatcatctcgcgtatcgtaacttctttgccctgaaaggattaaccaccagcctgggcgagccggtacagggtgtctacggctttgcaaagtcgctcctgaaagctctgaaagaagacggtgatgtggtgattgttgtctttgatgcgaaagcgccaagttttcgccacgaagcgtacgaagcttacaaagccgggcgtgctccaacgccggaagactttcctcgccaattggcgcttatgaaggaattagtggatttgcttggcctcgaacgcttggaagttcccggtttcgaggcagacgacgtattagcgactctcgcaaagaaagccgaacgtgagggctatgaagtccagatcttgacagcagatcgcgatcttttccagcttttatctccgcgcatctcggtgttacacccggaagggcatcgtatcaccccggaatggctctgggagaaatatggtttgcgtcccgaacaatgggtggattttcgcgccttagcaggcgatccgagcgacaatattccgggagttaaaggtatcggcgagaagacggcgctcaagctccttaaagaatgggggtcgttggagaacttgcttaagaatttagatcaggtcaaaccagagtcagtgcgtgagaagattcttgctcacctcgaagacctcaaattaagccgcgaattgtcccgtgtacgcaccgatttgccgctcgaagttgatttcggtcgccgccgcgaacctgactgggagggtcttaaagcgtttttagagcgtcttgaatttggttcgctcttgcatgaattcggccttttagaaagcccgttactggccgaagaagcaccttggccaccgcccgagggcgcgtttttaggttaccgtttgagtcgcccggaaccgatgtgggccgaattactggctcttgcagcgtctgcccagggacgtgtgtatcgcgcggaagaccctcatggtgcgctccgcggcctcttcgaagtccgtggactccttgccaaagacttagctgttgttgcattgcgcgaaggtcttgatttacctccgactgatgatccaatgcttcttgcgtacctcttggacccgtcaaacacgacgcccgaaggcgtagcccgtcgttacggcggcgagtggaccgaagatgcagcgaaacgcgcgttattggccgaacgtttgcacgccaatttattaggacgtttgcaaggcgaggaacgtctcctctggctttacgaagaagtggagaaaccattgagtcgcgtgctcgcgcatatggaagctaccggtgtcaaattagacgtggcgtatttggagaatctcagccttgaagttgctgcccacatgcgccgcttggaggaagaagtattccgtttagcaggccgttcctttcgccttaactctcgcgatcagttagaacgtgtgttgttcgatgaacttggtctccctcctatcggcaagacagagaagaccggtaaacgtagcacttcagcggcggttttagaagctcttcgcgaagtccatcccattgtggacaagatcttgcagtaccgcgaactcgcgaaattgaaaggcacctatattgaccgtcttccggcattagtccacccgaaaacgggacgcctccatacccgcttcaaccaaacagccacggcgaccggtcgtttgtcctcctctgatccaaaccttcagaatattccagtacgtaccccattgggccagaagatccgccgtgcgtttgtagctgaggagggttggcgtttagtggccctcgattatcgtcaaattgaattacgtgtccttgcccatctttctggcgatgagaacctcatccgcgtgtttcaggaaggcaaagacattcacactcaaacggcaagctttatgtttggattatcagctgaagcgatcgatcctttgatgcgtcgtgcagcgaagaccatcaatttcggtgttctctacggtatgagtgcctttcgtttgtcgcaggaattaggcattccctatgaagaagctcaggcgttcattcagaaatactttcaaagctatcccaaagttaaagcatggatcgagaagactctccgtgaaggccgcacacgtggttacgtagagaccttatttggacgtcgccgctatgttcccgatttaaacgctcgcgtgaaaggcaagcgtgaagccgccgaacgcatggcgttcaacatgcctgtacagggcacggcagctgacctcatgaaacttgcaatggtgcgcctttttccacaattgcgtgaagttggtgcccgcatgctcttgcaggtccacgatgaactcttgttagaagcgccaaaagagcgtgcggaagaggtggcagccctcgcgaaagaagttatggaaggcgtgtggcccttagcggtgcctcttgaagtcgaagttggtattggcgaggattggctggctgccaaagga

SEQ ID NO: 4676 - protein, 841 aa, synthetic construct
  REGION 1..841: note = Variant of DNA polymerase I from Thermus sp. strain 2.9
MHHHHHHGGSGVLPVFEPKGRVLLVDGHHLAYRNFFALKGLTTSLGEPVQGVYGFAKSLLKALKEDGDVVIVVFDAKAPSFRHEAYEAYKAGRAPTPEDFPRQLALMKELVDLLGLERLEVPGFEADDVLATLAKKAEREGYEVQILTADRDLFQLLSPRISVLHPEGHRITPEWLWEKYGLRPEQWVDFRALAGDPSDNIPGVKGIGEKTALKLLKEWGSLENLLKNLDQVKPESVREKILAHLEDLKLSRELSRVRTDLPLEVDFGRRREPDWEGLKAFLERLEFGSLLHEFGLLESPLLAEEAPWPPPEGAFLGYRLSRPEPMWAELLALAASAQGRVYRAEDPHGALRGLFEVRGLLAKDLAVVALREGLDLPPTDDPMLLAYLLDPSNTTPEGVARRYGGEWTEDAAKRALLAERLHANLLGRLQGEERLLWLYEEVEKPLSRVLAHMEATGVKLDVAYLENLSLEVAAHMRRLEEEVFRLAGRSFRLNSRDQLERVLFDELGLPPIGKTEKTGKRSTSAAVLEALREVHPIVDKILQYRELAKLKGTYIDRLPALVHPKTGRLHTRFNQTATATGRLSSSDPNLQNIPVRTPLGQKIRRAFVAEEGWRLVALDYRQIELRVLAHLSGDENLIRVFQEGKDIHTQTASFMFGLSAEAIDPLMRRAAKTINFGVLYGMSAFRLSQELGIPYEEAQAFIQKYFQSYPKVKAWIEKTLREGRTRGYVETLFGRRRYVPDLNARVKGKREAAERMAFNMPVQGTAADLMKLAMVRLFPQLREVGARMLLQVHDELLLEAPKERAEEVAALAKEVMEGVWPLAVPLEVEVGIGEDWLAAKG

SEQ ID NO: 4677 - DNA, 2523 bp, synthetic construct
  misc_feature 1..2523: note = Variant of DNA polymerase I from Thermus sp. strain 2.9
  source 1..2523: mol_type = other DNA
atgcaccatcatcatcatcatggcggtagcggcgtgttaccggtgttcgagcctaaaggtcgcgtgcttctggttgatggccatcatctcgcgtatcgtaacttctttgccctgaaaggattaaccaccagcctgggcgagccggtacagggtgtctacggctttgcaaagtcgctcctgaaagctctgaaagaagacggtgatgtggtgattgttgtctttgatgcgaaagcgccaagttttcgccacgaagcgtacgaagcttacaaagccgggcgtgctccaacgccggaagactttcctcgccaattggcgcttatgaaggaattagtggatttgcttggcctcgaacgcttggaagttcccggtttcgaggcagacgacgtattagcgactctcgcaaagaaagccgaacgtgagggctatgaagtccagatcttgacagcagatcgcgatcttttccagcttttatctccgcgcatctcggtgttacacccggaagggcatcgtatcaccccggaatggctctgggagaaatatggtttgcgtcccgaacaatgggtggattttcgcgccttagcaggcgatccgagcgacaatattccgggagttaaaggtatcggcgagaagacggcgctcaagctccttaaagaatgggggtcgttggagaacttgcttaagaatttagatcaggtcaaaccagagtcagtgcgtgagaagattcttgctcacctcgaagacctcaaattaagccgcgaattgtcccgtgtacgcaccgatttgccgctcgaagttgatttcggtcgccgccgcgaacctgactgggagggtcttaaagcgtttttagagcgtcttgaatttggttcgctcttgcatgaattcggccttttagaaagcccgttactggccgaagaagcaccttggccaccgcccgagggcgcgtttttaggttaccgtttgagtcgcccggaaccgatgtgggccgaattactggctcttgcagcgtctgcccagggacgtgtgtatcgcgcggaagaccctcatggtgcgctccgcggcctcttcgaagtccgtggactccttgccaaagacttagctgttgttgcattgcgcgaaggtcttgatttacctccgactgatgatccaatgcttcttgcgtacctcttggacccgtcaaacacgacgcccgaaggcgtagcccgtcgttacggcggcgagtggaccgaagatgcagcgaaacgcgcgttattggccgaacgtttgcacgccaatttattaggacgtttgcaaggcgaggaacgtctcctctggctttacgaagaagtggagaaaccattgagtcgcgtgctcgcgcatatggaagctaccggtgtcaaattagacgtggcgtatttggagaatctcagccttgaagttgctgcccacatgcgccgcttggaggaagaagtattccgtttagcaggccgttcctttcgccttaactctcgcgatcagttagaacgtgtgttgttcgatgaacttggtctccctcctatcggcaagacagagaagaccggtaaacgtagcacttcagcggcggttttagaagctcttcgcgaagtccatcccattgtggacaagatcttgcagtaccgcgaactcgcgaaattgaaaggcacctatattgaccgtcttccggcattagtccacccgaaaacgggacgcctccatacccgcttcaaccaaacagccacggcgaccggtcgtttgtcctcctctgatccaaaccttcagaatattccagtacgtaccccattgggccagaagatccgccgtgcgtttgtagctgaggagggttggcgtttagtggccctcgattatcgtcaatgggaattacgtgtccttgcccatctttctggcgatgagaacctcatccgcgtgtttcaggaaggcaaagacattcacactcaaacggcaagctggatgtttggattatcagctgaagcgatcgatcctttgatgcgtcgtgcagcgaagaccatcaatttcggtgttctctacggtatgagtgcctttcgtttgtcgcaggaattaggcattccctatgaagaagctcaggcgttcattcagaaatactttcaaagctatcccaaagttaaagcatggatcgagaagactctccgtgaaggccgcacacgtggttacgtagagaccttatttggacgtcgccgctatgttcccgatttaaacgctcgcgtgaaaggcaagcgtgaagccgccgaacgcatggcgttcaacatgcctgtacagggcacggcagctgacctcatgaaacttgcaatggtgcgcctttttccacaattgcgtgaagttggtgcccgcatgctcttgcaggtccacgatgaactcttgttagaagcgccaaaagagcgtgcggaagaggtggcagccctcgcgaaagaagttatggaaggcgtgtggcccttagcggtgcctcttgaagtcgaagttggtattggcgaggattggctggctgccaaagga

SEQ ID NO: 4678 - protein, 841 aa, synthetic construct
  REGION 1..841: note = Variant of DNA polymerase I from Thermus sp. strain 2.9
MHHHHHHGGSGVLPVFEPKGRVLLVDGHHLAYRNFFALKGLTTSLGEPVQGVYGFAKSLLKALKEDGDVVIVVFDAKAPSFRHEAYEAYKAGRAPTPEDFPRQLALMKELVDLLGLERLEVPGFEADDVLATLAKKAEREGYEVQILTADRDLFQLLSPRISVLHPEGHRITPEWLWEKYGLRPEQWVDFRALAGDPSDNIPGVKGIGEKTALKLLKEWGSLENLLKNLDQVKPESVREKILAHLEDLKLSRELSRVRTDLPLEVDFGRRREPDWEGLKAFLERLEFGSLLHEFGLLESPLLAEEAPWPPPEGAFLGYRLSRPEPMWAELLALAASAQGRVYRAEDPHGALRGLFEVRGLLAKDLAVVALREGLDLPPTDDPMLLAYLLDPSNTTPEGVARRYGGEWTEDAAKRALLAERLHANLLGRLQGEERLLWLYEEVEKPLSRVLAHMEATGVKLDVAYLENLSLEVAAHMRRLEEEVFRLAGRSFRLNSRDQLERVLFDELGLPPIGKTEKTGKRSTSAAVLEALREVHPIVDKILQYRELAKLKGTYIDRLPALVHPKTGRLHTRFNQTATATGRLSSSDPNLQNIPVRTPLGQKIRRAFVAEEGWRLVALDYRQWELRVLAHLSGDENLIRVFQEGKDIHTQTASWMFGLSAEAIDPLMRRAAKTINFGVLYGMSAFRLSQELGIPYEEAQAFIQKYFQSYPKVKAWIEKTLREGRTRGYVETLFGRRRYVPDLNARVKGKREAAERMAFNMPVQGTAADLMKLAMVRLFPQLREVGARMLLQVHDELLLEAPKERAEEVAALAKEVMEGVWPLAVPLEVEVGIGEDWLAAKG

SEQ ID NO: 4679 - DNA, 2523 bp, synthetic construct
  misc_feature 1..2523: note = Variant of DNA polymerase I from Thermus sp. strain 2.9
  source 1..2523: mol_type = other DNA
atgcaccatcatcatcatcatggcggtagcggcgtgttaccggtgttcgagcctaaaggtcgcgtgcttctggttgatggccatcatctcgcgtatcgtaacttctttgccctgaaaggattaaccaccagcctgggcgagccggtacagggtgtctacggctttgcaaagtcgctcctgaaagctctgaaagaagacggtgatgtggtgattgttgtctttgatgcgaaagcgccaagttttcgccacgaagcgtacgaagcttacaaagccgggcgtgctccaacgccggaagactttcctcgccaattggcgcttatgaaggaattagtggatttgcttggcctcgaacgcttggaagttcccggtttcgaggcagacgacgtattagcgactctcgcaaagaaagccgaacgtgagggctatgaagtccagatcttgacagcagatcgcgatcttttccagcttttatctccgcgcatctcggtgttacacccggaagggcatcgtatcaccccggaatggctctgggagaaatatggtttgcgtcccgaacaatgggtggattttcgcgccttagcaggcgatccgagcgacaatattccgggagttaaaggtatcggcgagaagacggcgctcaagctccttaaagaatgggggtcgttggagaacttgcttaagaatttagatcaggtcaaaccagagtcagtgcgtgagaagattcttgctcacctcgaagacctcaaattaagccgcgaattgtcccgtgtacgcaccgatttgccgctcgaagttgatttcggtcgccgccgcgaacctgactgggagggtcttaaagcgtttttagagcgtcttgaatttggttcgctcttgcatgaattcggccttttagaaagcccgttactggccgaagaagcaccttggccaccgcccgagggcgcgtttttaggttaccgtttgagtcgcccggaaccgatgtgggccgaattactggctcttgcagcgtctgcccagggacgtgtgtatcgcgcggaagaccctcatggtgcgctccgcggcctcttcgaagtccgtggactccttgccaaagacttagctgttgttgcattgcgcgaaggtcttgatttacctccgactgatgatccaatgcttcttgcgtacctcttggacccgtcaaacacgacgcccgaaggcgtagcccgtcgttacggcggcgagtggaccgaagatgcagcgaaacgcgcgttattggccgaacgtttgcacgccaatttattaggacgtttgcaaggcgaggaacgtctcctctggctttacgaagaagtggagaaaccattgagtcgcgtgctcgcgcatatggaagctaccggtgtcaaattagacgtggcgtatttggagaatctcagccttgaagttgctgcccacatgcgccgcttggaggaagaagtattccgtttagcaggccgttcctttcgccttaactctcgcgatcagttagaacgtgtgttgttcgatgaacttggtctccctcctatcggcaagacagagaagaccggtaaacgtagcacttcagcggcggttttagaagctcttcgcgaagtccatcccattgtggacaagatcttgcagtaccgcgaactcgcgaaattgaaaggcacctatattgaccgtcttccggcattagtccacccgaaaacgggacgcctccatacccgcttcaaccaaacagccacggcgaccggtcgtttgtcctcctctgatccaaaccttcagaatattccagtacgtaccccattgggctttaagatccgccgtgcgtttgtagctgaggagggttggcgtttagtggccctcgattatcgtcaaattgaattacgtgtccttgcccatctttctggcgatgagaacctcatccgcgtgtttcaggaaggcaaagacattcacactcaaacggcaagctggatgtttggattatcagctgaagcgatcgatcctttgatgcgtcgtgcagcgaagaccatcaatttcggtgttctctacggtatgagtgcctttcgtttgtcgcaggaattaggcattccctatgaagaagctcaggcgttcattcagaaatactttcaaagctatcccaaagttaaagcatggatcgagaagactctccgtgaaggccgcacacgtggttacgtagagaccttatttggacgtcgccgctatgttcccgatttaaacgctcgcgtgaaaggcaagcgtgaagccgccgaacgcatggcgttcaacatgcctgtacagggcacggcagctgacctcatgaaacttgcaatggtgcgcctttttccacaattgcgtgaagttggtgcccgcatgctcttgcaggtccacgatgaactcttgttagaagcgccaaaagagcgtgcggaagaggtggcagccctcgcgaaagaagttatggaaggcgtgtggcccttagcggtgcctcttgaagtcgaagttggtattggcgaggattggctggctgccaaagga

SEQ ID NO: 4680 - protein, 841 aa, synthetic construct
  REGION 1..841: note = Variant of DNA polymerase I from Thermus sp. strain 2.9
MHHHHHHGGSGVLPVFEPKGRVLLVDGHHLAYRNFFALKGLTTSLGEPVQGVYGFAKSLLKALKEDGDVVIVVFDAKAPSFRHEAYEAYKAGRAPTPEDFPRQLALMKELVDLLGLERLEVPGFEADDVLATLAKKAEREGYEVQILTADRDLFQLLSPRISVLHPEGHRITPEWLWEKYGLRPEQWVDFRALAGDPSDNIPGVKGIGEKTALKLLKEWGSLENLLKNLDQVKPESVREKILAHLEDLKLSRELSRVRTDLPLEVDFGRRREPDWEGLKAFLERLEFGSLLHEFGLLESPLLAEEAPWPPPEGAFLGYRLSRPEPMWAELLALAASAQGRVYRAEDPHGALRGLFEVRGLLAKDLAVVALREGLDLPPTDDPMLLAYLLDPSNTTPEGVARRYGGEWTEDAAKRALLAERLHANLLGRLQGEERLLWLYEEVEKPLSRVLAHMEATGVKLDVAYLENLSLEVAAHMRRLEEEVFRLAGRSFRLNSRDQLERVLFDELGLPPIGKTEKTGKRSTSAAVLEALREVHPIVDKILQYRELAKLKGTYIDRLPALVHPKTGRLHTRFNQTATATGRLSSSDPNLQNIPVRTPLGFKIRRAFVAEEGWRLVALDYRQIELRVLAHLSGDENLIRVFQEGKDIHTQTASWMFGLSAEAIDPLMRRAAKTINFGVLYGMSAFRLSQELGIPYEEAQAFIQKYFQSYPKVKAWIEKTLREGRTRGYVETLFGRRRYVPDLNARVKGKREAAERMAFNMPVQGTAADLMKLAMVRLFPQLREVGARMLLQVHDELLLEAPKERAEEVAALAKEVMEGVWPLAVPLEVEVGIGEDWLAAKG

SEQ ID NO: 4681 - DNA, 2523 bp, synthetic construct
  misc_feature 1..2523: note = Variant of DNA polymerase I from Thermus sp. strain 2.9
  source 1..2523: mol_type = other DNA
atgcaccatcatcatcatcatggcggtagcggcgtgttaccggtgttcgagcctaaaggtcgcgtgcttctggttgatggccatcatctcgcgtatcgtaacttctttgccctgaaaggattaaccaccagcctgggcgagccggtacagggtgtctacggctttgcaaagtcgctcctgaaagctctgaaagaagacggtgatgtggtgattgttgtctttgatgcgaaagcgccaagttttcgccacgaagcgtacgaagcttacaaagccgggcgtgctccaacgccggaagactttcctcgccaattggcgcttatgaaggaattagtggatttgcttggcctcgaacgcttggaagttcccggtttcgaggcagacgacgtattagcgactctcgcaaagaaagccgaacgtgagggctatgaagtccagatcttgacagcagatcgcgatcttttccagcttttatctccgcgcatctcggtgttacacccggaagggcatcgtatcaccccggaatggctctgggagaaatatggtttgcgtcccgaacaatgggtggattttcgcgccttagcaggcgatccgagcgacaatattccgggagttaaaggtatcggcgagaagacggcgctcaagctccttaaagaatgggggtcgttggagaacttgcttaagaatttagatcaggtcaaaccagagtcagtgcgtgagaagattcttgctcacctcgaagacctcaaattaagccgcgaattgtcccgtgtacgcaccgatttgccgctcgaagttgatttcggtcgccgccgcgaacctgactgggagggtcttaaagcgtttttagagcgtcttgaatttggttcgctcttgcatgaattcggccttttagaaagcccgttactggccgaagaagcaccttggccaccgcccgagggcgcgtttttaggttaccgtttgagtcgcccggaaccgatgtgggccgaattactggctcttgcagcgtctgcccagggacgtgtgtatcgcgcggaagaccctcatggtgcgctccgcggcctcttcgaagtccgtggactccttgccaaagacttagctgttgttgcattgcgcgaaggtcttgatttacctccgactgatgatccaatgcttcttgcgtacctcttggacccgtcaaacacgacgcccgaaggcgtagcccgtcgttacggcggcgagtggaccgaagatgcagcgaaacgcgcgttattggccgaacgtttgcacgccaatttattaggacgtttgcaaggcgaggaacgtctcctctggctttacgaagaagtggagaaaccattgagtcgcgtgctcgcgcatatggaagctaccggtgtcaaattagacgtggcgtatttggagaatctcagccttgaagttgctgcccacatgcgccgcttggaggaagaagtattccgtttagcaggccgttcctttcgccttaactctcgcgatcagttagaacgtgtgttgttcgatgaacttggtctccctcctatcggcaagacagagaagaccggtaaacgtagcacttcagcggcggttttagaagctcttcgcgaagtccatcccattgtggacaagatcttgcagtaccgcgaactcgcgaaattgaaaggcacctatattgaccgtcttccggcattagtccacccgaaaacgggacgcctccatacccgcttcaaccaaacagccacggcgaccggtcgtttgtcctcctctgatccaaaccttcagaatattccagtacgtaccccattgggccagaagatccgccgtgcgtttgtagctgaggagggttggcgtttagtggccctcgattatcgtcaaattgaattacgtgtccttgcccatctttctggcgatgagaacctcatccgcgtgtttcaggaaggcaaagacattcacactcaaacggcaagctggatgtttggattatcagctgaagcgatcgatcctttgatgcgtcgtgcagcgaagaccatcactttcggtgttctctacggtatgagtgcctttcgtttgtcgcaggaattaggcattccctatgaagaagctcaggcgttcattcagaaatactttcaaagctatcccaaagttaaagcatggatcgagaagactctccgtgaaggccgcacacgtggttacgtagagaccttatttggacgtcgccgctatgttcccgatttaaacgctcgcgtgaaaggcaagcgtgaagccgccgaacgcatggcgttcaacatgcctgtacagggcacggcagctgacctcatgaaacttgcaatggtgcgcctttttccacaattgcgtgaagttggtgcccgcatgctcttgcaggtccacgatgaactcttgttagaagcgccaaaagagcgtgcggaagaggtggcagccctcgcgaaagaagttatggaaggcgtgtggcccttagcggtgcctcttgaagtcgaagttggtattggcgaggattggctggctgccaaagga

SEQ ID NO: 4682 - protein, 841 aa, synthetic construct
  REGION 1..841: note = Variant of DNA polymerase I from Thermus sp. strain 2.9
MHHHHHHGGSGVLPVFEPKGRVLLVDGHHLAYRNFFALKGLTTSLGEPVQGVYGFAKSLLKALKEDGDVVIVVFDAKAPSFRHEAYEAYKAGRAPTPEDFPRQLALMKELVDLLGLERLEVPGFEADDVLATLAKKAEREGYEVQILTADRDLFQLLSPRISVLHPEGHRITPEWLWEKYGLRPEQWVDFRALAGDPSDNIPGVKGIGEKTALKLLKEWGSLENLLKNLDQVKPESVREKILAHLEDLKLSRELSRVRTDLPLEVDFGRRREPDWEGLKAFLERLEFGSLLHEFGLLESPLLAEEAPWPPPEGAFLGYRLSRPEPMWAELLALAASAQGRVYRAEDPHGALRGLFEVRGLLAKDLAVVALREGLDLPPTDDPMLLAYLLDPSNTTPEGVARRYGGEWTEDAAKRALLAERLHANLLGRLQGEERLLWLYEEVEKPLSRVLAHMEATGVKLDVAYLENLSLEVAAHMRRLEEEVFRLAGRSFRLNSRDQLERVLFDELGLPPIGKTEKTGKRSTSAAVLEALREVHPIVDKILQYRELAKLKGTYIDRLPALVHPKTGRLHTRFNQTATATGRLSSSDPNLQNIPVRTPLGQKIRRAFVAEEGWRLVALDYRQIELRVLAHLSGDENLIRVFQEGKDIHTQTASWMFGLSAEAIDPLMRRAAKTITFGVLYGMSAFRLSQELGIPYEEAQAFIQKYFQSYPKVKAWIEKTLREGRTRGYVETLFGRRRYVPDLNARVKGKREAAERMAFNMPVQGTAADLMKLAMVRLFPQLREVGARMLLQVHDELLLEAPKERAEEVAALAKEVMEGVWPLAVPLEVEVGIGEDWLAAKG

SEQ ID NO: 4683 - DNA, 2523 bp, synthetic construct
  misc_feature 1..2523: note = Variant of DNA polymerase I from Thermus sp. strain 2.9
  source 1..2523: mol_type = other DNA
atgcaccatcatcatcatcatggcggtagcggcgtgttaccggtgttcgagcctaaaggtcgcgtgcttctggttgatggccatcatctcgcgtatcgtaacttctttgccctgaaaggattaaccaccagcctgggcgagccggtacagggtgtctacggctttgcaaagtcgctcctgaaagctctgaaagaagacggtgatgtggtgattgttgtctttgatgcgaaagcgccaagttttcgccacgaagcgtacgaagcttacaaagccgggcgtgctccaacgccggaagactttcctcgccaattggcgcttatgaaggaattagtggatttgcttggcctcgaacgcttggaagttcccggtttcgaggcagacgacgtattagcgactctcgcaaagaaagccgaacgtgagggctatgaagtccagatcttgacagcagatcgcgatcttttccagcttttatctccgcgcatctcggtgttacacccggaagggcatcgtatcaccccggaatggctctgggagaaatatggtttgcgtcccgaacaatgggtggattttcgcgccttagcaggcgatccgagcgacaatattccgggagttaaaggtatcggcgagaagacggcgctcaagctccttaaagaatgggggtcgttggagaacttgcttaagaatttagatcaggtcaaaccagagtcagtgcgtgagaagattcttgctcacctcgaagacctcaaattaagccgcgaattgtcccgtgtacgcaccgatttgccgctcgaagttgatttcggtcgccgccgcgaacctgactgggagggtcttaaagcgtttttagagcgtcttgaatttggttcgctcttgcatgaattcggccttttagaaagcccgttactggccgaagaagcaccttggccaccgcccgagggcgcgtttttaggttaccgtttgagtcgcccggaaccgatgtgggccgaattactggctcttgcagcgtctgcccagggacgtgtgtatcgcgcggaagaccctcatggtgcgctccgcggcctcttcgaagtccgtggactccttgccaaagacttagctgttgttgcattgcgcgaaggtcttgatttacctccgactgatgatccaatgcttcttgcgtacctcttggacccgtcaaacacgacgcccgaaggcgtagcccgtcgttacggcggcgagtggaccgaagatgcagcgaaacgcgcgttattggccgaacgtttgcacgccaatttattaggacgtttgcaaggcgaggaacgtctcctctggctttacgaagaagtggagaaaccattgagtcgcgtgctcgcgcatatggaagctaccggtgtcaaattagacgtggcgtatttggagaatctcagccttgaagttgctgcccacatgcgccgcttggaggaagaagtattccgtttagcaggccgttcctttcgccttaactctcgcgatcagttagaacgtgtgttgttcgatgaacttggtctccctcctatcggcaagacagagaagaccggtaaacgtagcacttcagcggcggttttagaagctcttcgcgaagtccatcccattgtggacaagatcttgcagtaccgcgaactcgcgaaattgaaaggcacctatattgaccgtcttccggcattagtccacccgaaaacgggacgcctccatacccgcttcaaccaaacagccacggcgaccggtcgtttgtcctcctctgatccaaaccttcagaatattccagtacgtaccccattgaagcagaagatccgccgtgcgtttgtagctgaggagggttggcgtttagtggccctcgattatcgtcaaattgaattacgtgtccttgcccatctttctggcgatgagaacctcatccgcgtgtttcaggaaggcaaagacattcacactcaaacggcaagctggatgtttggattatcagctgaagcgatcgatcctttgatgcgtcgtgcagcgaagaccatcaatttcggtgttctctacggtatgagtgcctttcgtttgtcgcaggaattaggcattccctatgaagaagctcaggcgttcattcagaaatactttcaaagctatcccaaagttaaagcatggatcgagaagactctccgtgaaggccgcacacgtggttacgtagagaccttatttggacgtcgccgctatgttcccgatttaaacgctcgcgtgaaaggcaagcgtgaagccgccgaacgcatggcgttcaacatgcctgtacagggcacggcagctgacctcatgaaacttgcaatggtgcgcctttttccacaattgcgtgaagttggtgcccgcatgctcttgcaggtccacgatgaactcttgttagaagcgccaaaagagcgtgcggaagaggtggcagccctcgcgaaagaagttatggaaggcgtgtggcccttagcggtgcctcttgaagtcgaagttggtattggcgaggattggctggctgccaaagga

SEQ ID NO: 4684 - protein, 841 aa, synthetic construct
  REGION 1..841: note = Variant of DNA polymerase I from Thermus sp. strain 2.9
MHHHHHHGGSGVLPVFEPKGRVLLVDGHHLAYRNFFALKGLTTSLGEPVQGVYGFAKSLLKALKEDGDVVIVVFDAKAPSFRHEAYEAYKAGRAPTPEDFPRQLALMKELVDLLGLERLEVPGFEADDVLATLAKKAEREGYEVQILTADRDLFQLLSPRISVLHPEGHRITPEWLWEKYGLRPEQWVDFRALAGDPSDNIPGVKGIGEKTALKLLKEWGSLENLLKNLDQVKPESVREKILAHLEDLKLSRELSRVRTDLPLEVDFGRRREPDWEGLKAFLERLEFGSLLHEFGLLESPLLAEEAPWPPPEGAFLGYRLSRPEPMWAELLALAASAQGRVYRAEDPHGALRGLFEVRGLLAKDLAVVALREGLDLPPTDDPMLLAYLLDPSNTTPEGVARRYGGEWTEDAAKRALLAERLHANLLGRLQGEERLLWLYEEVEKPLSRVLAHMEATGVKLDVAYLENLSLEVAAHMRRLEEEVFRLAGRSFRLNSRDQLERVLFDELGLPPIGKTEKTGKRSTSAAVLEALREVHPIVDKILQYRELAKLKGTYIDRLPALVHPKTGRLHTRFNQTATATGRLSSSDPNLQNIPVRTPLKQKIRRAFVAEEGWRLVALDYRQIELRVLAHLSGDENLIRVFQEGKDIHTQTASWMFGLSAEAIDPLMRRAAKTINFGVLYGMSAFRLSQELGIPYEEAQAFIQKYFQSYPKVKAWIEKTLREGRTRGYVETLFGRRRYVPDLNARVKGKREAAERMAFNMPVQGTAADLMKLAMVRLFPQLREVGARMLLQVHDELLLEAPKERAEEVAALAKEVMEGVWPLAVPLEVEVGIGEDWLAAKG

SEQ ID NO: 4685 - DNA, 2523 bp, synthetic construct
  misc_feature 1..2523: note = Variant of DNA polymerase I from Thermus sp. strain 2.9
  source 1..2523: mol_type = other DNA
atgcaccatcatcatcatcatggcggtagcggcgtgttaccggtgttcgagcctaaaggtcgcgtgcttctggttgatggccatcatctcgcgtatcgtaacttctttgccctgaaaggattaaccaccagcctgggcgagccggtacagggtgtctacggctttgcaaagtcgctcctgaaagctctgaaagaagacggtgatgtggtgattgttgtctttgatgcgaaagcgccaagttttcgccacgaagcgtacgaagcttacaaagccgggcgtgctccaacgccggaagactttcctcgccaattggcgcttatgaaggaattagtggatttgcttggcctcgaacgcttggaagttcccggtttcgaggcagacgacgtattagcgactctcgcaaagaaagccgaacgtgagggctatgaagtccagatcttgacagcagatcgcgatcttttccagcttttatctccgcgcatctcggtgttacacccggaagggcatcgtatcaccccggaatggctctgggagaaatatggtttgcgtcccgaacaatgggtggattttcgcgccttagcaggcgatccgagcgacaatattccgggagttaaaggtatcggcgagaagacggcgctcaagctccttaaagaatgggggtcgttggagaacttgcttaagaatttagatcaggtcaaaccagagtcagtgcgtgagaagattcttgctcacctcgaagacctcaaattaagccgcgaattgtcccgtgtacgcaccgatttgccgctcgaagttgatttcggtcgccgccgcgaacctgactgggagggtcttaaagcgtttttagagcgtcttgaatttggttcgctcttgcatgaattcggccttttagaaagcccgttactggccgaagaagcaccttggccaccgcccgagggcgcgtttttaggttaccgtttgagtcgcccggaaccgatgtgggccgaattactggctcttgcagcgtctgcccagggacgtgtgtatcgcgcggaagaccctcatggtgcgctccgcggcctcttcgaagtccgtggactccttgccaaagacttagctgttgttgcattgcgcgaaggtcttgatttacctccgactgatgatccaatgcttcttgcgtacctcttggacccgtcaaacacgacgcccgaaggcgtagcccgtcgttacggcggcgagtggaccgaagatgcagcgaaacgcgcgttattggccgaacgtttgcacgccaatttattaggacgtttgcaaggcgaggaacgtctcctctggctttacgaagaagtggagaaaccattgagtcgcgtgctcgcgcatatggaagctaccggtgtcaaattagacgtggcgtatttggagaatctcagccttgaagttgctgcccacatgcgccgcttggaggaagaagtattccgtttagcaggccgttcctttcgccttaactctcgcgatcagttagaacgtgtgttgttcgatgaacttggtctccctcctatcggcaagacagagaagaccggtaaacgtagcacttcagcggcggttttagaagctcttcgcgaagtccatcccattgtggacaagatcttgcagtaccgcgaactcgcgaaattgaaaggcacctatattgaccgtcttccggcattagtccacccgaaaacgggacgcctccatacccgcttcaaccaaacagccacggcgaccggtcgtttgtcctcctctgatccaaaccttcagaatattccagtacgtaccccattgggccagaagatccgccgtgcgtttgtagctgaggagggttggcgtttagtggccctcgattatcgtcaaattgaattacgtgtccttgcccatctttctggcgatgagaacctcatccgcgtgtttcaggaaggcaaagacattcacactcaaacggcaagctggatgtttggattatcagctgaagcgatcgatcctttgatgcgtcgtgcagcgaagaccatcaatttcggtgttctctacggtatgagtgcctttcgtttgtcgcaggaattaggcattccctatgaagaagctcaggcgttcattcagaaatactttcaaagctatcccaaagttaaagcatggatcgagaagactctccgtgaaggccgcacacgtggttacgtagagaccttatttggacgtcgccgctatgttcccgatttatgggctcgcgtgaaaggaaagcgtgaagccgccgaacgcatggcgttcaacatgcctgtacagggcacggcagctgacctcatgaaacttgcaatggtgcgcctttttccacaattgcgtgaagttggtgcccgcatgctcttgcaggtccacgatgaactcttgttagaagcgccaaaagagcgtgcggaagaggtggcagccctcgcgaaagaagttatggaaggcgtgtggcccttagcggtgcctcttgaagtcgaagttggtattggcgaggattggctggctgccaaagga

SEQ ID NO: 4686 - protein, 841 aa, synthetic construct
  REGION 1..841: note = Variant of DNA polymerase I from Thermus sp. strain 2.9
MHHHHHHGGSGVLPVFEPKGRVLLVDGHHLAYRNFFALKGLTTSLGEPVQGVYGFAKSLLKALKEDGDVVIVVFDAKAPSFRHEAYEAYKAGRAPTPEDFPRQLALMKELVDLLGLERLEVPGFEADDVLATLAKKAEREGYEVQILTADRDLFQLLSPRISVLHPEGHRITPEWLWEKYGLRPEQWVDFRALAGDPSDNIPGVKGIGEKTALKLLKEWGSLENLLKNLDQVKPESVREKILAHLEDLKLSRELSRVRTDLPLEVDFGRRREPDWEGLKAFLERLEFGSLLHEFGLLESPLLAEEAPWPPPEGAFLGYRLSRPEPMWAELLALAASAQGRVYRAEDPHGALRGLFEVRGLLAKDLAVVALREGLDLPPTDDPMLLAYLLDPSNTTPEGVARRYGGEWTEDAAKRALLAERLHANLLGRLQGEERLLWLYEEVEKPLSRVLAHMEATGVKLDVAYLENLSLEVAAHMRRLEEEVFRLAGRSFRLNSRDQLERVLFDELGLPPIGKTEKTGKRSTSAAVLEALREVHPIVDKILQYRELAKLKGTYIDRLPALVHPKTGRLHTRFNQTATATGRLSSSDPNLQNIPVRTPLGQKIRRAFVAEEGWRLVALDYRQIELRVLAHLSGDENLIRVFQEGKDIHTQTASWMFGLSAEAIDPLMRRAAKTINFGVLYGMSAFRLSQELGIPYEEAQAFIQKYFQSYPKVKAWIEKTLREGRTRGYVETLFGRRRYVPDLWARVKGKREAAERMAFNMPVQGTAADLMKLAMVRLFPQLREVGARMLLQVHDELLLEAPKERAEEVAALAKEVMEGVWPLAVPLEVEVGIGEDWLAAKG

SEQ ID NO: 4687 - DNA, 2523 bp, synthetic construct
  misc_feature 1..2523: note = Variant of DNA polymerase I from Thermus sp. strain 2.9
  source 1..2523: mol_type = other DNA
atgcaccatcatcatcatcatggcggtagcggcgtgttaccggtgttcgagcctaaaggtcgcgtgcttctggttgatggccatcatctcgcgtatcgtaacttctttgccctgaaaggattaaccaccagcctgggcgagccggtacagggtgtctacggctttgcaaagtcgctcctgaaagctctgaaagaagacggtgatgtggtgattgttgtctttgatgcgaaagcgccaagttttcgccacgaagcgtacgaagcttacaaagccgggcgtgctccaacgccggaagactttcctcgccaattggcgcttatgaaggaattagtggatttgcttggcctcgaacgcttggaagttcccggtttcgaggcagacgacgtattagcgactctcgcaaagaaagccgaacgtgagggctatgaagtccagatcttgacagcagatcgcgatcttttccagcttttatctccgcgcatctcggtgttacacccggaagggcatcgtatcaccccggaatggctctgggagaaatatggtttgcgtcccgaacaatgggtggattttcgcgccttagcaggcgatccgagcgacaatattccgggagttaaaggtatcggcgagaagacggcgctcaagctccttaaagaatgggggtcgttggagaacttgcttaagaatttagatcaggtcaaaccagagtcagtgcgtgagaagattcttgctcacctcgaagacctcaaattaagccgcgaattgtcccgtgtacgcaccgatttgccgctcgaagttgatttcggtcgccgcttggaacctgactgggagggtcttaaagcgtttttagagcgtcttgaatttggttcgctcttgcatgaattcggccttttagaaagcccgttactggccgaagaagcaccttggccaccgcccgagggcgcgtttttaggttaccgtttgagtcgcccggaaccgatgtgggccgaattactggctcttgcagcgtctgcccagggacgtgtgtatcgcgcggaagaccctcatggtgcgctccgcggcctcttcgaagtccgtggactccttgccaaagacttagctgttgttgcattgcgcgaaggtcttgatttacctccgactgatgatccaatgcttcttgcgtacctcttggacccgtcaaacacgacgcccgaaggcgtagcccgtcgttacggcggcgagtggaccgaagatgcagcgaaacgcgcgttattggccgaacgtttgcacgccaatttattaggacgtttgcaaggcgaggaacgtctcctctggctttacgaagaagtggagaaaccattgagtcgcgtgctcgcgcatatggaagctaccggtgtcaaattagacgtggcgtatttggagaatctcagccttgaagttgctgcccacatgcgccgcttggaggaagaagtattccgtttagcaggccgttcctttcgccttaactctcgcgatcagttagaacgtgtgttgttcgatgaacttggtctccctcctatcggcaagacagagaagaccggtaaacgtagcacttcagcggcggttttagaagctcttcgcgaagtccatcccattgtggacaagatcttgcagtaccgcgaactcgcgaaattgaaaggcacctatattgaccgtcttccggcattagtccacccgaaaacgggacgcctccatacccgcttcaaccaaacagccacggcgaccggtcgtttgtcctcctctgatccaaaccttcagaatattccagtacgtaccccattgggccagaagatccgccgtgcgtttgtagctgaggagggttggcgtttagtggccctcgattatcgtcaaattgaattacgtgtccttgcccatctttctggcgatgagaacctcatccgcgtgtttcaggaaggcaaagacattcacactcaaacggcaagctggatgtttggattatcagctgaagcgatcgatcctttgatgcgtcgtgcagcgaagaccatcaatttcggtgttctctacggtatgagtgcctttcgtttgtcgcaggaattaggcattccctatgaagaagctcaggcgttcattcagaaatactttcaaagctatcccaaagttaaagcatggatcgagaagactctccgtgaaggccgcacacgtggttacgtagagaccttatttggacgtcgccgctatgttcccgatttaaacgctcgcgtgaaaggcaagcgtgaagccgccgaacgcatggcgttcaacatgcctgtacagggcacggcagctgacctcatgaaacttgcaatggtgcgcctttttccacaattgcgtgaagttggtgcccgcatgctcttgcaggtccacgatgaactcttgttagaagcgccaaaagagcgtgcggaagaggtggcagccctcgcgaaagaagttatggaaggcgtgtggcccttagcggtgcctcttgaagtcgaagttggtattggcgaggattggctggctgccaaagga

SEQ ID NO: 4688 - protein, 841 aa, synthetic construct
  REGION 1..841: note = Variant of DNA polymerase I from Thermus sp. strain 2.9
MHHHHHHGGSGVLPVFEPKGRVLLVDGHHLAYRNFFALKGLTTSLGEPVQGVYGFAKSLLKALKEDGDVVIVVFDAKAPSFRHEAYEAYKAGRAPTPEDFPRQLALMKELVDLLGLERLEVPGFEADDVLATLAKKAEREGYEVQILTADRDLFQLLSPRISVLHPEGHRITPEWLWEKYGLRPEQWVDFRALAGDPSDNIPGVKGIGEKTALKLLKEWGSLENLLKNLDQVKPESVREKILAHLEDLKLSRELSRVRTDLPLEVDFGRRLEPDWEGLKAFLERLEFGSLLHEFGLLESPLLAEEAPWPPPEGAFLGYRLSRPEPMWAELLALAASAQGRVYRAEDPHGALRGLFEVRGLLAKDLAVVALREGLDLPPTDDPMLLAYLLDPSNTTPEGVARRYGGEWTEDAAKRALLAERLHANLLGRLQGEERLLWLYEEVEKPLSRVLAHMEATGVKLDVAYLENLSLEVAAHMRRLEEEVFRLAGRSFRLNSRDQLERVLFDELGLPPIGKTEKTGKRSTSAAVLEALREVHPIVDKILQYRELAKLKGTYIDRLPALVHPKTGRLHTRFNQTATATGRLSSSDPNLQNIPVRTPLGQKIRRAFVAEEGWRLVALDYRQIELRVLAHLSGDENLIRVFQEGKDIHTQTASWMFGLSAEAIDPLMRRAAKTINFGVLYGMSAFRLSQELGIPYEEAQAFIQKYFQSYPKVKAWIEKTLREGRTRGYVETLFGRRRYVPDLNARVKGKREAAERMAFNMPVQGTAADLMKLAMVRLFPQLREVGARMLLQVHDELLLEAPKERAEEVAALAKEVMEGVWPLAVPLEVEVGIGEDWLAAKG

SEQ ID NO: 4689 - DNA, 2523 bp, synthetic construct
  misc_feature 1..2523: note = Variant of DNA polymerase I from Thermus sp. strain 2.9
  source 1..2523: mol_type = other DNA
atgcaccatcatcatcatcatggcggtagcggcgtgttaccggtgttcgagcctaaaggtcgcgtgcttctggttgatggccatcatctcgcgtatcgtaacttctttgccctgaaaggattaaccaccagcctgggcgagccggtacagggtgtctacggctttgcaaagtcgctcctgaaagctctgaaagaagacggtgatgtggtgattgttgtctttgatgcgaaagcgccaagttttcgccacgaagcgtacgaagcttacaaagccgggcgtgctccaacgccggaagactttcctcgccaattggcgcttatgaaggaattagtggatttgcttggcctcgaacgcttggaagttcccggtttcgaggcagacgacgtattagcgactctcgcaaagaaagccgaacgtgagggctatgaagtccagatcttgacagcagatcgcgatcttttccagcttttatctccgcgcatctcggtgttacacccggaagggcatcgtatcaccccggaatggctctgggagaaatatggtttgcgtcccgaacaatgggtggattttcgcgccttagcaggcgatccgagcgacaatattccgggagttaaaggtatcggcgagaagacggcgctcaagctccttaaagaatgggggtcgttggagaacttgcttaagaatttagatcaggtcaaaccagagtcagtgcgtgagaagattcttgctcacctcgaagacctcaaattaagccgcgaattgtcccgtgtacgcaccgatttgccgctcgaagttgatttcggtcgccgccgcgaacctgactgggagggtcttaaagcgtttttagagcgtcttgaatttggttcgctcttgcatgaattcggccttttagaaagcccgttactggccgaagaagcaccttggccaccgcccgagggcgcgtttttaggttaccgtttgagtcgcccggaaccgatgtgggccgaattactggctcttgcagcgtctgcccagggacgtgtgtatcgcgcggaagaccctcatggtgcgctccgcggcctcttcgaagtccgtggactccttgccaaagacttagctgttgttgcattgcgcgaaggtcttgatttacctccgactgatgatccaatgcttcttgcgtacctcttggacccgtcaaacacgacgcccgaaggcgtagcccgtcgttacggcggcgagtggaccgaagatgcagcgaaacgcgcgttattggccgaacgtttgcacgccaatttattaggacgtttgcaaggcgaggaacgtctcctctggctttacgaagaagtggagaaaccattgagtcgcgtgctcgcgcatatggaagctaccggtgtcaaattagacgtggcgtatttggagaatctcagccttgaagttgctgcccacatgcgccgcttggaggaagaagtattccgtttagcaggccgttcctttcgccttaactctcgcgatcagttagaacgtgtgttgttcgatgaacttggtctccctcctatcggcaagacagagaagaccggtaaacgtagcacttcagcggcggttttagaagctcttcgcgaagtccatcccattgtggacaagatcttgcagtaccgcgaactcgcgaaattgaaaggcacctatattgaccgtcttccggcattagtccacccgaaaacgggacgcctccatacccgcttcaaccaaacagccacggcgaccggtcgtttgtcctcctctgatccaaaccttcagaatattccagtacgtaccccattgggccagaagatccgccgtgcgtttgtagctgaggagggttggcgtttagtggccctcgattatcgtcaaattgaattacgtgtccttgcccatctttctggcgatgagaacctcatccgcgtgtttcaggaaggcaaagacattcacactcaaacggcaagctggatgtttggattatcagctgaagcgatcgatcctttgatgcgtcgtgcagcgaagaccatcaatttcggtgttctctacggtatgagtgcctttcgtttgtcgcaggaattaggcattccctatgaagaagctcaggcgttcattcagaaatactttcaaagctatcccaaagttaaagcatggatcgagaagactggtcgtgaaggccgcacacgtggttacgtagagaccttatttggacgtcgccgctatgttcccgatttaaacgctcgcgtgaaaggcaagcgtgaagccgccgaacgcatggcgttcaacatgcctgtacagggcacggcagctgacctcatgaaacttgcaatggtgcgcctttttccacaattgcgtgaagttggtgcccgcatgctcttgcaggtccacgatgaactcttgttagaagcgccaaaagagcgtgcggaagaggtggcagccctcgcgaaagaagttatggaaggcgtgtggcccttagcggtgcctcttgaagtcgaagttggtattggcgaggattggctggctgccaaagga

SEQ ID NO: 4690 - protein, 841 aa, synthetic construct
  REGION 1..841: note = Variant of DNA polymerase I from Thermus sp. strain 2.9
MHHHHHHGGSGVLPVFEPKGRVLLVDGHHLAYRNFFALKGLTTSLGEPVQGVYGFAKSLLKALKEDGDVVIVVFDAKAPSFRHEAYEAYKAGRAPTPEDFPRQLALMKELVDLLGLERLEVPGFEADDVLATLAKKAEREGYEVQILTADRDLFQLLSPRISVLHPEGHRITPEWLWEKYGLRPEQWVDFRALAGDPSDNIPGVKGIGEKTALKLLKEWGSLENLLKNLDQVKPESVREKILAHLEDLKLSRELSRVRTDLPLEVDFGRRREPDWEGLKAFLERLEFGSLLHEFGLLESPLLAEEAPWPPPEGAFLGYRLSRPEPMWAELLALAASAQGRVYRAEDPHGALRGLFEVRGLLAKDLAVVALREGLDLPPTDDPMLLAYLLDPSNTTPEGVARRYGGEWTEDAAKRALLAERLHANLLGRLQGEERLLWLYEEVEKPLSRVLAHMEATGVKLDVAYLENLSLEVAAHMRRLEEEVFRLAGRSFRLNSRDQLERVLFDELGLPPIGKTEKTGKRSTSAAVLEALREVHPIVDKILQYRELAKLKGTYIDRLPALVHPKTGRLHTRFNQTATATGRLSSSDPNLQNIPVRTPLGQKIRRAFVAEEGWRLVALDYRQIELRVLAHLSGDENLIRVFQEGKDIHTQTASWMFGLSAEAIDPLMRRAAKTINFGVLYGMSAFRLSQELGIPYEEAQAFIQKYFQSYPKVKAWIEKTGREGRTRGYVETLFGRRRYVPDLNARVKGKREAAERMAFNMPVQGTAADLMKLAMVRLFPQLREVGARMLLQVHDELLLEAPKERAEEVAALAKEVMEGVWPLAVPLEVEVGIGEDWLAAKG

SEQ ID NO: 4691 - DNA, 2523 bp, synthetic construct
  misc_feature 1..2523: note = Variant of DNA polymerase I from Thermus sp. strain 2.9
  source 1..2523: mol_type = other DNA
atgcaccatcatcatcatcatggcggtagcggcgtgttaccggtgttcgagcctaaaggtcgcgtgcttctggttgatggccatcatctcgcgtatcgtaacttctttgccctgaaaggattaaccaccagcctgggcgagccggtacagggtgtctacggctttgcaaagtcgctcctgaaagctctgaaagaagacggtgatgtggtgattgttgtctttgatgcgaaagcgccaagttttcgccacgaagcgtacgaagcttacaaagccgggcgtgctccaacgccggaagactttcctcgccaattggcgcttatgaaggaattagtggatttgcttggcctcgaacgcttggaagttcccggtttcgaggcagacgacgtattagcgactctcgcaaagaaagccgaacgtgagggctatgaagtccagatcttgacagcagatcgcgatcttttccagcttttatctccgcgcatctcggtgttacacccggaagggcatcgtatcaccccggaatggctctgggagaaatatggtttgcgtcccgaacaatgggtggattttcgcgccttagcaggcgatccgagcgacaatattccgggagttaaaggtatcggcgagaagacggcgctcaagctccttaaagaatgggggtcgttggagaacttgcttaagaatttagatcaggtcaaaccagagtcagtgcgtgagaagattcttgctcacctcgaagacctcaaattaagccgcgaattgtcccgtgtacgcaccgatttgccgctcgaagttgatttcggtcgccgccgcgaacctgactgggagggtcttaaagcgtttttagagcgtcttgaatttggttcgctcttgcatgaattcggccttttagaaagcccgttactggccgaagaagcaccttggccaccgcccgagggcgcgtttttaggttaccgtttgagtcgcccggaaccgatgtgggccgaattactggctcttgcagcgtctgcccagggacgtgtgtatcgcgcggaagaccctcatggtgcgctccgcggcctcttcgaagtccgtggactccttgccaaagacttagctgttgttgcattgcgcgaaggtcttgatttacctccgactgatgatccaatgcttcttgcgtacctcttggacccgtcaaacacgacgcccgaaggcgtagcccgtcgttacggcggcgagtggaccgaagatgcagcgaaacgcgcgttattggccgaacgtttgcacgccaatttattaggacgtttgcaaggcgaggaacgtctcctctggctttacgaagaagtggagaaaccattgagtcgcgtgctcgcgcatatggaagctaccggtgtcaaattagacgtggcgtatttggagaatctcagccttgaagttgctgcccacatgcgccgcttggaggaagaagtattccgtttagcaggccgttcctttcgccttaactctcgcgatcagttagaacgtgtgttgttcgatgaacttggtctccctcctatcggcaagacagagaagaccggtaaacgtagcacttcagcggcggttttagaagctcttcgcgaagtccatcccattgtggacaagatcttgcagtaccgcgaactcgcgaaattgaaaggcacctatattgaccgtcttccggcattagtccacccgaaaacgggacgcctccatacccgcttcaaccaaacagccacggcgaccggtcgtttgtcctcctctgatccaaaccttcagaatattccagtacgtaccccattgggccagaagatccgccgtgcgtttgtagctgaggagggttggcgtttagtggccctcgattatcgtcaaattgaattacgtgtccttgcccatctttctggcgatgagaacctcatccgcgtgtttcaggaaggcaaagacattcacactcaaacggcaagctggatgtttggattatcagctgaagcgatcgatcctttgatgcgtcgtgcagcgaagaccatcaatttcggtgttctctacggtatgagtgcctttcgtttgtcgcaggaattaggcattccctatgaagaagctcaggcgttcattggtaaatactttcaaagctatcccaaagttaaagcatggatcgagaagactctccgtgaaggccgcacacgtggttacgtagagaccttatttggacgtcgccgctatgttcccgatttaaacgctcgcgtgaaaggcaagcgtgaagccgccgaacgcatggcgttcaacatgcctgtacagggcacggcagctgacctcatgaaacttgcaatggtgcgcctttttccacaattgcgtgaagttggtgcccgcatgctcttgcaggtccacgatgaactcttgttagaagcgccaaaagagcgtgcggaagaggtggcagccctcgcgaaagaagttatggaaggcgtgtggcccttagcggtgcctcttgaagtcgaagttggtattggcgaggattggctggctgccaaagga

SEQ ID NO: 4692 - protein, 841 aa, synthetic construct
  REGION 1..841: note = Variant of DNA polymerase I from Thermus sp. strain 2.9
MHHHHHHGGSGVLPVFEPKGRVLLVDGHHLAYRNFFALKGLTTSLGEPVQGVYGFAKSLLKALKEDGDVVIVVFDAKAPSFRHEAYEAYKAGRAPTPEDFPRQLALMKELVDLLGLERLEVPGFEADDVLATLAKKAEREGYEVQILTADRDLFQLLSPRISVLHPEGHRITPEWLWEKYGLRPEQWVDFRALAGDPSDNIPGVKGIGEKTALKLLKEWGSLENLLKNLDQVKPESVREKILAHLEDLKLSRELSRVRTDLPLEVDFGRRREPDWEGLKAFLERLEFGSLLHEFGLLESPLLAEEAPWPPPEGAFLGYRLSRPEPMWAELLALAASAQGRVYRAEDPHGALRGLFEVRGLLAKDLAVVALREGLDLPPTDDPMLLAYLLDPSNTTPEGVARRYGGEWTEDAAKRALLAERLHANLLGRLQGEERLLWLYEEVEKPLSRVLAHMEATGVKLDVAYLENLSLEVAAHMRRLEEEVFRLAGRSFRLNSRDQLERVLFDELGLPPIGKTEKTGKRSTSAAVLEALREVHPIVDKILQYRELAKLKGTYIDRLPALVHPKTGRLHTRFNQTATATGRLSSSDPNLQNIPVRTPLGQKIRRAFVAEEGWRLVALDYRQIELRVLAHLSGDENLIRVFQEGKDIHTQTASWMFGLSAEAIDPLMRRAAKTINFGVLYGMSAFRLSQELGIPYEEAQAFIGKYFQSYPKVKAWIEKTLREGRTRGYVETLFGRRRYVPDLNARVKGKREAAERMAFNMPVQGTAADLMKLAMVRLFPQLREVGARMLLQVHDELLLEAPKERAEEVAALAKEVMEGVWPLAVPLEVEVGIGEDWLAAKG

SEQ ID NO: 4693 - DNA, 2523 bp, synthetic construct
  misc_feature 1..2523: note = Variant of DNA polymerase I from Thermus sp. strain 2.9
  source 1..2523: mol_type = other DNA
atgcaccatcatcatcatcatggcggtagcggcgtgttaccggtgttcgagcctaaaggtcgcgtgcttctggttgatggccatcatctcgcgtatcgtaacttctttgccctgaaaggattaaccaccagcctgggcgagccggtacagggtgtctacggctttgcaaagtcgctcctgaaagctctgaaagaagacggtgatgtggtgattgttgtctttgatgcgaaagcgccaagttttcgccacgaagcgtacgaagcttacaaagccgggcgtgctccaacgccggaagactttcctcgccaattggcgcttatgaaggaattagtggatttgcttggcctcgaacgcttggaagttcccggtttcgaggcagacgacgtattagcgactctcgcaaagaaagccgaacgtgagggctatgaagtccagatcttgacagcagatcgcgatcttttccagcttttatctccgcgcatctcggtgttacacccggaagggcatcgtatcaccccggaatggctctgggagaaatatggtttgcgtcccgaacaatgggtggattttcgcgccttagcaggcgatccgagcgacaatattccgggagttaaaggtatcggcgagaagacggcgctcaagctccttaaagaatgggggtcgttggagaacttgcttaagaatttagatcaggtcaaaccagagtcagtgcgtgagaagattcttgctcacctcgaagacctcaaattaagccgcgaattgtcccgtgtacgcaccgatttgccgctcgaagttgatttcggtcgccgccgcgaacctgactgggagggtcttaaagcgtttttagagcgtcttgaatttggttcgctcttgcatgaattcggccttttagaaagcccgttactggccgaagaagcaccttggccaccgcccgagggcgcgtttttaggttaccgtttgagtcgcccggaaccgatgtgggccgaattactggctcttgcagcgtctgcccagggacgtgtgtatcgcgcggaagaccctcatggtgcgctccgcggcctcttcgaagtccgtggactccttgccaaagacttagctgttgttgcattgcgcgaaggtcttgatttacctccgactgatgatccaatgcttcttgcgtacctcttggacccggtgaacacgacgcccgaaggcgtagcccgtcgttacggcggcgagtggaccgaagatgcagcgaaacgcgcgttattggccgaacgtttgcacgccaatttattaggacgtttgcaaggcgaggaacgtctcctctggctttacgaagaagtggagaaaccattgagtcgcgtgctcgcgcatatggaagctaccggtgtcaaattagacgtggcgtatttggagaatctcagccttgaagttgctgcccacatgcgccgcttggaggaagaagtattccgtttagcaggccgttcctttcgccttaactctcgcgatcagttagaacgtgtgttgttcgatgaacttggtctccctcctatcggcaagacagagaagaccggtaaacgtagcacttcagcggcggttttagaagctcttcgcgaagtccatcccattgtggacaagatcttgcagtaccgcgaactcgcgaaattgaaaggcacctatattgaccgtcttccggcattagtccacccgaaaacgggacgcctccatacccgcttcaaccaaacagccacggcgaccggtcgtttgtcctcctctgatccaaaccttcagaatattccagtacgtaccccattgggccagaagatccgccgtgcgtttgtagctgaggagggttggcgtttagtggccctcgattatcgtcaaattgaattacgtgtccttgcccatctttctggcgatgagaacctcatccgcgtgtttcaggaaggcaaagacattcacactcaaacggcaagctggatgtttggattatcagctgaagcgatcgatcctttgatgcgtcgtgcagcgaagaccatcaatttcggtgttctctacggtatgagtgcctttcgtttgtcgcaggaattaggcattccctatgaagaagctcaggcgttcattcagaaatactttcaaagctatcccaaagttaaagcatggatcgagaagactctccgtgaaggccgcacacgtggttacgtagagaccttatttggacgtcgccgctatgttcccgatttaaacgctcgcgtgaaaggcaagcgtgaagccgccgaacgcatggcgttcaacatgcctgtacagggcacggcagctgacctcatgaaacttgcaatggtgcgcctttttccacaattgcgtgaagttggtgcccgcatgctcttgcaggtccacgatgaactcttgttagaagcgccaaaagagcgtgcggaagaggtggcagccctcgcgaaagaagttatggaaggcgtgtggcccttagcggtgcctcttgaagtcgaagttggtattggcgaggattggctggctgccaaagga

SEQ ID NO: 4694 - protein, 841 aa, synthetic construct
  REGION 1..841: note = Variant of DNA polymerase I from Thermus sp. strain 2.9
MHHHHHHGGSGVLPVFEPKGRVLLVDGHHLAYRNFFALKGLTTSLGEPVQGVYGFAKSLLKALKEDGDVVIVVFDAKAPSFRHEAYEAYKAGRAPTPEDFPRQLALMKELVDLLGLERLEVPGFEADDVLATLAKKAEREGYEVQILTADRDLFQLLSPRISVLHPEGHRITPEWLWEKYGLRPEQWVDFRALAGDPSDNIPGVKGIGEKTALKLLKEWGSLENLLKNLDQVKPESVREKILAHLEDLKLSRELSRVRTDLPLEVDFGRRREPDWEGLKAFLERLEFGSLLHEFGLLESPLLAEEAPWPPPEGAFLGYRLSRPEPMWAELLALAASAQGRVYRAEDPHGALRGLFEVRGLLAKDLAVVALREGLDLPPTDDPMLLAYLLDPVNTTPEGVARRYGGEWTEDAAKRALLAERLHANLLGRLQGEERLLWLYEEVEKPLSRVLAHMEATGVKLDVAYLENLSLEVAAHMRRLEEEVFRLAGRSFRLNSRDQLERVLFDELGLPPIGKTEKTGKRSTSAAVLEALREVHPIVDKILQYRELAKLKGTYIDRLPALVHPKTGRLHTRFNQTATATGRLSSSDPNLQNIPVRTPLGQKIRRAFVAEEGWRLVALDYRQIELRVLAHLSGDENLIRVFQEGKDIHTQTASWMFGLSAEAIDPLMRRAAKTINFGVLYGMSAFRLSQELGIPYEEAQAFIQKYFQSYPKVKAWIEKTLREGRTRGYVETLFGRRRYVPDLNARVKGKREAAERMAFNMPVQGTAADLMKLAMVRLFPQLREVGARMLLQVHDELLLEAPKERAEEVAALAKEVMEGVWPLAVPLEVEVGIGEDWLAAKG

SEQ ID NO: 4695 - DNA, 2523 bp, synthetic construct
  misc_feature 1..2523: note = Variant of DNA polymerase I from Thermus sp. strain 2.9
  source 1..2523: mol_type = other DNA
atgcaccatcatcatcatcatggcggtagcggcgtgttaccggtgttcgagcctaaaggtcgcgtgcttctggttgatggccatcatctcgcgtatcgtaacttctttgccctgaaaggattaaccaccagcctgggcgagccggtacagggtgtctacggctttgcaaagtcgctcctgaaagctctgaaagaagacggtgatgtggtgattgttgtctttgatgcgaaagcgccaagttttcgccacgaagcgtacgaagcttacaaagccgggcgtgctccaacgccggaagactttcctcgccaattggcgcttatgaaggaattagtggatttgcttggcctcgaacgcttggaagttcccggtttcgaggcagacgacgtattagcgactctcgcaaagaaagccgaacgtgagggctatgaagtccagatcttgacagcagatcgcgatcttttccagcttttatctccgcgcatctcggtgttacacccggaagggcatcgtatcaccccggaatggctctgggagaaatatggtttgcgtcccgaacaatgggtggattttcgcgccttagcaggcgatccgagcgacaatattccgggagttaaaggtatcggcgagaagacggcgctcaagctccttaaagaatgggggtcgttggagaacttgcttaagaatttagatcaggtcaaaccagagtcagtgcgtgagaagattcttgctcacctcgaagacctcaaattaagccgcgaattgtcccgtgtacgcaccgatttgccgctcgaagttgatttcggtcgccgccgcgaacctgactgggagggtcttaaagcgtttttagagcgtcttgaatttggttcgctcttgcatgaattcggccttttagaaagcccgttactggccgaagaagcaccttggccaccgcccgagggcgcgtttttaggttaccgtttgagtcgcccggaaccgatgtgggccgaattactggctcttgcagcgtctgcccagggacgtgtgtatcgcgcggaagaccctcatggtgcgctccgcggcctcttcgaagtccgtggactccttgccaaagacttagctgttgttgcattgcgcgaaggtcttgatattcctccgactgatgatccaatgcttcttgcgtacctcttggacccgtcaaacacgacgcccgaaggcgtagcccgtcgttacggcggcgagtggaccgaagatgcagcgaaacgcgcgttattggccgaacgtttgcacgccaatttattaggacgtttgcaaggcgaggaacgtctcctctggctttacgaagaagtggagaaaccattgagtcgcgtgctcgcgcatatggaagctaccggtgtcaaattagacgtggcgtatttggagaatctcagccttgaagttgctgcccacatgcgccgcttggaggaagaagtattccgtttagcaggccgttcctttcgccttaactctcgcgatcagttagaacgtgtgttgttcgatgaacttggtctccctcctatcggcaagacagagaagaccggtaaacgtagcacttcagcggcggttttagaagctcttcgcgaagtccatcccattgtggacaagatcttgcagtaccgcgaactcgcgaaattgaaaggcacctatattgaccgtcttccggcattagtccacccgaaaacgggacgcctccatacccgcttcaaccaaacagccacggcgaccggtcgtttgtcctcctctgatccaaaccttcagaatattccagtacgtaccccattgggccagaagatccgccgtgcgtttgtagctgaggagggttggcgtttagtggccctcgattatcgtcaaattgaattacgtgtccttgcccatctttctggcgatgagaacctcatccgcgtgtttcaggaaggcaaagacattcacactcaaacggcaagctggatgtttggattatcagctgaagcgatcgatcctttgatgcgtcgtgcagcgaagaccatcaatttcggtgttctctacggtatgagtgcctttcgtttgtcgcaggaattaggcattccctatgaagaagctcaggcgttcattcagaaatactttcaaagctatcccaaagttaaagcatggatcgagaagactctccgtgaaggccgcacacgtggttacgtagagaccttatttggacgtcgccgctatgttcccgatttaaacgctcgcgtgaaaggcaagcgtgaagccgccgaacgcatggcgttcaacatgcctgtacagggcacggcagctgacctcatgaaacttgcaatggtgcgcctttttccacaattgcgtgaagttggtgcccgcatgctcttgcaggtccacgatgaactcttgttagaagcgccaaaagagcgtgcggaagaggtggcagccctcgcgaaagaagttatggaaggcgtgtggcccttagcggtgcctcttgaagtcgaagttggtattggcgaggattggctggctgccaaagga

SEQ ID NO: 4696 - protein, 841 aa, synthetic construct
  REGION 1..841: note = Variant of DNA polymerase I from Thermus sp. strain 2.9
MHHHHHHGGSGVLPVFEPKGRVLLVDGHHLAYRNFFALKGLTTSLGEPVQGVYGFAKSLLKALKEDGDVVIVVFDAKAPSFRHEAYEAYKAGRAPTPEDFPRQLALMKELVDLLGLERLEVPGFEADDVLATLAKKAEREGYEVQILTADRDLFQLLSPRISVLHPEGHRITPEWLWEKYGLRPEQWVDFRALAGDPSDNIPGVKGIGEKTALKLLKEWGSLENLLKNLDQVKPESVREKILAHLEDLKLSRELSRVRTDLPLEVDFGRRREPDWEGLKAFLERLEFGSLLHEFGLLESPLLAEEAPWPPPEGAFLGYRLSRPEPMWAELLALAASAQGRVYRAEDPHGALRGLFEVRGLLAKDLAVVALREGLDIPPTDDPMLLAYLLDPSNTTPEGVARRYGGEWTEDAAKRALLAERLHANLLGRLQGEERLLWLYEEVEKPLSRVLAHMEATGVKLDVAYLENLSLEVAAHMRRLEEEVFRLAGRSFRLNSRDQLERVLFDELGLPPIGKTEKTGKRSTSAAVLEALREVHPIVDKILQYRELAKLKGTYIDRLPALVHPKTGRLHTRFNQTATATGRLSSSDPNLQNIPVRTPLGQKIRRAFVAEEGWRLVALDYRQIELRVLAHLSGDENLIRVFQEGKDIHTQTASWMFGLSAEAIDPLMRRAAKTINFGVLYGMSAFRLSQELGIPYEEAQAFIQKYFQSYPKVKAWIEKTLREGRTRGYVETLFGRRRYVPDLNARVKGKREAAERMAFNMPVQGTAADLMKLAMVRLFPQLREVGARMLLQVHDELLLEAPKERAEEVAALAKEVMEGVWPLAVPLEVEVGIGEDWLAAKG

SEQ ID NO: 4697 - DNA, 2523 bp, synthetic construct
  misc_feature 1..2523: note = Variant of DNA polymerase I from Thermus sp. strain 2.9
  source 1..2523: mol_type = other DNA
atgcaccatcatcatcatcatggcggtagcggcgtgttaccggtgttcgagcctaaaggtcgcgtgcttctggttgatggccatcatctcgcgtatcgtaacttctttgccctgaaaggattaaccaccagcctgggcgagccggtacagggtgtctacggctttgcaaagtcgctcctgaaagctctgaaagaagacggtgatgtggtgattgttgtctttgatgcgaaagcgccaagttttcgccacgaagcgtacgaagcttacaaagccgggcgtgctccaacgccggaagactttcctcgccaattggcgcttatgaaggaattagtggatttgcttggcctcgaacgcttggaagttcccggtttcgaggcagacgacgtattagcgactctcgcaaagaaagccgaacgtgagggctatgaagtccagatcttgacagcagatcgcgatcttttccagcttttatctccgcgcatctcggtgttacacccggaagggcatcgtatcaccccggaatggctctgggagaaatatggtttgcgtcccgaacaatgggtggattttcgcgccttagcaggcgatccgagcgacaatattccgggagttaaaggtatcggcgagaagacggcgctcaagctccttaaagaatgggggtcgttggagaacttgcttaagaatttagatcaggtcaaaccagagtcagtgcgtgagaagattcttgctcacctcgaagacctcaaattaagccgcgaattgtcccgtgtacgcaccgatttgccgctcgaagttgatttcggtcgccgccgcgaacctgactgggagggtcttaaagcgtttttagagcgtcttgaatttggttcgctcttgcatgaattcggccttttagaaagcccgttactggccgaagaagcaccttggccaccgcccgagggcgcgtttttaggttaccgtttgagtcgcccggaaccgatgtgggccgaattactggctcttgcagcgtctgcccagggacgtgtgtatcgcgcggaagaccctcatggtgcgctccgcggcctcttcgaagtccgtggactccttgccaaagacttagctgttgttgcattgcgcgaaggtcttgatttacctccgactgatgatccaatgcttcttgcgtacctcttggacccgtcaaacacgacgcccgaaggcgtagcccgtcgttacggcggcgagtggaccgaagatgcagcgaaacgcgcgttattggccgaacgtttgcacgccaatttattaggacgtttgcaaggcgaggaacgtctcctctggctttacgaagaagtggagaaaccattgagtcgcgtgctcgcgcatatggaagctaccggtgtcaaattagacgtggcgtatttggagaatctcagccttgaagttgctgcccacatgcgccgcttggaggaagaagtattccgtttagcaggccgttcctttcgccttaactctcgcgatcagttagaacgtgtgttgttcgatgaacttggtctccctcctatcggcaagacagagaagaccggtaaacgtagcacttcagcggcggttttagaagctcttcgcgaagtccatcccattgtggacaagatcttgcagtaccgcgaactcgcgaaattgaaaggcacctatattgaccgtcttccggcattagtccacccgaaaacgggacgcctccatacccgcttcaaccaaacagccacggcgaccggtcgtttgtcctcctctgatccaaaccttcagaatattccagtacgtaccccattgggccagaagatccgccgtgcgtttgtagctgaggagggttggcgtttagtggccctcgattatcgtcaaattgaattacgtgtccttgcccatctttctggcgatgagaacctcatccgcgtgtttcaggaaggcaaagacattcacactcaaacggcaagctggatgtttggattatcagctgaagcgatcgatcctttgatgcgtcgtgcagcgaagaccatcaatttcggtgttctctacggtatgagtgcctttcgtttgtcgcaggaattaggcattccctatgaagaagctcaggcgttcattcagaaatactttcaaagctatcccaaagttaaagcatggatcgagaagactctccgtgaaggccgcacacgtggttacgtagagaccttatttggacgtcgccgctatgttcccgatttaaacgctcgcgtgaaaggcaagcgtgaagccgccgaacgcatggcgttcaacatgcctgtacagggcacggcagctgacctcatgaaacttgcaatggtgcgcctttttccacaattgcgtgaagttggtgcccgcatgctcttgcaggtccacgatgaactcttgttagaagcgccaaaagagcgtgcggaagaggtggcagccctcgcgaaagaagttatggaaggcgtgtggcccttagcggtgcctctttgggtcgaagttggtattggcgaggattggctggctgccaaagga

SEQ ID NO: 4698 - protein, 841 aa, synthetic construct
  REGION 1..841: note = Variant of DNA polymerase I from Thermus sp. strain 2.9
MHHHHHHGGSGVLPVFEPKGRVLLVDGHHLAYRNFFALKGLTTSLGEPVQGVYGFAKSLLKALKEDGDVVIVVFDAKAPSFRHEAYEAYKAGRAPTPEDFPRQLALMKELVDLLGLERLEVPGFEADDVLATLAKKAEREGYEVQILTADRDLFQLLSPRISVLHPEGHRITPEWLWEKYGLRPEQWVDFRALAGDPSDNIPGVKGIGEKTALKLLKEWGSLENLLKNLDQVKPESVREKILAHLEDLKLSRELSRVRTDLPLEVDFGRRREPDWEGLKAFLERLEFGSLLHEFGLLESPLLAEEAPWPPPEGAFLGYRLSRPEPMWAELLALAASAQGRVYRAEDPHGALRGLFEVRGLLAKDLAVVALREGLDLPPTDDPMLLAYLLDPSNTTPEGVARRYGGEWTEDAAKRALLAERLHANLLGRLQGEERLLWLYEEVEKPLSRVLAHMEATGVKLDVAYLENLSLEVAAHMRRLEEEVFRLAGRSFRLNSRDQLERVLFDELGLPPIGKTEKTGKRSTSAAVLEALREVHPIVDKILQYRELAKLKGTYIDRLPALVHPKTGRLHTRFNQTATATGRLSSSDPNLQNIPVRTPLGQKIRRAFVAEEGWRLVALDYRQIELRVLAHLSGDENLIRVFQEGKDIHTQTASWMFGLSAEAIDPLMRRAAKTINFGVLYGMSAFRLSQELGIPYEEAQAFIQKYFQSYPKVKAWIEKTLREGRTRGYVETLFGRRRYVPDLNARVKGKREAAERMAFNMPVQGTAADLMKLAMVRLFPQLREVGARMLLQVHDELLLEAPKERAEEVAALAKEVMEGVWPLAVPLWVEVGIGEDWLAAKG

SEQ ID NO: 4699 - DNA, 2523 bp, synthetic construct
  misc_feature 1..2523: note = Variant of DNA polymerase I from Thermus sp. strain 2.9
  source 1..2523: mol_type = other DNA
atgcaccatcatcatcatcatggcggtagcggcgtgttaccggtgttcgagcctaaaggtcgcgtgcttctggttgatggccatcatctcgcgtatcgtaacttctttgccctgaaaggattaaccaccagcctgggcgagccggtacagggtgtctacggctttgcaaagtcgctcctgaaagctctgaaagaagacggtgatgtggtgattgttgtctttgatgcgaaagcgccaagttttcgccacgaagcgtacgaagcttacaaagccgggcgtgctccaacgccggaagactttcctcgccaattggcgcttatgaaggaattagtggatttgcttggcctcgaacgcttggaagttcccggtttcgaggcagacgacgtattagcgactctcgcaaagaaagccgaacgtgagggctatgaagtccagatcttgacagcagatcgcgatcttttccagcttttatctccgcgcatctcggtgttacacccggaagggcatcgtatcaccccggaatggctctgggagaaatatggtttgcgtcccgaacaatgggtggattttcgcgccttagcaggcgatccgagcgacaatattccgggagttaaaggtatcggcgagaagacggcgctcaagctccttaaagaatgggggtcgttggagaacttgcttaagaatttagatcaggtcaaaccagagtcagtgcgtgagaagattcttgctcacctcgaagacctcaaattaagccgcgaattgtcccgtgtacgcaccgatttgccgctcgaagttgatttcggtcgccgccgcgaacctgactgggagggtcttaaagcgtttttagagcgtcttgaatttggttcgctcttgcatgaattcggccttttagaaagcccgttactggccgaagaagcaccttggccaccgcccgagggcgcgtttttaggttaccgtttgagtcgcccggaaccgatgtgggccgaattactggctcttgcagcgtctgcccagggacgtgtgtatcgcgcggaagaccctcatggtgcgctccgcggcctcttcgaagtccgtggactccttgccaaagacttagctgtttgggcattgcgcgaaggtcttgatttacctccgactgatgatccaatgcttcttgcgtacctcttggacccgtcaaacacgacgcccgaaggcgtagcccgtcgttacggcggcgagtggaccgaagatgcagcgaaacgcgcgttattggccgaacgtttgcacgccaatttattaggacgtttgcaaggcgaggaacgtctcctctggctttacgaagaagtggagaaaccattgagtcgcgtgctcgcgcatatggaagctaccggtgtcaaattagacgtggcgtatttggagaatctcagccttgaagttgctgcccacatgcgccgcttggaggaagaagtattccgtttagcaggccgttcctttcgccttaactctcgcgatcagttagaacgtgtgttgttcgatgaacttggtctccctcctatcggcaagacagagaagaccggtaaacgtagcacttcagcggcggttttagaagctcttcgcgaagtccatcccattgtggacaagatcttgcagtaccgcgaactcgcgaaattgaaaggcacctatattgaccgtcttccggcattagtccacccgaaaacgggacgcctccatacccgcttcaaccaaacagccacggcgaccggtcgtttgtcctcctctgatccaaaccttcagaatattccagtacgtaccccattgggccagaagatccgccgtgcgtttgtagctgaggagggttggcgtttagtggccctcgattatcgtcaaattgaattacgtgtccttgcccatctttctggcgatgagaacctcatccgcgtgtttcaggaaggcaaagacattcacactcaaacggcaagctggatgtttggattatcagctgaagcgatcgatcctttgatgcgtcgtgcagcgaagaccatcaatttcggtgttctctacggtatgagtgcctttcgtttgtcgcaggaattaggcattccctatgaagaagctcaggcgttcattcagaaatactttcaaagctatcccaaagttaaagcatggatcgagaagactctccgtgaaggccgcacacgtggttacgtagagaccttatttggacgtcgccgctatgttcccgatttaaacgctcgcgtgaaaggcaagcgtgaagccgccgaacgcatggcgttcaacatgcctgtacagggcacggcagctgacctcatgaaacttgcaatggtgcgcctttttccacaattgcgtgaagttggtgcccgcatgctcttgcaggtccacgatgaactcttgttagaagcgccaaaagagcgtgcggaagaggtggcagccctcgcgaaagaagttatggaaggcgtgtggcccttagcggtgcctcttgaagtcgaagttggtattggcgaggattggctggctgccaaagga

SEQ ID NO: 4700 - protein, 841 aa, synthetic construct
  REGION 1..841: note = Variant of DNA polymerase I from Thermus sp. strain 2.9
MHHHHHHGGSGVLPVFEPKGRVLLVDGHHLAYRNFFALKGLTTSLGEPVQGVYGFAKSLLKALKEDGDVVIVVFDAKAPSFRHEAYEAYKAGRAPTPEDFPRQLALMKELVDLLGLERLEVPGFEADDVLATLAKKAEREGYEVQILTADRDLFQLLSPRISVLHPEGHRITPEWLWEKYGLRPEQWVDFRALAGDPSDNIPGVKGIGEKTALKLLKEWGSLENLLKNLDQVKPESVREKILAHLEDLKLSRELSRVRTDLPLEVDFGRRREPDWEGLKAFLERLEFGSLLHEFGLLESPLLAEEAPWPPPEGAFLGYRLSRPEPMWAELLALAASAQGRVYRAEDPHGALRGLFEVRGLLAKDLAVWALREGLDLPPTDDPMLLAYLLDPSNTTPEGVARRYGGEWTEDAAKRALLAERLHANLLGRLQGEERLLWLYEEVEKPLSRVLAHMEATGVKLDVAYLENLSLEVAAHMRRLEEEVFRLAGRSFRLNSRDQLERVLFDELGLPPIGKTEKTGKRSTSAAVLEALREVHPIVDKILQYRELAKLKGTYIDRLPALVHPKTGRLHTRFNQTATATGRLSSSDPNLQNIPVRTPLGQKIRRAFVAEEGWRLVALDYRQIELRVLAHLSGDENLIRVFQEGKDIHTQTASWMFGLSAEAIDPLMRRAAKTINFGVLYGMSAFRLSQELGIPYEEAQAFIQKYFQSYPKVKAWIEKTLREGRTRGYVETLFGRRRYVPDLNARVKGKREAAERMAFNMPVQGTAADLMKLAMVRLFPQLREVGARMLLQVHDELLLEAPKERAEEVAALAKEVMEGVWPLAVPLEVEVGIGEDWLAAKG

SEQ ID NO: 4701 - DNA, 2523 bp, synthetic construct
  misc_feature 1..2523: note = Variant of DNA polymerase I from Thermus sp. strain 2.9
  source 1..2523: mol_type = other DNA
atgcaccatcatcatcatcatggcggtagcggcgtgttaccggtgttcgagcctaaaggtcgcgtgcttctggttgatggccatcatctcgcgtatcgtaacttctttgccctgaaaggattaaccaccagcctgggcgagccggtacagggtgtctacggctttgcaaagtcgctcctgaaagctctgaaagaagacggtgatgtggtgattgttgtctttgatgcgaaagcgccaagttttcgccacgaagcgtacgaagcttacaaagccgggcgtgctccaacgccggaagactttcctcgccaattggcgcttatgaaggaattagtggatttgcttggcctcgaacgcttggaagttcccggtttcgaggcagacgacgtattagcgactctcgcaaagaaagccgaacgtgagggctatgaagtccagatcttgacagcagatcgcgatcttttccagcttttatctccgcgcatctcggtgttacacccggaagggcatcgtatcaccccggaatggctctgggagaaatatggtttgcgtcccgaacaatgggtggattttcgcgccttagcaggcgatccgagcgacaatattccgggagttaaaggtatcggcgagaagacggcgctcaagctccttaaagaatgggggtcgttggagaacttgcttaagaatttagatcaggtcaaaccagagtcagtgcgtgagaagattcttgctcacctcgaagacctcaaattaagccgcgaattgtcccgtgtacgcaccgatttgccgctcgaagttgatttcggtcgccgccgcgaacctgactgggagggtcttaaagcgtttttagagcgtcttgaatttggttcgctcttgcatgaattcggccttttagaaagcccgttactggccgaagaagcaccttggccaccgcccgagggcgcgtttttaggttaccgtttgagtcgcccggaaccgatgtgggccgaattactggctcttgcagcgtctgcccagggacgtgtgtatcgcgcggaagaccctcatggtgcgctccgcggcctcttcgaagtccgtggactccttgccaaagacttagctgttgttgcattgcgcgaaggtcttgatttacctccgactgatgatccaatgcttcttgcgtacctcttggacccgtcaaacacgacgcccgaaggcgtagcccgtcgttacggcggcgagtggaccgaagatgcagcgaaacgcgcgttattggccgaacgtttgcacgccaatttattaggacgtttgcaaggcgaggaacgtctcctctggctttacgaagaagtggagaaaccattgagtcgcgtgctcgcgcatatggaagctaccggtgtcaaattagacgtggcgtatttggagaatctcagccttgaagttgctgcccacatgcgccgcttggaggaagaagtattccgtttagcaggccgttcctttcgccttaactctcgcgatcagttagaacgtgtgttgttcgatgaacttggtctccctcctatcggcaagacagagaagaccggtaaacgtagcacttcagcggcggttttagaagctcttcgcgaagtccatcccattgtggacaagatcttgcagtaccgcgaactcgcgaaattgaaaggcacctatattgaccgtcttccggcattagtccacccgaaaacgggacgcctccatacccgcttcaaccaaacagccacggcgaccggtcgtttgtcctcctctgatccaaaccttcagaatattccagtacgtaccccattgggccagaagatccgccgtgcgtttgtagctgaggagggttggcgtttagtggccctcgattatcgtcaaattgaattacgtgtccttgcccatctttctggcgatgagaacctcatccgcgtgtttcaggaaggcaaagacattcacactcaaacggcaagctggatgtttggattatcaggtgaagcgatcgatcctttgatgcgtcgtgcagcgaagaccatcaatttcggtgttctctacggtatgagtgcctttcgtttgtcgcaggaattaggcattccctatgaagaagctcaggcgttcattcagaaatactttcaaagctatcccaaagttaaagcatggatcgagaagactctccgtgaaggccgcacacgtggttacgtagagaccttatttggacgtcgccgctatgttcccgatttaaacgctcgcgtgaaaggcaagcgtgaagccgccgaacgcatggcgttcaacatgcctgtacagggcacggcagctgacctcatgaaacttgcaatggtgcgcctttttccacaattgcgtgaagttggtgcccgcatgctcttgcaggtccacgatgaactcttgttagaagcgccaaaagagcgtgcggaagaggtggcagccctcgcgaaagaagttatggaaggcgtgtggcccttagcggtgcctcttgaagtcgaagttggtattggcgaggattggctggctgccaaagga

SEQ ID NO: 4702 - protein, 841 aa, synthetic construct
  REGION 1..841: note = Variant of DNA polymerase I from Thermus sp. strain 2.9
MHHHHHHGGSGVLPVFEPKGRVLLVDGHHLAYRNFFALKGLTTSLGEPVQGVYGFAKSLLKALKEDGDVVIVVFDAKAPSFRHEAYEAYKAGRAPTPEDFPRQLALMKELVDLLGLERLEVPGFEADDVLATLAKKAEREGYEVQILTADRDLFQLLSPRISVLHPEGHRITPEWLWEKYGLRPEQWVDFRALAGDPSDNIPGVKGIGEKTALKLLKEWGSLENLLKNLDQVKPESVREKILAHLEDLKLSRELSRVRTDLPLEVDFGRRREPDWEGLKAFLERLEFGSLLHEFGLLESPLLAEEAPWPPPEGAFLGYRLSRPEPMWAELLALAASAQGRVYRAEDPHGALRGLFEVRGLLAKDLAVVALREGLDLPPTDDPMLLAYLLDPSNTTPEGVARRYGGEWTEDAAKRALLAERLHANLLGRLQGEERLLWLYEEVEKPLSRVLAHMEATGVKLDVAYLENLSLEVAAHMRRLEEEVFRLAGRSFRLNSRDQLERVLFDELGLPPIGKTEKTGKRSTSAAVLEALREVHPIVDKILQYRELAKLKGTYIDRLPALVHPKTGRLHTRFNQTATATGRLSSSDPNLQNIPVRTPLGQKIRRAFVAEEGWRLVALDYRQIELRVLAHLSGDENLIRVFQEGKDIHTQTASWMFGLSGEAIDPLMRRAAKTINFGVLYGMSAFRLSQELGIPYEEAQAFIQKYFQSYPKVKAWIEKTLREGRTRGYVETLFGRRRYVPDLNARVKGKREAAERMAFNMPVQGTAADLMKLAMVRLFPQLREVGARMLLQVHDELLLEAPKERAEEVAALAKEVMEGVWPLAVPLEVEVGIGEDWLAAKG

SEQ ID NO: 4703 - DNA, 2523 bp, synthetic construct
  misc_feature 1..2523: note = Variant of DNA polymerase I from Thermus sp. strain 2.9
  source 1..2523: mol_type = other DNA
atgcaccatcatcatcatcatggcggtagcggcgtgttaccggtgttcgagcctaaaggtcgcgtgcttctggttgatggccatcatctcgcgtatcgtaacttctttgccctgaaaggattaaccaccagcctgggcgagccggtacagggtgtctacggctttgcaaagtcgctcctgaaagctctgaaagaagacggtgatgtggtgattgttgtctttgatgcgaaagcgccaagttttcgccacgaagcgtacgaagcttacaaagccgggcgtgctccaacgccggaagactttcctcgccaattggcgcttatgaaggaattagtggatttgcttggcctcgaacgcttggaagttcccggtttcgaggcagacgacgtattagcgactctcgcaaagaaagccgaacgtgagggctatgaagtccagatcttgacagcagatcgcgatcttttccagcttttatctccgcgcatctcggtgttacacccggaagggcatcgtatcaccccggaatggctctgggagaaatatggtttgcgtcccgaacaatgggtggattttcgcgccttagcaggcgatccgagcgacaatattccgggagttaaaggtatcggcgagaagacggcgctcaagctccttaaagaatgggggtcgttggagaacttgcttaagaatttagatcaggtcaaaccagagtcagtgcgtgagaagattcttgctcacctcgaagacctcaaattaagccgcgaattgtcccgtgtacgcaccgatttgccgctcgaagttgatttcggtcgccgccgcgaacctgactgggagggtcttaaagcgtttttagagcgtcttgaatttggttcgctcttgcatgaattcggccttttagaaagcccgttactggccgaagaagcaccttggccaccgcccgagggcgcgtttttaggttaccgtttgagtcgcccggaaccgatgtgggccgaattactggctcttgcagcgtctgcccagggacgtgtgtatcgcgcggaagacaggcatggtgcgctccgcggcctcttcgaagtccgtggactccttgccaaagacttagctgttgttgcattgcgcgaaggtcttgatttacctccgactgatgatccaatgcttcttgcgtacctcttggacccgtcaaacacgacgcccgaaggcgtagcccgtcgttacggcggcgagtggaccgaagatgcagcgaaacgcgcgttattggccgaacgtttgcacgccaatttattaggacgtttgcaaggcgaggaacgtctcctctggctttacgaagaagtggagaaaccattgagtcgcgtgctcgcgcatatggaagctaccggtgtcaaattagacgtggcgtatttggagaatctcagccttgaagttgctgcccacatgcgccgcttggaggaagaagtattccgtttagcaggccgttcctttcgccttaactctcgcgatcagttagaacgtgtgttgttcgatgaacttggtctccctcctatcggcaagacagagaagaccggtaaacgtagcacttcagcggcggttttagaagctcttcgcgaagtccatcccattgtggacaagatcttgcagtaccgcgaactcgcgaaattgaaaggcacctatattgaccgtcttccggcattagtccacccgaaaacgggacgcctccatacccgcttcaaccaaacagccacggcgaccggtcgtttgtcctcctctgatccaaaccttcagaatattccagtacgtaccccattgggccagaagatccgccgtgcgtttgtagctgaggagggttggcgtttagtggccctcgattatcgtcaaattgaattacgtgtccttgcccatctttctggcgatgagaacctcatccgcgtgtttcaggaaggcaaagacattcacactcaaacggcaagctggatgtttggattatcagctgaagcgatcgatcctttgatgcgtcgtgcagcgaagaccatcaatttcggtgttctctacggtatgagtgcctttcgtttgtcgcaggaattaggcattccctatgaagaagctcaggcgttcattcagaaatactttcaaagctatcccaaagttaaagcatggatcgagaagactctccgtgaaggccgcacacgtggttacgtagagaccttatttggacgtcgccgctatgttcccgatttaaacgctcgcgtgaaaggcaagcgtgaagccgccgaacgcatggcgttcaacatgcctgtacagggcacggcagctgacctcatgaaacttgcaatggtgcgcctttttccacaattgcgtgaagttggtgcccgcatgctcttgcaggtccacgatgaactcttgttagaagcgccaaaagagcgtgcggaagaggtggcagccctcgcgaaagaagttatggaaggcgtgtggcccttagcggtgcctcttgaagtcgaagttggtattggcgaggattggctggctgccaaagga

SEQ ID NO: 4704 - protein, 841 aa, synthetic construct
  REGION 1..841: note = Variant of DNA polymerase I from Thermus sp. strain 2.9
MHHHHHHGGSGVLPVFEPKGRVLLVDGHHLAYRNFFALKGLTTSLGEPVQGVYGFAKSLLKALKEDGDVVIVVFDAKAPSFRHEAYEAYKAGRAPTPEDFPRQLALMKELVDLLGLERLEVPGFEADDVLATLAKKAEREGYEVQILTADRDLFQLLSPRISVLHPEGHRITPEWLWEKYGLRPEQWVDFRALAGDPSDNIPGVKGIGEKTALKLLKEWGSLENLLKNLDQVKPESVREKILAHLEDLKLSRELSRVRTDLPLEVDFGRRREPDWEGLKAFLERLEFGSLLHEFGLLESPLLAEEAPWPPPEGAFLGYRLSRPEPMWAELLALAASAQGRVYRAEDRHGALRGLFEVRGLLAKDLAVVALREGLDLPPTDDPMLLAYLLDPSNTTPEGVARRYGGEWTEDAAKRALLAERLHANLLGRLQGEERLLWLYEEVEKPLSRVLAHMEATGVKLDVAYLENLSLEVAAHMRRLEEEVFRLAGRSFRLNSRDQLERVLFDELGLPPIGKTEKTGKRSTSAAVLEALREVHPIVDKILQYRELAKLKGTYIDRLPALVHPKTGRLHTRFNQTATATGRLSSSDPNLQNIPVRTPLGQKIRRAFVAEEGWRLVALDYRQIELRVLAHLSGDENLIRVFQEGKDIHTQTASWMFGLSAEAIDPLMRRAAKTINFGVLYGMSAFRLSQELGIPYEEAQAFIQKYFQSYPKVKAWIEKTLREGRTRGYVETLFGRRRYVPDLNARVKGKREAAERMAFNMPVQGTAADLMKLAMVRLFPQLREVGARMLLQVHDELLLEAPKERAEEVAALAKEVMEGVWPLAVPLEVEVGIGEDWLAAKG

SEQ ID NO: 4705 - DNA, 2523 bp, synthetic construct
  misc_feature 1..2523: note = Variant of DNA polymerase I from Thermus sp. strain 2.9
  source 1..2523: mol_type = other DNA
atgcaccatcatcatcatcatggcggtagcggcgtgttaccggtgttcgagcctaaaggtcgcgtgcttctggttgatggccatcatctcgcgtatcgtaacttctttgccctgaaaggattaaccaccagcctgggcgagccggtacagggtgtctacggctttgcaaagtcgctcctgaaagctctgaaagaagacggtgatgtggtgattgttgtctttgatgcgaaagcgccaagttttcgccacgaagcgtacgaagcttacaaagccgggcgtgctccaacgccggaagactttcctcgccaattggcgcttatgaaggaattagtggatttgcttggcctcgaacgcttggaagttcccggtttcgaggcagacgacgtattagcgactctcgcaaagaaagccgaacgtgagggctatgaagtccagatcttgacagcagatcgcgatcttttccagcttttatctccgcgcatctcggtgttacacccggaagggcatcgtatcaccccggaatggctctgggagaaatatggtttgcgtcccgaacaatgggtggattttcgcgccttagcaggcgatccgagcgacaatattccgggagttaaaggtatcggcgagaagacggcgctcaagctccttaaagaatgggggtcgttggagaacttgcttaagaatttagatcaggtcaaaccagagtcagtgcgtgagaagattcttgctcacctcgaagacctcaaattaagccgcgaattgtcccgtgtacgcaccgatttgccgctcgaagttgatttcggtcgccgccgcgaacctgactgggagggtcttaaagcgtttttagagcgtcttgaatttggttcgctcttgcatgaattcggccttttagaaagcccgttactggccgaagaagcaccttggccaccgcccgagggcgcgtttttaggttaccgtttgagtcgcccggaaccgatgtgggccgaattactggctcttgcagcgtctgcccagggacgtgtgtatcgcgcggaagaccctcatggtgcgctccgcggcctcttcgaagtccgtggactccttgccaaagacttagctgttgttgcattgcgcgaaggtcttgatttacctccgactgatgatccaatgcttcttgcgtacctcttggacccgtcaaacacgacgcccgaaggcgtagcccgtcgttacggcggcgagtggaccgaagatgcagcgaaacgcgcgttattggccgaacgtttgcacgccaatttattaggacgtttgcaaggcgaggaacgtctcttctggctttacgaagaagtggagaaaccattgagtcgcgtgctcgcgcatatggaagctaccggtgtcaaattagacgtggcgtatttggagaatctcagccttgaagttgctgcccacatgcgccgcttggaggaagaagtattccgtttagcaggccgttcctttcgccttaactctcgcgatcagttagaacgtgtgttgttcgatgaacttggtctccctcctatcggcaagacagagaagaccggtaaacgtagcacttcagcggcggttttagaagctcttcgcgaagtccatcccattgtggacaagatcttgcagtaccgcgaactcgcgaaattgaaaggcacctatattgaccgtcttccggcattagtccacccgaaaacgggacgcctccatacccgcttcaaccaaacagccacggcgaccggtcgtttgtcctcctctgatccaaaccttcagaatattccagtacgtaccccattgggccagaagatccgccgtgcgtttgtagctgaggagggttggcgtttagtggccctcgattatcgtcaaattgaattacgtgtccttgcccatctttctggcgatgagaacctcatccgcgtgtttcaggaaggcaaagacattcacactcaaacggcaagctggatgtttggattatcagctgaagcgatcgatcctttgatgcgtcgtgcagcgaagaccatcaatttcggtgttctctacggtatgagtgcctttcgtttgtcgcaggaattaggcattccctatgaagaagctcaggcgttcattcagaaatactttcaaagctatcccaaagttaaagcatggatcgagaagactctccgtgaaggccgcacacgtggttacgtagagaccttatttggacgtcgccgctatgttcccgatttaaaggctcgcgtgaaaggcaagcgtgaagccgccgaacgcatggcgttcaacatgcctgtacagggcacggcagctgacctcatgaaacttgcaatggtgcgcctttttccacaattgcgtgaagttggtgcccgcatgctcttgcaggtccacgatgaactcttgttagaagcgccaaaagagcgtgcggaagaggtggcagccctcgcgaaagaagttatggaaggcgtgtggcccttagcggtgcctcttgaagtcgaagttggtattggcgaggattggctggctgccaaagga

SEQ ID NO: 4706 - protein, 841 aa, synthetic construct
  REGION 1..841: note = Variant of DNA polymerase I from Thermus sp. strain 2.9
MHHHHHHGGSGVLPVFEPKGRVLLVDGHHLAYRNFFALKGLTTSLGEPVQGVYGFAKSLLKALKEDGDVVIVVFDAKAPSFRHEAYEAYKAGRAPTPEDFPRQLALMKELVDLLGLERLEVPGFEADDVLATLAKKAEREGYEVQILTADRDLFQLLSPRISVLHPEGHRITPEWLWEKYGLRPEQWVDFRALAGDPSDNIPGVKGIGEKTALKLLKEWGSLENLLKNLDQVKPESVREKILAHLEDLKLSRELSRVRTDLPLEVDFGRRREPDWEGLKAFLERLEFGSLLHEFGLLESPLLAEEAPWPPPEGAFLGYRLSRPEPMWAELLALAASAQGRVYRAEDPHGALRGLFEVRGLLAKDLAVVALREGLDLPPTDDPMLLAYLLDPSNTTPEGVARRYGGEWTEDAAKRALLAERLHANLLGRLQGEERLFWLYEEVEKPLSRVLAHMEATGVKLDVAYLENLSLEVAAHMRRLEEEVFRLAGRSFRLNSRDQLERVLFDELGLPPIGKTEKTGKRSTSAAVLEALREVHPIVDKILQYRELAKLKGTYIDRLPALVHPKTGRLHTRFNQTATATGRLSSSDPNLQNIPVRTPLGQKIRRAFVAEEGWRLVALDYRQIELRVLAHLSGDENLIRVFQEGKDIHTQTASWMFGLSAEAIDPLMRRAAKTINFGVLYGMSAFRLSQELGIPYEEAQAFIQKYFQSYPKVKAWIEKTLREGRTRGYVETLFGRRRYVPDLKARVKGKREAAERMAFNMPVQGTAADLMKLAMVRLFPQLREVGARMLLQVHDELLLEAPKERAEEVAALAKEVMEGVWPLAVPLEVEVGIGEDWLAAKG

SEQ ID NO: 4707 - DNA, 2523 bp, synthetic construct
  misc_feature 1..2523: note = Variant of DNA polymerase I from Thermus sp. strain 2.9
  source 1..2523: mol_type = other DNA
atgcaccatcatcatcatcatggcggtagcggcgtgttaccggtgttcgagcctaaaggtcgcgtgcttctggttgatggccatcatctcgcgtatcgtaacttctttgccctgaaaggattaaccaccagcctgggcgagccggtacagggtgtctacggctttgcaaagtcgctcctgaaagctctgaaagaagacggtgatgtggtgattgttgtctttgatgcgaaagcgccaagttttcgccacgaagcgtacgaagcttacaaagccgggcgtgctccaacgccggaagactttcctcgccaattggcgcttatgaaggaattagtggatttgcttggcctcgaacgcttggaagttcccggtttcgaggcagacgacgtattagcgactctcgcaaagaaagccgaacgtgagggctatgaagtccagatcttgacagcagatcgcgatcttttccagcttttatctccgcgcatctcggtgttacacccggaagggcatcgtatcaccccggaatggctctgggagaaatatggtttgcgtcccgaacaatgggtggattttcgcgccttagcaggcgatccgagcgacaatattccgggagttaaaggtatcggcgagaagacggcgctcaagctccttaaagaatgggggtcgttggagaacttgcttaagaatttagatcaggtcaaaccagagtcagtgcgtgagaagattcttgctcacctcgaagacctcaaattaagccgcgaattgtcccgtgtacgcaccgatttgccgctcgaagttgatttcggtcgccgccgcgaacctgactgggagggtcttaaagcgtttttagagcgtcttgaatttggttcgctcttgcatgaattcggccttttagaaagcccgttactggccgaagaagcaccttggccaccgcccgagggcgcgtttttaggttaccgtttgagtcgcccggaaccgatgtgggccgaattactggctcttgcagcgtctgcccagggacgtgtgtatcgcgcggaagaccctcatggtgcgctccgcggcctcttcgaagtccgtggactccttgccaaagacttagctgttgttgcattgcgcgaaggtcttgatttacctccgactgatgatccaatgcttcttgcgtacctcttggacccgtcaaacacgacgcccgaaggcgtagcccgtcgttacggcggcgagtggaccgaagatgcagcgaaacgcgcgttattggccgaacgtttgcacgccaatttattaggacgtttgcaaggcgaggaacgtctcctctggctttacgaagaagtggagaaaccattgagtcgcgtgctcgcgcatatggaagctaccggtgtcaaattagacgtggcgtatttggagaatctcagccttgaagttgctgcccacatgcgccgcttggaggaagaagtattccgtttagcaggccgttcctttcgccttaactctcgcgatcagttagaacgtgtgttgttcgatgaacttggtctccctcctatcggcaagacagagaagaccggtaaacgtagcacttcagcggcggttttagaagctcttcgcgaagtccatcccattgtggacaagatcttgcagtaccgcgaactcgcgaaattgaaaggcacctatattgaccgtcttccggcattagtccacccgaaaacgggacgcctccatacccgcttcaaccaaacagccacggcgaccggtcgtttgtcctcctctgatccaaaccttcagaatattccagtacgtaccccattgggccagaagatccgccgtgcgtttgtagctgaggagggttggcgtttagtggccctcgattatcgtcaaattgaattacgtgtccttgcccatctttctggcgatgagaacctcatccgcgtgtttcaggaaggcaaagacattcacactcaaacggcaagctggatgtttggattatcagctgaagcgatcgatcctttgatgcgtcgtgcagcgaagaccatcaatttcggtgttctctacggtatgagtgcctttcgtttgtcgcaggaattaggcattccctatgaagaagctcaggcgttcattcagaaatactttcaaagctatcccaaagttaaagcatggatcgagaagactctccgtgaaggccgcacacgtggttacgtagagaccttatttggacgtcgccgctatgttcccgatttaaacgctcgcgtgaaaggcaagcgtgaagccgccgaacgcatggcgttcaacatgcctgtacagggcacggcagctgacgttatgaaacttgcaatggtgcgcctttttccacaattgcgtgaagttggtgcccgcatgctcttgcaggtccacgatgaactcttgttagaagcgccaaaagagcgtgcggaagaggtggcagccctcgcgaaagaagttatggaaggcgtgtggcccttagcggtgcctcttgaagtcgaagttggtattggcgaggattggctggctgccaaagga

SEQ ID NO: 4708 - protein, 841 aa, synthetic construct
  REGION 1..841: note = Variant of DNA polymerase I from Thermus sp. strain 2.9
MHHHHHHGGSGVLPVFEPKGRVLLVDGHHLAYRNFFALKGLTTSLGEPVQGVYGFAKSLLKALKEDGDVVIVVFDAKAPSFRHEAYEAYKAGRAPTPEDFPRQLALMKELVDLLGLERLEVPGFEADDVLATLAKKAEREGYEVQILTADRDLFQLLSPRISVLHPEGHRITPEWLWEKYGLRPEQWVDFRALAGDPSDNIPGVKGIGEKTALKLLKEWGSLENLLKNLDQVKPESVREKILAHLEDLKLSRELSRVRTDLPLEVDFGRRREPDWEGLKAFLERLEFGSLLHEFGLLESPLLAEEAPWPPPEGAFLGYRLSRPEPMWAELLALAASAQGRVYRAEDPHGALRGLFEVRGLLAKDLAVVALREGLDLPPTDDPMLLAYLLDPSNTTPEGVARRYGGEWTEDAAKRALLAERLHANLLGRLQGEERLLWLYEEVEKPLSRVLAHMEATGVKLDVAYLENLSLEVAAHMRRLEEEVFRLAGRSFRLNSRDQLERVLFDELGLPPIGKTEKTGKRSTSAAVLEALREVHPIVDKILQYRELAKLKGTYIDRLPALVHPKTGRLHTRFNQTATATGRLSSSDPNLQNIPVRTPLGQKIRRAFVAEEGWRLVALDYRQIELRVLAHLSGDENLIRVFQEGKDIHTQTASWMFGLSAEAIDPLMRRAAKTINFGVLYGMSAFRLSQELGIPYEEAQAFIQKYFQSYPKVKAWIEKTLREGRTRGYVETLFGRRRYVPDLNARVKGKREAAERMAFNMPVQGTAADVMKLAMVRLFPQLREVGARMLLQVHDELLLEAPKERAEEVAALAKEVMEGVWPLAVPLEVEVGIGEDWLAAKG

SEQ ID NO: 4709 - DNA, 2523 bp, synthetic construct
  misc_feature 1..2523: note = Variant of DNA polymerase I from Thermus sp. strain 2.9
  source 1..2523: mol_type = other DNA
atgcaccatcatcatcatcatggcggtagcggcgtgttaccggtgttcgagcctaaaggtcgcgtgcttctggttgatggccatcatctcgcgtatcgtaacttctttgccctgaaaggattaaccaccagcctgggcgagccggtacagggtgtctacggctttgcaaagtcgctcctgaaagctctgaaagaagacggtgatgtggtgattgttgtctttgatgcgaaagcgccaagttttcgccacgaagcgtacgaagcttacaaagccgggcgtgctccaacgccggaagactttcctcgccaattggcgcttatgaaggaattagtggatttgcttggcctcgaacgcttggaagttcccggtttcgaggcagacgacgtattagcgactctcgcaaagaaagccgaacgtgagggctatgaagtccagatcttgacagcagatcgcgatcttttccagcttttatctccgcgcatctcggtgttacacccggaagggcatcgtatcaccccggaatggctctgggagaaatatggtttgcgtcccgaacaatgggtggattttcgcgccttagcaggcgatccgagcgacaatattccgggagttaaaggtatcggcgagaagacggcgctcaagctccttaaagaatgggggtcgttggagaacttgcttaagaatttagatcaggtcaaaccagagtcagtgcgtgagaagattcttgctcacctcgaagacctcaaattaagccgcgaattgtcccgtgtacgcaccgatttgccgctcgaagttgatttcggtcgccgccgcgaacctgactgggagggtcttaaagcgtttttagagcgtcttgaatttggttcgctcttgcatgaattcggccttttagaaagcccgttactggccgaagaagcaccttggccaccgcccgagggcgcgtttttaggttaccgtttgagtcgcccggaaccgatgtgggccgaattactggctcttgcagcgtctgcccagggacgtgtgtatcgcgcggaagaccctcatggtgcgctccgcggcctcttcgaagtccgtggactccttgccaaagacttagctgttgttgcattgcgcgaaggtcttgatttacctccgactgatgatccaatgcttcttgcgtacctcttggacccgtcaaacacgacgcccgaaggcgtagcccgtcgttacggcggcgagtggaccgaagatgcagcgaaacgcgcgttattggccgaacgtttgcacgccaatttattaggacgtttgcaaggcgaggaacgtctcctctggctttacgaagaagtggagaaaccattgagtcgcgtgctcgcgcatatggaagctaccggtgtcaaattagacgtggcgtatttggagaatctcagccttgaagttgctgcccacatgcgccgcttggaggaagaagtattccgtttagcaggccgttcctttcgccttaactctcgcgatcagttagaacgtgtgttgttcgatgaacttggtctccctcctatcggcaagacagagaagaccggtaaacgtagcacttcagcggcggttttagaagctcttcgcgaagtccatcccattgtggacaagatcttgcagtaccgcgaactcgcgaaattgaaaggcacctatattgaccgtcttccggcattagtccacccgaaaacgggacgcctccatacccgcttcaaccaaacagccacggcgaccggtcgtttgtcctcctctgatccaaaccttcagaatattccagtacgtaccccattgggccagaagatccgccgtgcgtttgtagctgaggagggttggcgtttagtggccctcgattatcgtcaaattgaattacgtgtccttgcccatctttctggcgatgagaacctcatccgcgtgtttcaggaaggcaaagacattcacactcaaacggcaagctggatgtttggattatcagctgaagcgatcgatcctttgatgcgtcgtgcagcgaagaccatcaatttcggtgttctctacggtatgagtgcctttcgtttgtcgcagtggttaggcattccctatgaagaagctcaggcgttcattcagaaatactttcaaagctatcccaaagttaaagcatggatcgagaagactctccgtgaaggccgcacacgtggttacgtagagaccttatttggacgtcgccgctatgttcccgatttaaacgctcgcgtgaaaggcaagcgtgaagccgccgaacgcatggcgttcaacatgcctgtacagggcacggcagctgacctcatgaaacttgcaatggtgcgcctttttccacaattgcgtgaagttggtgcccgcatgctcttgcaggtccacgatgaactcttgttagaagcgccaaaagagcgtgcggaagaggtggcagccctcgcgaaagaagttatggaaggcgtgtggcccttagcggtgcctcttgaagtcgaagttggtattggcgaggattggctggctgccaaagga

SEQ ID NO: 4710 - protein, 841 aa, synthetic construct
  REGION 1..841: note = Variant of DNA polymerase I from Thermus sp. strain 2.9
MHHHHHHGGSGVLPVFEPKGRVLLVDGHHLAYRNFFALKGLTTSLGEPVQGVYGFAKSLLKALKEDGDVVIVVFDAKAPSFRHEAYEAYKAGRAPTPEDFPRQLALMKELVDLLGLERLEVPGFEADDVLATLAKKAEREGYEVQILTADRDLFQLLSPRISVLHPEGHRITPEWLWEKYGLRPEQWVDFRALAGDPSDNIPGVKGIGEKTALKLLKEWGSLENLLKNLDQVKPESVREKILAHLEDLKLSRELSRVRTDLPLEVDFGRRREPDWEGLKAFLERLEFGSLLHEFGLLESPLLAEEAPWPPPEGAFLGYRLSRPEPMWAELLALAASAQGRVYRAEDPHGALRGLFEVRGLLAKDLAVVALREGLDLPPTDDPMLLAYLLDPSNTTPEGVARRYGGEWTEDAAKRALLAERLHANLLGRLQGEERLLWLYEEVEKPLSRVLAHMEATGVKLDVAYLENLSLEVAAHMRRLEEEVFRLAGRSFRLNSRDQLERVLFDELGLPPIGKTEKTGKRSTSAAVLEALREVHPIVDKILQYRELAKLKGTYIDRLPALVHPKTGRLHTRFNQTATATGRLSSSDPNLQNIPVRTPLGQKIRRAFVAEEGWRLVALDYRQIELRVLAHLSGDENLIRVFQEGKDIHTQTASWMFGLSAEAIDPLMRRAAKTINFGVLYGMSAFRLSQWLGIPYEEAQAFIQKYFQSYPKVKAWIEKTLREGRTRGYVETLFGRRRYVPDLNARVKGKREAAERMAFNMPVQGTAADLMKLAMVRLFPQLREVGARMLLQVHDELLLEAPKERAEEVAALAKEVMEGVWPLAVPLEVEVGIGEDWLAAKG

SEQ ID NO: 4711 - DNA, 2523 bp, synthetic construct
  misc_feature 1..2523: note = Variant of DNA polymerase I from Thermus sp. strain 2.9
  source 1..2523: mol_type = other DNA
atgcaccatcatcatcatcatggcggtagcggcgtgttaccggtgttcgagcctaaaggtcgcgtgcttctggttgatggccatcatctcgcgtatcgtaacttctttgccctgaaaggattaaccaccagcctgggcgagccggtacagggtgtctacggctttgcaaagtcgctcctgaaagctctgaaagaagacggtgatgtggtgattgttgtctttgatgcgaaagcgccaagttttcgccacgaagcgtacgaagcttacaaagccgggcgtgctccaacgccggaagactttcctcgccaattggctcttatgaaggaattagtggatttgcttggcctcgaacgcttggaagttcccggtttcgaggcagacgacgtattagcgactctcgcaaagaaagccgaacgtgagggctatgaagtccagatcttgacagcagatcgcgatcttttccagcttttatctccgcgcatctcggtgttacacccggaagggcatcgtatcaccccggaatggctctgggagaaatatggtttgcgtcccgaacaatgggtggattttcgcgccttagcaggcgatccgagcgacaatattccgggagttaaaggtatcggcgagaagacggcgctcaagctccttaaagaatgggggtcgttggagaacttgcttaagaatttagatcaggtcaaaccagagtcagtgcgtgagaagattcttgctcacctcgaagacctcaagttaagccgcgaattgtcccgtgtacgcaccgatttgccgctcgaagttgatttcggtcgccgccgcgaacctgactgggagggtcttaaagcgtttttagagcgtcttgaatttggttcgctcttgcatgaattcggccttttagaaagcccgttactggccgaagaagcaccttggccaccgcccgagggcgcgtttttaggttaccgtttgagtcgcccggaaccgatgtgggccgaattactggctcttgcagcgtctgcccagggacgtgtgtatcgcgcggaagaccctcatggtgcgctccgcggcctcttcgaagtccgtggactccttgccaaagacttagctgttgttgcattgcgcgaaggtcttgatttacctccgactgatgatccaatgcttcttgcgtacctcttggacccgtcaaacacgacgcccgaaggcgtagcccgtcgttacggcggcgagtggaccgaagatgcagcgaaacgcgcgttattggccgaacgtttgcacgccaatttattaggacgtttgcaaggcgaggaacgtctcctctggctttacgaagaagtggagaaaccattgagtgtggtgctcggtcatatggaagctaccggtgtcaaattagacgtggcgtatttggagaatctcagccttgaagttgctgcccacatgcgccgcttggaggaagaagtattccgtttagcaggccgttcctttcgccttaactctcgcgatcagttagaacgtgtgttgttcgatgaacttggtctccctcctatcggcaagacagagaagaccggtaaacgtagcacttcagcggcggttttagatgctcttcgcgaagtccatcccattgtggacaagatcttgcagtaccgcgaactcgcgaaattgaaaggcacctatattgaccgtcttccggcattagtccacccgaaaacgggacgcctccatacccgcttcaaccaaacagccacggcgaccggtcgtttgtcctcctctgatccaaaccttcagaatattccagtacgtaccccattgggccagaagatccgccgtgcgtttgtagctgaggagggttggcgtttagtggccctcgattatcgtcaaattgaattacgtgtccttgcccatctttctggcgatgagaacctcatccgcgtgtttcaggaaggcaaagacattcacactcaaacggcaagctggatgtttggattatcagctgaagcgatcgatcctttgatgcgtcgtgcagcgaagaccatcaatttcggtgttctctacggtatgagtgcctttcgtttgtcgcaggaattaggcattccctatgaagaagctcaggcgttcattcagaaatactttcaaagctatcccaaagttaaagcatggatcgagaagactctccgtgaaggccgccaccgtggttacgtagagaccttatttggacgtcgccgctatgttcccgatttaaacgctcgcgtgaaaggcaagcgtgaagccgccgaacgcatggcgttcaacatgcctgtacagggcacggcagctgacctcatgaaacttgcaatggtgcgcctttttccacaattgcgtgaagttggtgcccgcatgctcttgcaggtccacgatgaactcttgttagaagcgccaaaagagcgtgcggaagaggtggcagccctcgcgaaagaagttatggaaggcgtgtggcccttagcggtgcctcttgaagtcgaagttggtattggcgaggattggctggctgccaaagga

SEQ ID NO: 4712 - protein, 841 aa, synthetic construct
  REGION 1..841: note = Variant of DNA polymerase I from Thermus sp. strain 2.9
MHHHHHHGGSGVLPVFEPKGRVLLVDGHHLAYRNFFALKGLTTSLGEPVQGVYGFAKSLLKALKEDGDVVIVVFDAKAPSFRHEAYEAYKAGRAPTPEDFPRQLALMKELVDLLGLERLEVPGFEADDVLATLAKKAEREGYEVQILTADRDLFQLLSPRISVLHPEGHRITPEWLWEKYGLRPEQWVDFRALAGDPSDNIPGVKGIGEKTALKLLKEWGSLENLLKNLDQVKPESVREKILAHLEDLKLSRELSRVRTDLPLEVDFGRRREPDWEGLKAFLERLEFGSLLHEFGLLESPLLAEEAPWPPPEGAFLGYRLSRPEPMWAELLALAASAQGRVYRAEDPHGALRGLFEVRGLLAKDLAVVALREGLDLPPTDDPMLLAYLLDPSNTTPEGVARRYGGEWTEDAAKRALLAERLHANLLGRLQGEERLLWLYEEVEKPLSVVLGHMEATGVKLDVAYLENLSLEVAAHMRRLEEEVFRLAGRSFRLNSRDQLERVLFDELGLPPIGKTEKTGKRSTSAAVLDALREVHPIVDKILQYRELAKLKGTYIDRLPALVHPKTGRLHTRFNQTATATGRLSSSDPNLQNIPVRTPLGQKIRRAFVAEEGWRLVALDYRQIELRVLAHLSGDENLIRVFQEGKDIHTQTASWMFGLSAEAIDPLMRRAAKTINFGVLYGMSAFRLSQELGIPYEEAQAFIQKYFQSYPKVKAWIEKTLREGRHRGYVETLFGRRRYVPDLNARVKGKREAAERMAFNMPVQGTAADLMKLAMVRLFPQLREVGARMLLQVHDELLLEAPKERAEEVAALAKEVMEGVWPLAVPLEVEVGIGEDWLAAKG

SEQ ID NO: 4713 - DNA, 2523 bp, synthetic construct
  misc_feature 1..2523: note = Variant of DNA polymerase I from Thermus sp. strain 2.9
  source 1..2523: mol_type = other DNA
atgcaccatcatcatcatcatggcggtagcggcgtgttaccggtgttcgagcctaaaggtcgcgtgcttctggttgatggccatcatctcgcgtatcgtaacttctttgccctgaaaggattaaccaccagcctgggcgagccggtacagggtgtctacggctttgcaaagtcgctcctgaaagctctgaaagaagacggtgatgtggtgattgttgtctttgatgcgaaagcgccaagttttcgccacgaagcgtacgaagcttacaaagccgggcgtgctccaacgccggaagactttcctcgccaattggcgcttatgaaggaattagtggatttgcttggcctcgaacgcttggaagttcccggtttcgaggcagacgacgtattagcgactctcgcaaagaaagccgaacgtgagggctatgaagtccagatcttgacagcagatcgcgatcttttccagcttttatctccgcgcatctcggtgttacacccggaagggcatcgtatcaccccggaatggctctgggagaaatatggtttgcgtcccgaacaatgggtggattttcgcgccttagcaggcgatccgagcgacaatattccgggagttaaaggtatcggcgagaagacggcgctcaagctccttaaagaatgggggtcgttggagaacttgcttaagaatttagatcaggtcaaaccagagtcagtgcgtgagaagattcttgctcacctcgaagacctcaaattaagccgcgaattgtcccgtgtacgcaccgatttgccgctcgaagttgatttcggtcgccgccgcgaacctgactgggagggtcttaaagcgtttttagagcgtcttgaatttggttcgctcttgcatgaattcggccttttagaaagcccgttactggccgaagaagcaccttggccaccgcccgagggcgcgtttttaggttaccgtttgagtcgcccggaaccgatgtgggccgaattactggctcttgcagcgtctgcccagggacgtgtgtatcgcgcggaagaccctcatggtgcgctccgcggcctcttcgaagtccgtggactccttgccaaagacttagctgttgttgcattgcgcgaaggtcttgatttacctccgactgatgatccaatgcttcttgcgtacctcttggacccgtcaaacacgacgcccgaaggcgtagcccgtcgttacggcggcgagtggaccgaagatgcagcgaaacgcgcgttattggccgaacgtttgcacgccaatttattaggacgtttgcaaggcgaggaacgtctcctctggctttacgaagaagtggagaaaccattgagtcgcgtgctcgcgcatatggaagctaccggtgtcaaattagacgtggcgtatttggagaatctcagccttgaagttgctgcccacatgcgccgcttggaggaagaagtattccgtttagcaggccgttcctttcgccttaactctcgcgatcagttagaacgtgtgttgttcgatgaacttggtctccctcctatcggcaagacagagaagaccggtaaacgtagcacttcagcggcggttttagaagctcttcgcgaagtccatcccattgtggacaagatcttgcagtaccgcgaactcgcgaaattgaaaggcacctatattgaccgtcttccggcattagtccacccgaaaacgggacgcctccatacccgcttcaaccaaacagccacggcgaccggtcgtttgtcctcctctgatccaaaccttcagtcgattccagtacgtaccccattgggccagaagatccgccgtgcgtttgtagctgaggagggttggcgtttagtggccctcgattatcgtcaaattgaattacgtgtccttgcccatctttctggcgatgagaacctcatccgcgtgtttcaggaaggcaaagacattcacactcaaacggcaagctggatgtttggattatcagctgaagcgatcgatcctttgatgcgtcgtgcagcgaagaccatcaatttcggtgttctctacggtatgagtgcctttcgtttgtcgcaggaattaggcattccctatgaagaagctcaggcgttcattcagaaatactttcaaagctatcccaaagttaaagcatggatcgagaagactctccgtgaaggccgcacacgtggttacgtagagaccttatttggacgtcgccgctatgttcccgatttaaacgctcgcgtgaaaggcaagcgtgaagccgccgaacgcatggcgttcaacatgcctgtacagggcacggcagctgacctcatgaaacttgcaatggtgcgcctttttccacaattgcgtgaagttggtgcccgcatgctcttgcaggtccacgatgaactcttgttagaagcgccaaaagagcgtgcggaagaggtggcagccctcgcgaaagaagttatggaaggcgtgtggcccttagcggtgcctcttgaagtcgaagttggtattggcgaggattggctggctgccaaagga

SEQ ID NO: 4714 - protein, 841 aa, synthetic construct
  REGION 1..841: note = Variant of DNA polymerase I from Thermus sp. strain 2.9
MHHHHHHGGSGVLPVFEPKGRVLLVDGHHLAYRNFFALKGLTTSLGEPVQGVYGFAKSLLKALKEDGDVVIVVFDAKAPSFRHEAYEAYKAGRAPTPEDFPRQLALMKELVDLLGLERLEVPGFEADDVLATLAKKAEREGYEVQILTADRDLFQLLSPRISVLHPEGHRITPEWLWEKYGLRPEQWVDFRALAGDPSDNIPGVKGIGEKTALKLLKEWGSLENLLKNLDQVKPESVREKILAHLEDLKLSRELSRVRTDLPLEVDFGRRREPDWEGLKAFLERLEFGSLLHEFGLLESPLLAEEAPWPPPEGAFLGYRLSRPEPMWAELLALAASAQGRVYRAEDPHGALRGLFEVRGLLAKDLAVVALREGLDLPPTDDPMLLAYLLDPSNTTPEGVARRYGGEWTEDAAKRALLAERLHANLLGRLQGEERLLWLYEEVEKPLSRVLAHMEATGVKLDVAYLENLSLEVAAHMRRLEEEVFRLAGRSFRLNSRDQLERVLFDELGLPPIGKTEKTGKRSTSAAVLEALREVHPIVDKILQYRELAKLKGTYIDRLPALVHPKTGRLHTRFNQTATATGRLSSSDPNLQSIPVRTPLGQKIRRAFVAEEGWRLVALDYRQIELRVLAHLSGDENLIRVFQEGKDIHTQTASWMFGLSAEAIDPLMRRAAKTINFGVLYGMSAFRLSQELGIPYEEAQAFIQKYFQSYPKVKAWIEKTLREGRTRGYVETLFGRRRYVPDLNARVKGKREAAERMAFNMPVQGTAADLMKLAMVRLFPQLREVGARMLLQVHDELLLEAPKERAEEVAALAKEVMEGVWPLAVPLEVEVGIGEDWLAAKG

SEQ ID NO: 4715 - DNA, 2523 bp, synthetic construct
  misc_feature 1..2523: note = Variant of DNA polymerase I from Thermus sp. strain 2.9
  source 1..2523: mol_type = other DNA
atgcaccatcatcatcatcatggcggtagcggcgtgttaccggtgttcgagcctaaaggtcgcgtgcttctggttgatggccatcatctcgcgtatcgtaacttctttgccctgaaaggattaaccaccagcctgggcgagccggtacagggtgtctacggctttgcaaagtcgctcctgaaagctctgaaagaagacggtgatgtggtgattgttgtctttgatgcgaaagcgccaagttttcgccacgaagcgtacgaagcttacaaagccgggcgtgctccaacgccggaagactttcctcgccaattggcgcttatgaaggaattagtggatttgcttggcctcgaacgcttggaagttcccggtttcgaggcagacgacgtattagcgactctcgcaaagaaagccgaacgtgagggctatgaagtccagatcttgacagcagatcgcgatcttttccagcttttatctccgcgcatctcggtgttacacccggaagggcatcgtatcaccccggaatggctctgggagaaatatggtttgcgtcccgaacaatgggtggattttcgcgccttagcaggcgatccgagcgacaatattccgggagttaaaggtatcggcgagaagacggcgctcaagctccttaaagaatgggggtcgttggagaacttgcttaagaatttagatcaggtcaaaccagagtcagtgcgtgagaagattcttgctcacctcgaagacctcaaattaagccgcgaattgtcccgtgtacgcaccgatttgccgctcgaagttgatttcggtcgccgccgcgaacctgactgggagggtcttaaagcgtttttagagcgtcttgaatttggttcgctcttgcatgaattcggccttttagaaagcccgttactggccgaagaagcaccttggccaccgcccgagggcgcgtttttaggttaccgtttgagtcgcccggaaccgatgtgggccgaattactggctcttgcagcgtctgcccagggacgtgtgtatcgcgcggaagaccctcatggtgcgctccgcggcctcttcgaagtccgtggactccttgccaaagacttagctgttgttgcattgcgcgaaggtcttgatttacctccgactgatgatccaatgcttcttgcgtacctcttggacccgtcaaacacgacgcccgaaggcgtagcccgtcgttacggcggcgagtggaccgaagatgcagcgaaacgcgcgttattggccgaacgtttgcacgccaatttattaggacgtttgcaaggcgaggaacgtctcctctggctttacgaagaagtggagaaaccattgagtcgcgtgctcgcgcatatggaagctaccggtgtcaaattagacgtggcgtatttggagaatctcagccttgaagttgctgcccacatgcgccgcttggaggaagaagtattccgtttagcaggccgttcctttcgccttaactctcgcgatcagttagaacgtgtgttgttcgatgaacttggtctccctcctatcggcaagacagagaagaccggtaaacgtagcacttcagcggcggttttagaagctcttcgcgaagtccatcccattgtggacaagatcttgcagtaccgcgaactcgcgaaattgaaaggcacctatattgaccgtcttccggcattagtccacccgaaaacgggacgcctccatacccgcttcaaccaaacagccacggcgaccggtcgtttgtcctcctctgatccaaaccttcagaatattccagtacgtaccccattgggccagaagatccgccgtgcgtttgtagctgaggagggttggcgtttagtggccctcgattatcgtcaaattgaattacgtgtccttgcccatctttctggcgatgagaacctcatccgcgtgtttcaggaaggcaaagacattcacactcaaacggcaagctggatgtttggattatcagctgaagcgatcgatcctttgatgcgtcgtgcagcgaagaccatcaatttcggtgttctctacggtatgagtgccaggcgtttgtcgcaggaattaggcattccctatgaagaagctcaggcgttcattcagaaatactttcaaagctatcccaaagttaaagcatggatcgagaagactctccgtgaaggccgcacacgtggttacgtagagaccttatttggacgtcgccgctatgttcccgatttaaacgctcgcgtgaaaggcaagcgtgaagccgccgaacgcatggcgttcaacatgcctgtacagggcacggcagctgacctcatgaaacttgcaatggtgcgcctttttccacaattgcgtgaagttggtgcccgcatgctcttgcaggtccacgatgaactcttgttagaagcgccaaaagagcgtgcggaagaggtggcagccctcgcgaaagaagttatggaaggcgtgtggcccttagcggtgcctcttgaagtcgaagttggtattggcgaggattggctggctgccaaagga

SEQ ID NO: 4716 - protein, 841 aa, synthetic construct
  REGION 1..841: note = Variant of DNA polymerase I from Thermus sp. strain 2.9
MHHHHHHGGSGVLPVFEPKGRVLLVDGHHLAYRNFFALKGLTTSLGEPVQGVYGFAKSLLKALKEDGDVVIVVFDAKAPSFRHEAYEAYKAGRAPTPEDFPRQLALMKELVDLLGLERLEVPGFEADDVLATLAKKAEREGYEVQILTADRDLFQLLSPRISVLHPEGHRITPEWLWEKYGLRPEQWVDFRALAGDPSDNIPGVKGIGEKTALKLLKEWGSLENLLKNLDQVKPESVREKILAHLEDLKLSRELSRVRTDLPLEVDFGRRREPDWEGLKAFLERLEFGSLLHEFGLLESPLLAEEAPWPPPEGAFLGYRLSRPEPMWAELLALAASAQGRVYRAEDPHGALRGLFEVRGLLAKDLAVVALREGLDLPPTDDPMLLAYLLDPSNTTPEGVARRYGGEWTEDAAKRALLAERLHANLLGRLQGEERLLWLYEEVEKPLSRVLAHMEATGVKLDVAYLENLSLEVAAHMRRLEEEVFRLAGRSFRLNSRDQLERVLFDELGLPPIGKTEKTGKRSTSAAVLEALREVHPIVDKILQYRELAKLKGTYIDRLPALVHPKTGRLHTRFNQTATATGRLSSSDPNLQNIPVRTPLGQKIRRAFVAEEGWRLVALDYRQIELRVLAHLSGDENLIRVFQEGKDIHTQTASWMFGLSAEAIDPLMRRAAKTINFGVLYGMSARRLSQELGIPYEEAQAFIQKYFQSYPKVKAWIEKTLREGRTRGYVETLFGRRRYVPDLNARVKGKREAAERMAFNMPVQGTAADLMKLAMVRLFPQLREVGARMLLQVHDELLLEAPKERAEEVAALAKEVMEGVWPLAVPLEVEVGIGEDWLAAKG

SEQ ID NO: 4717 - DNA, 2523 bp, synthetic construct
  misc_feature 1..2523: note = Variant of DNA polymerase I from Thermus sp. strain 2.9
  source 1..2523: mol_type = other DNA
atgcaccatcatcatcatcatggcggtagcggcgtgttaccggtgttcgagcctaaaggtcgcgtgcttctggttgatggccatcatctcgcgtatcgtaacttctttgccctgaaaggattaaccaccagcctgggcgagccggtacagggtgtctacggctttgcaaagtcgctcctgaaagctctgaaagaagacggtgatgtggtgattgttgtctttgatgcgaaagcgccaagttttcgccacgaagcgtacgaagcttacaaagccgggcgtgctccaacgccggaagactttcctcgccaattggcgcttatgaaggaattagtggatttgcttggcctcgaacgcttggaagttcccggtttcgaggcagacgacgtattagcgactctcgcaaagaaagccgaacgtgagggctatgaagtccagatcttgacagcagatcgcgatcttttccagcttttatctccgcgcatctcggtgttacacccggaagggcatcgtatcaccccggaatggctctgggagaaatatggtttgcgtcccgaacaatgggtggattttcgcgccttagcaggcgatccgagcgacaatattccgggagttaaaggtatcggcgagaagacggcgctcaagctccttaaagaatgggggtcgttggagaacttgcttaagaatttagatcaggtcaaaccagagtcagtgcgtgagaagattcttgctcacctcgaagacctcaaattaagccgcgaattgtcccgtgtacgcaccgatttgccgctcgaagttgatttcggtcgccgccgcgaacctgactgggagggtcttaaagcgtttttagagcgtcttgaatttggttcgctcttgcatgaattcggccttttagaaagcccgttactggccgaagaagcaccttggccaccgcccgagggcgcgtttttaggttaccgtttgagtcgcccggaaccgatgtgggccgaattactggctcttgcagcgtctgcccagggacgtgtgtatcgcgcggaagaccctcatggtgcgctccgcggcctcttcgaagtccgtggactccttgccaaagacttagctgttgttgcattgcgcgaaggtcttgatttacctccgactgatgatccaatgcttcttgcgtacctcttggacccgtcaaacacgacgcccgaaggcgtagcccgtcgttacggcggcgagtggaccgaagatgcagcgaaacgcgcgttattggccgaacgtttgcacgccaatttattaggacgtttgcaaggcgaggaacgtctcctctggctttacgaagaagtggagaaaccattgagtcgcgtgctcgcgcatatggaagctaccggtgtcaaattagacgtggcgtatttggagaatctcagccttgaagttgctgcccacatgcgccgcttggaggaagaagtattccgtttagcaggccgttcctttcgccttaactctcgcgatcagttagaacgtgtgttgttcgatgaacttggtctccctcctatcggcaagacagagaagaccggtaaacgtagcacttcagcggcggttttagaagctcttcgcgaagtccatcccattgtggacaagatcttgcagtaccgcgaactcgcgaaattgaaaggcacctatattgaccgtcttccggcattagtccacccgaaaacgggacgcctccatacccgcttcaaccggacagccacggcgaccggtcgtttgtcctcctctgatccaaaccttcagaatattccagtacgtaccccattgggccagaagatccgccgtgcgtttgtagctgaggagggttggcgtttagtggccctcgattatcgtcaaattgaattacgtgtccttgcccatctttctggcgatgagaacctcatccgcgtgtttcaggaaggcaaagacattcacactcaaacggcaagctggatgtttggattatcagctgaagcgatcgatcctttgatgcgtcgtgcagcgaagaccatcaatttcggtgttctctacggtatgagtgcctttcgtttgtcgcaggaattaggcattccctatgaagaagctcaggcgttcattcagaaatactttcaaagctatcccaaagttaaagcatggatcgagaagactctccgtgaaggccgcacacgtggttacgtagagaccttatttggacgtcgccgctatgttcccgatttaaacgctcgcgtgaaaggcaagcgtgaagccgccgaacgcatggcgttcaacatgcctgtacagggcacggcagctgacctcatgaaacttgcaatggtgcgcctttttccacaattgcgtgaagttggtgcccgcatgctcttgcaggtccacgatgaactcttgttagaagcgccaaaagagcgtgcggaagaggtggcagccctcgcgaaagaagttatggaaggcgtgtggcccttagcggtgcctcttgaagtcgaagttggtattggcgaggattggctggctgccaaagga

SEQ ID NO: 4718 - protein, 841 aa, synthetic construct
  REGION 1..841: note = Variant of DNA polymerase I from Thermus sp. strain 2.9
MHHHHHHGGSGVLPVFEPKGRVLLVDGHHLAYRNFFALKGLTTSLGEPVQGVYGFAKSLLKALKEDGDVVIVVFDAKAPSFRHEAYEAYKAGRAPTPEDFPRQLALMKELVDLLGLERLEVPGFEADDVLATLAKKAEREGYEVQILTADRDLFQLLSPRISVLHPEGHRITPEWLWEKYGLRPEQWVDFRALAGDPSDNIPGVKGIGEKTALKLLKEWGSLENLLKNLDQVKPESVREKILAHLEDLKLSRELSRVRTDLPLEVDFGRRREPDWEGLKAFLERLEFGSLLHEFGLLESPLLAEEAPWPPPEGAFLGYRLSRPEPMWAELLALAASAQGRVYRAEDPHGALRGLFEVRGLLAKDLAVVALREGLDLPPTDDPMLLAYLLDPSNTTPEGVARRYGGEWTEDAAKRALLAERLHANLLGRLQGEERLLWLYEEVEKPLSRVLAHMEATGVKLDVAYLENLSLEVAAHMRRLEEEVFRLAGRSFRLNSRDQLERVLFDELGLPPIGKTEKTGKRSTSAAVLEALREVHPIVDKILQYRELAKLKGTYIDRLPALVHPKTGRLHTRFNRTATATGRLSSSDPNLQNIPVRTPLGQKIRRAFVAEEGWRLVALDYRQIELRVLAHLSGDENLIRVFQEGKDIHTQTASWMFGLSAEAIDPLMRRAAKTINFGVLYGMSAFRLSQELGIPYEEAQAFIQKYFQSYPKVKAWIEKTLREGRTRGYVETLFGRRRYVPDLNARVKGKREAAERMAFNMPVQGTAADLMKLAMVRLFPQLREVGARMLLQVHDELLLEAPKERAEEVAALAKEVMEGVWPLAVPLEVEVGIGEDWLAAKG

SEQ ID NO: 4719 - DNA, 2523 bp, synthetic construct
  misc_feature 1..2523: note = Variant of DNA polymerase I from Thermus sp. strain 2.9
  source 1..2523: mol_type = other DNA
atgcaccatcatcatcatcatggcggtagcggcgtgttaccggtgttcgagcctaaaggtcgcgtgcttctggttgatggccatcatctcgcgtatcgtaacttctttgccatgaaaggattaaccaccagcctgggcgagccggtacagggtgtctacggctttgcaaagtcgctcctgaaagctctgaaagaagacggtgatgtggtgattgttgtctttgatgcgaaagcgccaagttttcgccacgaagcgtacgaagcttacaaagccgggcgtgctccaacgccggaagactttcctcgccaattggcgcttatgaaggaattagtggatttgcttggcctcgaacgcttggaagttcccggtttcgaggcagacgacgtattagcgactctcgcaaagaaagccgaacgtgagggctatgaagtccagatcttgacagcagatcgcgatcttttccagcttttatctccgcgcatctcggtgttacacccggaagggcatcgtatcaccccggaatggctctgggagaaatatggtttgcgtcccgaacaatgggtggattttcgcgccttagcaggcgatccgagcgacaatattccgggagttaaaggtatcggcgagaagacggcgctcaagctccttaaagaatgggggtcgttggagaacttgcttaagaatttagatcaggtcaaaccagagtcagtgcgtgagaagattcttgctcacctcgaagacctcaaattaagccgcgaattgtcccgtgtacgcaccgatttgccgctcgaagttgatttcggtcgccgccgcgaacctgactgggagggtcttaaagcgtttttagagcgtcttgaatttggttcgctcttgcatgaattcggccttttagaaagcccgttactggccgaagaagcaccttggccaccgcccgagggcgcgtttttaggttaccgtttgagtcgcccggaaccgatgtgggccgaattactggctcttgcagcgtctgcccagggacgtgtgtatcgcgcggaagaccctcatggtgcgctccgcggcctcttcgaagtccgtggactccttgccaaagacttagctgttgttgcattgcgcgaaggtcttgatttacctccgactgatgatccaatgcttcttgcgtacctcttggacccgtcaaacacgacgcccgaaggcgtagcccgtcgttacggcggcgagtggaccgaagatgcagcgaaacgcgcgttattggccgaacgtttgcacgccaatttattaggacgtttgcaaggcgaggaacgtctcctctggctttacgaagaagtggagaaaccattgagtcgcgtgctcgcgcatatggaagctaccggtgtcaaattagacgtggggtatttggagaatctcagccttgaagttgctgcccacatgcgccgcttggaggaagaagtattccgtttagcaggccgttcctttcgccttaactctcgcgatcagttagaacgtgtgttgttcgatgaacttggtctccctcctatcggcaagacagagaagaccggtaaacgtagcacttcagcggcggttttagaagctcttcgcgaagtccatcccattgtggacaagatcttgcagtaccgcgaactcgcgaaattgaaaggcacctatattgaccgtcttccggcattagtccacccgaaaacgggacgcctccatacccgcttcaaccaaacagccacggcgaccggtcgtttgtcctcctctgatccaaaccttcagaatattccagtacgtaccccattgggccagaagatccgccgtgcgtttgtagctgaggagggttggcgtttagtggccctcgattatcgtcaaattgaattacgtgtccttgcccatctttctggcgatgagaacctcatccgcgtgtttcaggaaggcaaagacattcacactcaaacggcaagctggatgtttggattatcagctgaagcgatcgatcctttgatgcgtcgtgcagcgaagaccatcaatttcggtgttctctacggtatgagtgcctttcgtttgtcgcaggaattaggcattccctatgaagaagctcaggcgttcattcagaaatactttcaaagctatcccaaagttaaagcatggatcgagaagactctccgtgaaggccgcacacgtggttacgtagagaccttatttggacgtcgccgctatgttcccgatttaaacgctcgcgtgaaaggcaagcgtgaagccgccgaacgcatggcgttcaacatgcctgtacagggcacggcagctgacctcatgaaacttgcaatggtgcgcctttttccacaattgcgtgaagttggtgcccgcatgctcttgcaggtccacgatgaactcttgttagaagcgccaaaagagcgtgcggaagaggtggcagccctcgcgaaagaagttatggaaggcgtgtggcccttagcggtgcctcttgaagtcgaagttggtattggcgaggattggctggctgccaaagga

SEQ ID NO: 4720 - protein, 841 aa, synthetic construct
  REGION 1..841: note = Variant of DNA polymerase I from Thermus sp. strain 2.9
MHHHHHHGGSGVLPVFEPKGRVLLVDGHHLAYRNFFAMKGLTTSLGEPVQGVYGFAKSLLKALKEDGDVVIVVFDAKAPSFRHEAYEAYKAGRAPTPEDFPRQLALMKELVDLLGLERLEVPGFEADDVLATLAKKAEREGYEVQILTADRDLFQLLSPRISVLHPEGHRITPEWLWEKYGLRPEQWVDFRALAGDPSDNIPGVKGIGEKTALKLLKEWGSLENLLKNLDQVKPESVREKILAHLEDLKLSRELSRVRTDLPLEVDFGRRREPDWEGLKAFLERLEFGSLLHEFGLLESPLLAEEAPWPPPEGAFLGYRLSRPEPMWAELLALAASAQGRVYRAEDPHGALRGLFEVRGLLAKDLAVVALREGLDLPPTDDPMLLAYLLDPSNTTPEGVARRYGGEWTEDAAKRALLAERLHANLLGRLQGEERLLWLYEEVEKPLSRVLAHMEATGVKLDVGYLENLSLEVAAHMRRLEEEVFRLAGRSFRLNSRDQLERVLFDELGLPPIGKTEKTGKRSTSAAVLEALREVHPIVDKILQYRELAKLKGTYIDRLPALVHPKTGRLHTRFNQTATATGRLSSSDPNLQNIPVRTPLGQKIRRAFVAEEGWRLVALDYRQIELRVLAHLSGDENLIRVFQEGKDIHTQTASWMFGLSAEAIDPLMRRAAKTINFGVLYGMSAFRLSQELGIPYEEAQAFIQKYFQSYPKVKAWIEKTLREGRTRGYVETLFGRRRYVPDLNARVKGKREAAERMAFNMPVQGTAADLMKLAMVRLFPQLREVGARMLLQVHDELLLEAPKERAEEVAALAKEVMEGVWPLAVPLEVEVGIGEDWLAAKG

SEQ ID NO: 4721 - DNA, 2523 bp, synthetic construct
  misc_feature 1..2523: note = Variant of DNA polymerase I from Thermus sp. strain 2.9
  source 1..2523: mol_type = other DNA
atgcaccatcatcatcatcatggcggtagcggcgtgttaccggtgttcgagcctaaaggtcgcgtgcttctggttgatggccatcatctcgcgtatcgtaacttctttgccctgaaaggattaaccaccagcctgggcgagccggtacagggtgtctacggctttgcaaagtcgctcctgaaagctctgaaagaagacggtgatgtggtgattgttgtctttgatgcgaaagcgccaagttttcgccacgaagcgtacgaagcttacaaagccgggcgtgctccaacgccggaagactttcctcgccaattggcgcttatgaaggaattagtggatttgcttggcctcgaacgcttggaagttcccggtttcgaggcagacgacgtattagcgactctcgcaaagaaagccgaacgtgagggctatgaagtccagatcttgacagcagatcgcgatcttttccagcttttatctccgcgcatctcggtgttacacccggaagggcatcgtatcaccccggaatggctctgggagaaatatggtttgcgtcccgaacaatgggtggattttcgcgccttagcaggcgatccgagcgacaatattccgggagttaaaggtatcggcgagaagacggcgctcaagctccttaaagaatgggggtcgttggagaacttgcttaagaatttagatcaggtcaaaccagagtcagtgcgtgagaagattcttgctcacctcgaagacctcaaattaagccgcgaattgtcccgtgtacgcaccgatttgccgctcgaagttgatttcggtcgccgccgcgaacctgactgggagggtcttaaagcgtttttagagcgtcttgaatttggttcgctcttgcatgaattcggccttttagaaagcccgttactggccgaagaagcaccttggccaccgcccgagggcgcgtttttaggttaccgtttgagtcgcccggaaccgatgtgggccgaattactggctcttgcagcgtctgcccagggacgtgtgtatcgcgcggaagaccctcatggtgcgctccgcggcctcttcgaagtccgtggactccttgccaaagacttagctgttgttgcattgcgcgaaggtcttgatttacctccgactgatgatccaatgcttcttgcgtacctcttggacccgtcaaacacgacgcccgaaggcgtagcccgtcgttacggcggcgagtggaccgaagatgcagcgaaacgcgcgttattggccgaacgtttgcacgccaatttattaggacgtttgcaaggcgaggaacgtctcctctggctttacgaagaagtggagaaaccattgagtcgcgtgctcgcgcatatggaagctaccggtgtcaaattagacgtggcgtatttggagaatctcagccttgaagttgctgcccacatgcgccgcttggaggaagaagtaacgcgtttagcaggccgttcctttcgccttaactctcgcgatcagttagaacgtgtgttgttcgatgaacttggtctccctcctatcggcaagacagagaagaccggtaaacgtagcacttcagcggcggttttagaagctcttcgcgaagtccatcccattgtggacaagatcttgcagtaccgcgaactcgcgaaattgaaaggcacctatattgaccgtcttccggcattagtccacccgaaaacgggacgcctccatacccgcttcaaccaaacagccacggcgaccggtcgtttgtcctcctctgatccaaaccttcagaatattccagtacgtaccccattgggccagaagatccgccgtgcgtttgtagctgaggagggttggcgtttagtggccctcgattatcgtcaaattgaattacgtgtccttgcccatctttctggcgatgagaacctcatccgcgtgtttcaggaaggcaaagacattcacactcaaacggcaagctggatgtttggattatcagctgaagcgatcgatcctttgatgcgtcgtgcagcgaagaccatcaatttcggtgttctctacggtatgagtgcctttcgtttgtcgcaggaattaggcattccctatgaagaagctcaggcgttcattcagaaatactttcaaagctatcccaaagttaaagcatggatcgagaagactctccgtgaaggccgcacacgtggttacgtagagaccttatttggacgtcgccgctatgttcccgatttaaacgctcgcgtgaaaggcaagcgtgaagccgccgaacgcatggcgttcaacatgcctgtacagggcacggcagctgacctcatgaaacttgcaatggtgcgcctttttccacaattgcgtgaagttggtgcccgcatgctcttgcaggtccacgatgaactcttgttagaagcgccaaaagagcgtgcggaagaggtggcagccctcgcgaaagaagttatggaaggcgtgtggcccttagcggtgcctcttgaagtcgaagttggtattggcgaggattggctggctgccaaagga

SEQ ID NO: 4722 - protein, 841 aa, synthetic construct
  REGION 1..841: note = Variant of DNA polymerase I from Thermus sp. strain 2.9
MHHHHHHGGSGVLPVFEPKGRVLLVDGHHLAYRNFFALKGLTTSLGEPVQGVYGFAKSLLKALKEDGDVVIVVFDAKAPSFRHEAYEAYKAGRAPTPEDFPRQLALMKELVDLLGLERLEVPGFEADDVLATLAKKAEREGYEVQILTADRDLFQLLSPRISVLHPEGHRITPEWLWEKYGLRPEQWVDFRALAGDPSDNIPGVKGIGEKTALKLLKEWGSLENLLKNLDQVKPESVREKILAHLEDLKLSRELSRVRTDLPLEVDFGRRREPDWEGLKAFLERLEFGSLLHEFGLLESPLLAEEAPWPPPEGAFLGYRLSRPEPMWAELLALAASAQGRVYRAEDPHGALRGLFEVRGLLAKDLAVVALREGLDLPPTDDPMLLAYLLDPSNTTPEGVARRYGGEWTEDAAKRALLAERLHANLLGRLQGEERLLWLYEEVEKPLSRVLAHMEATGVKLDVAYLENLSLEVAAHMRRLEEEVTRLAGRSFRLNSRDQLERVLFDELGLPPIGKTEKTGKRSTSAAVLEALREVHPIVDKILQYRELAKLKGTYIDRLPALVHPKTGRLHTRFNQTATATGRLSSSDPNLQNIPVRTPLGQKIRRAFVAEEGWRLVALDYRQIELRVLAHLSGDENLIRVFQEGKDIHTQTASWMFGLSAEAIDPLMRRAAKTINFGVLYGMSAFRLSQELGIPYEEAQAFIQKYFQSYPKVKAWIEKTLREGRTRGYVETLFGRRRYVPDLNARVKGKREAAERMAFNMPVQGTAADLMKLAMVRLFPQLREVGARMLLQVHDELLLEAPKERAEEVAALAKEVMEGVWPLAVPLEVEVGIGEDWLAAKG

SEQ ID NO: 4723 - DNA, 2523 bp, synthetic construct
  misc_feature 1..2523: note = Variant of DNA polymerase I from Thermus sp. strain 2.9
  source 1..2523: mol_type = other DNA
atgcaccatcatcatcatcatggcggtagcggcgtgttaccggtgttcgagcctaaaggtcgcgtgcttctggttgatggccatcatctcgcgtatcgtaacttctttgccctgaaaggattaaccaccagcctgggcgagccggtacagggtgtctacggctttgcaaagtcgctcctgaaagctctgaaagaagacggtgatgtggtgattgttgtctttgatgcgaaagcgccaagttttcgccacgaagcgtacgaagcttacaaagccgggcgtgctccaacgccggaagactttcctcgccaattggcgcttatgaaggaattagtggatttgcttggcctcgaacgcttggaagttcccggtttcgaggcagacgacgtattagcgactctcgcaaagaaagccgaacgtgagggctatgaagtccagatcttgacagcagatcgcgatcttttccagcttttatctccgcgcatctcggtgttacacccggaagggcatcgtatcaccccggaatggctctgggagaaatatggtttgcgtcccgaacaatgggtggattttcgcgccttagcaggcgatccgagcgacaatattccgggagttaaaggtatcggcgagaagacggcgctcaagctccttaaagaatgggggtcgttggagaacttgcttaagaatttagatcaggtcaaaccagagtcagtgcgtgagaagattcttgctcacctcgaagacctcaaattaagccgcgaattgtcccgtgtacgcaccgatttgccgctcgaagttgatttcggtcgccgccgcgaacctgactgggagggtcttaaagcgtttttagagcgtcttgaatttggttcgctcttgcatgaattcggccttttagaaagcccgttactggccgaagaagcaccttggccaccgcccgagggcgcgtttttaggttaccgtttgagtcgcccggaaccgatgtgggccgaattactggctcttgcagcgtctgcccagggacgtgtgtatcgcgcggaagaccctcatggtgcgctccgcggcctcttcgaagtccgtggactccttgccaaagacttagctgttgttgcattgcgcgaaggtcttgatttacctccgactgatgatccaatgcttcttgcgtacctcttggacccgtcaaacacgacgcccgaaggcgtagcccgtcgttacggcggcgagtggaccgaagatgcagcgaaacgcgcgttattggccgaacgtttgcacgccaatttattaggacgtttgcaaggcgaggaacgtctcctctggctttacgaagaagtggagaaaccattgagtcgcgtgctcgcgcatatggaagctaccggtgtcaaattagacgtggcgtatttggagaatctcagccttgaagttgctgcccacatgcgccgcttggaggaagaagtattccgtttagcaggccgttcctttcgccttaactctcgcgatcagttagaacgtgtgttgttcgatgaacttggtctccctcctatcggcaagacagagaagaccggtaaacgtagcacttcagcggcggttttagaagctcttcgcgaagtccatcccattgtggacaagatcttgcagtaccgcgaactcgcgaaattgaaaggcacctatattgaccgtcttccggcattagtccacccgaaaacgggacgcctccatacccgcttcaaccaaacagccacggcgaccggtcgtttgtcctcctctgatccaaaccttcagaatattccagtacgtaccccattgggccagaagatccgccgtgcgtttgtagctgaggagggttggcgtttagtggcctgtgattatcgtcaaattgaattacgtgtccttgcccatctttctggcgatgagaacctcatccgcgtgtttcaggaaggcaaagacattcacactcaaacggcaagctggatgtttggattatcagctgaagcgatcgatcctttgatgcgtcgtgcagcgaagaccatcaatttcggtgttctctacggtatgagtgcctttcgtttgtcgcaggaattaggcattccctatgaagaagctcaggcgttcattcagaaatactttcaaagctatcccaaagttaaagcatggatcgagaagactctccgtgaaggccgcacacgtggttacgtagagaccttatttggacgtcgccgctatgttcccgatttaaacgctcgcgtgaaaggcaagcgtgaagccgccgaacgcatggcgttcaacatgcctgtacagggcacggcagctgacctcatgaaacttgcaatggtgcgcctttttccacaattgcgtgaagttggtgcccgcatgctcttgcaggtccacgatgaactcttgttagaagcgccaaaagagcgtgcggaagaggtggcagccctcgcgaaagaagttatggaaggcgtgtggcccttagcggtgcctcttgaagtcgaagttggtattggcgaggattggctggctgccaaagga

SEQ ID NO: 4724 - protein, 841 aa, synthetic construct
  REGION 1..841: note = Variant of DNA polymerase I from Thermus sp. strain 2.9
MHHHHHHGGSGVLPVFEPKGRVLLVDGHHLAYRNFFALKGLTTSLGEPVQGVYGFAKSLLKALKEDGDVVIVVFDAKAPSFRHEAYEAYKAGRAPTPEDFPRQLALMKELVDLLGLERLEVPGFEADDVLATLAKKAEREGYEVQILTADRDLFQLLSPRISVLHPEGHRITPEWLWEKYGLRPEQWVDFRALAGDPSDNIPGVKGIGEKTALKLLKEWGSLENLLKNLDQVKPESVREKILAHLEDLKLSRELSRVRTDLPLEVDFGRRREPDWEGLKAFLERLEFGSLLHEFGLLESPLLAEEAPWPPPEGAFLGYRLSRPEPMWAELLALAASAQGRVYRAEDPHGALRGLFEVRGLLAKDLAVVALREGLDLPPTDDPMLLAYLLDPSNTTPEGVARRYGGEWTEDAAKRALLAERLHANLLGRLQGEERLLWLYEEVEKPLSRVLAHMEATGVKLDVAYLENLSLEVAAHMRRLEEEVFRLAGRSFRLNSRDQLERVLFDELGLPPIGKTEKTGKRSTSAAVLEALREVHPIVDKILQYRELAKLKGTYIDRLPALVHPKTGRLHTRFNQTATATGRLSSSDPNLQNIPVRTPLGQKIRRAFVAEEGWRLVACDYRQIELRVLAHLSGDENLIRVFQEGKDIHTQTASWMFGLSAEAIDPLMRRAAKTINFGVLYGMSAFRLSQELGIPYEEAQAFIQKYFQSYPKVKAWIEKTLREGRTRGYVETLFGRRRYVPDLNARVKGKREAAERMAFNMPVQGTAADLMKLAMVRLFPQLREVGARMLLQVHDELLLEAPKERAEEVAALAKEVMEGVWPLAVPLEVEVGIGEDWLAAKG

SEQ ID NO: 4725 - DNA, 2523 bp, synthetic construct
  misc_feature 1..2523: note = Variant of DNA polymerase I from Thermus sp. strain 2.9
  source 1..2523: mol_type = other DNA
atgcaccatcatcatcatcatggcggtagcggcgtgttaccggtgttcgagcctaaaggtcgcgtgcttctggttgatggccatcatctcgcgtatcgtaacttctttgccctgaaaggattaaccaccagcctgggcgagccggtacagggtgtctacggctttgcaaagtcgctcctgaaagctctgaaagaagacggtgatgtggtgattgttgtctttgatgcgaaagcgccaagttttcgccacgaagcgtacgaagcttacaaagccgggcgtgctccaacgccggaagactttcctcgccaattggcgcttatgaaggaattagtggatttgcttggcctcgaacgcttggaagttcccggtttcgaggcagacgacgtattagcgactctcgcaaagaaagccgaacgtgagggctatgaagtccagatcttgacagcagatcgcgatcttttccagcttttatctccgcgcatctcggtgttacacccggaagggcatcgtatcaccccggaatggctctgggagaaatatggtttgcgtcccgaacaatgggtggattttcgcgccttagcaggcgatccgagcgacaatattccgggagttaaaggtatcggcgagaagacggcgctcaagctccttaaagaatgggggtcgttggagaacttgcttaagaatttagatcaggtcaaaccagagtcagtgcgtgagaagattcttgctcacctcgaagacctcaaattaagccgcgaattgtcccgtgtacgcaccgatttgccgctcgaagttgatttcggtcgccgccgcgaacctgactgggagggtcttaaagcgtttttagagcgtcttgaatttggttcgctcttgcatgaattcggccttttagaaagcccgttactggccgaagaagcaccttggccaccgcccgagggcgcgtttttaggttaccgtttgagtcgcccggaaccgatgtgggccgaattactggctcttgcagcgtctgcccagggacgtgtgtatcgcgcggaagaccctcatggtgcgctccgcggcctcttcgaagtccgtggactccttgccaaagacttagctgttgttgcattgcgcgaaggtcttgatttacctccgactgatgatccaatgcttcttgcgtacctcttggacccgtcaaacacgacgcccgaaggcgtagcccgtcgttacggcggcgagtggaccgaagatgcagcgaaacgcgcgttattggccgaacgtttgcacgccaatttattaggacgtttgcaaggcgaggaacgtctcctctggctttacgaagaagtggagaaaccattgagtcgcgtgctcgcgcatatggaagctaccggtgtcaaattagacgtggcgtatttggagaatctcagccttgaagttgctgcccacatgcgccgcttggaggaagaagtattccgtttagcaggccgttcctttcgccttaactctcgcgatcagttagaacgtgtgttgttcgatgaacttggtctccctcctatcggcaagacagagaagaccggtaaacgtagcacttcagcggcggttttagaagctcttcgcgaagtccatcccattgtggacaagatcttgcagtaccgcgaactcgcgaaattgaaaggcacctatattgaccgtcttccggcattagtccacccgaaaacgggacgcctccatacccgcttcaaccaaacagccacggcgaccggtcgtttgtcctcctctgatccaaaccttcagaatattccagtacgtaccccattgggccagaagatccgccgtgcgtttgtagctgaggagggttggcgtttagtggccctcgattatcgtcaaattgaattacgtgtccttgcccatctttctggcgatgagaacctcatccgcgtgtttcaggaaggcaaagacattcacactcaaacggcaagctggatgtttggattatcagctgaagcgatcgatcctttgatgcgtcgtgcagcgaagaccatcaatttcggtgttctctacggtatgagtgcctttcgtttgtcgcaggaattaggcattccctatgaagaagctcaggcgttcattcagaaatactttcaaagctatcccaaagttaaagcatggatcgagaagactctccgtgaaggccgcacaacgggttacgtagagaccttatttggacgtcgccgctatgttcccgatttaaacgctcgcgtgaaaggcaagcgtgaagccgccgaacgcatggcgttcaacatgcctgtacagggcacggcagctgacctcatgaaacttgcaatggtgcgcctttttccacaattgcgtgaagttggtgcccgcatgctcttgcaggtccacgatgaactcttgttagaagcgccaaaagagcgtgcggaagaggtggcagccctcgcgaaagaagttatggaaggcgtgtggcccttagcggtgcctcttgaagtcgaagttggtattggcgaggattggctggctgccaaagga

SEQ ID NO: 4726 - protein, 841 aa, synthetic construct
  REGION 1..841: note = Variant of DNA polymerase I from Thermus sp. strain 2.9
MHHHHHHGGSGVLPVFEPKGRVLLVDGHHLAYRNFFALKGLTTSLGEPVQGVYGFAKSLLKALKEDGDVVIVVFDAKAPSFRHEAYEAYKAGRAPTPEDFPRQLALMKELVDLLGLERLEVPGFEADDVLATLAKKAEREGYEVQILTADRDLFQLLSPRISVLHPEGHRITPEWLWEKYGLRPEQWVDFRALAGDPSDNIPGVKGIGEKTALKLLKEWGSLENLLKNLDQVKPESVREKILAHLEDLKLSRELSRVRTDLPLEVDFGRRREPDWEGLKAFLERLEFGSLLHEFGLLESPLLAEEAPWPPPEGAFLGYRLSRPEPMWAELLALAASAQGRVYRAEDPHGALRGLFEVRGLLAKDLAVVALREGLDLPPTDDPMLLAYLLDPSNTTPEGVARRYGGEWTEDAAKRALLAERLHANLLGRLQGEERLLWLYEEVEKPLSRVLAHMEATGVKLDVAYLENLSLEVAAHMRRLEEEVFRLAGRSFRLNSRDQLERVLFDELGLPPIGKTEKTGKRSTSAAVLEALREVHPIVDKILQYRELAKLKGTYIDRLPALVHPKTGRLHTRFNQTATATGRLSSSDPNLQNIPVRTPLGQKIRRAFVAEEGWRLVALDYRQIELRVLAHLSGDENLIRVFQEGKDIHTQTASWMFGLSAEAIDPLMRRAAKTINFGVLYGMSAFRLSQELGIPYEEAQAFIQKYFQSYPKVKAWIEKTLREGRTTGYVETLFGRRRYVPDLNARVKGKREAAERMAFNMPVQGTAADLMKLAMVRLFPQLREVGARMLLQVHDELLLEAPKERAEEVAALAKEVMEGVWPLAVPLEVEVGIGEDWLAAKG

SEQ ID NO: 4727 - DNA, 2523 bp, synthetic construct
  misc_feature 1..2523: note = Variant of DNA polymerase I from Thermus sp. strain 2.9
  source 1..2523: mol_type = other DNA
atgcaccatcatcatcatcatggcggtagcggcgtgttaccggtgttcgagcctaaaggtcgcgtgcttctggttgatggccatcatctcgcgtatcgtaacttctttgccctgaaaggattaaccaccagcctgggcgagccggtacagggtgtctacggctttgcaaagtcgctcctgaaagctctgaaagaagacggtgatgtggtgattgttgtctttgatgcgaaagcgccaagttttcgccacgaagcgtacgaagcttacaaagccgggcgtgctccaacgccggaagactttcctcgccaattggcgcttatgaaggaattagtggatttgcttggcctcgaacgcttggaagttcccggtttcgaggcagacgacgtattagcgactctcgcaaagaaagccgaacgtgagggctatgaagtccagatcttgacagcagatcgcgatcttttccagcttttatctccgcgcatctcggtgttacacccggaagggcatcgtatcaccccggaatggctctgggagaaatatggtttgcgtcccgaacaatgggtggattttcgcgccttagcaggcgatccgagcgacaatattccgggagttaaaggtatcggcgagaagacggcgctcaagctccttaaagaatgggggtcgttggagaacttgcttaagaatttagatcaggtcaaaccagagtcagtgcgtgagaagattcttgctcacctcgaagacctcaaattaagccgcgaattgtcccgtgtacgcaccgatttgccgctcgaagttgatttcggtcgccgccgcgaacctgactgggagggtcttaaagcgtttttagagcgtcttgaatttggttcgctcttgcatgaattcggccttttagaaagcccgttactggccgaagaagcaccttggccaccgcccgagggcgcgtttttaggttaccgtttgagtcgcccggaaccgatgtgggccgaattactggctcttgcagcgtctgcccagggacgtgtgtatcgcgcggaagaccctcatggtgcgctccgcggcctcttcgaagtccgtggactccttgccaaagacttagctgttgttgcattgcgcgaaggtcttgatttacctccgactgatgatccaatgcttcttgcgtacctcttggacccgtcaaacacgacgcccgaaggcgtagcccgtcgttacggcggcgagtggaccgaagatgcagcgaaacgcgcgttattggccgaacgtttgcacgccaatttattaggacgtttgcaaggcgaggaacgtctcctctggctttacgaagaagtggagaaaccattgagtcgcgtgctcgcgcatatggaagctaccggtgtcaaattagacgtggcgtatttggagaatctcagccttgaagttgctgcccacatgcgccgcttggaggaagaagtattccgtttagcaggccgttcctttcgccttaactctcgcgatcagttagaacgtgtgttgttcgatgaacttggtctccctcctatcggcaagacagagaagaccggtaaacgtagcacttcagcggcggttttagaagctcttcgcgaagtccatcccattgtggacaagatcttgcagtaccgcgaactcgcgaaattgaaaggcacctatattgaccgtcttccggcattagtccacccgaaaacgggacgcctccatacccgcttcaaccaaacagccacggcgaccggtcgtttgtcctcctctgatccaaaccttcagaatattccagtacgtaccccattgggccagaagatccgccgtgcgtttgtagctgaggagggttggcgtttagtggccctcgattatcgtcaaattgaattacgtgtccttgcccatctttctggcgatgagaacctcatccgcgtgtttcaggaaggcaaagacattcacactcaaacggcaagctggatgtttggattatcagctgaagcgatcgatcctttgatgcgtcgtgcagcgaagaccatcaatttcggtgttctctacggtatgagtgcctttcgtttgtcgcaggaattaggcattccctatgaagaagctcaggcgttcattcagaaatactttcaaagctatcccaaagttaaagcatggatcgagaagactctccgtgaaggccgcacacgtggttacgtagagaccttatttggacgtcgccgctatgttcccgatttaaacgctcgcgtgaaaggcaagcgtgaagccgccgaacgcatggcgttcaacatgcctgtacagggcacggcagctgacctcatgaaacttgcaatggtgcgcctttttccacaattgcgtgaagttggtgcccgcatgctcttgcaggtccacgatgaactcttgttagaagcgccatgtgagcgtgcggaagaggtggcagccctcgcgaaagaagttatggaaggcgtgtggcccttagcggtgcctcttgaagtcgaagttggtattggcgaggattggctggctgccaaagga

SEQ ID NO: 4728 - protein, 841 aa, synthetic construct
  REGION 1..841: note = Variant of DNA polymerase I from Thermus sp. strain 2.9
MHHHHHHGGSGVLPVFEPKGRVLLVDGHHLAYRNFFALKGLTTSLGEPVQGVYGFAKSLLKALKEDGDVVIVVFDAKAPSFRHEAYEAYKAGRAPTPEDFPRQLALMKELVDLLGLERLEVPGFEADDVLATLAKKAEREGYEVQILTADRDLFQLLSPRISVLHPEGHRITPEWLWEKYGLRPEQWVDFRALAGDPSDNIPGVKGIGEKTALKLLKEWGSLENLLKNLDQVKPESVREKILAHLEDLKLSRELSRVRTDLPLEVDFGRRREPDWEGLKAFLERLEFGSLLHEFGLLESPLLAEEAPWPPPEGAFLGYRLSRPEPMWAELLALAASAQGRVYRAEDPHGALRGLFEVRGLLAKDLAVVALREGLDLPPTDDPMLLAYLLDPSNTTPEGVARRYGGEWTEDAAKRALLAERLHANLLGRLQGEERLLWLYEEVEKPLSRVLAHMEATGVKLDVAYLENLSLEVAAHMRRLEEEVFRLAGRSFRLNSRDQLERVLFDELGLPPIGKTEKTGKRSTSAAVLEALREVHPIVDKILQYRELAKLKGTYIDRLPALVHPKTGRLHTRFNQTATATGRLSSSDPNLQNIPVRTPLGQKIRRAFVAEEGWRLVALDYRQIELRVLAHLSGDENLIRVFQEGKDIHTQTASWMFGLSAEAIDPLMRRAAKTINFGVLYGMSAFRLSQELGIPYEEAQAFIQKYFQSYPKVKAWIEKTLREGRTRGYVETLFGRRRYVPDLNARVKGKREAAERMAFNMPVQGTAADLMKLAMVRLFPQLREVGARMLLQVHDELLLEAPCERAEEVAALAKEVMEGVWPLAVPLEVEVGIGEDWLAAKG

SEQ ID NO: 4729 - DNA, 2523 bp, synthetic construct
  misc_feature 1..2523: note = Variant of DNA polymerase I from Thermus sp. strain 2.9
  source 1..2523: mol_type = other DNA
atgcaccatcatcatcatcatggcggtagcggcgtgttaccggtgttcgagcctaaaggtcgcgtgcttctggttgatggccatcatctcgcgtatcgtaacttctttgccctgaaaggattaaccaccagcctgggcgagccggtacagggtgtctacggctttgcaaagtcgctcctgaaagctctgaaagaagacggtgatgtggtgattgttgtctttgatgcgaaagcgccaagttttcgccacgaagcgtacgaagcttacaaagccgggcgtgctccaacgccggaagactttcctcgccaattggcgcttatgaaggaattagtggatttgcttggcctcgaacgcttggaagttcccggtttcgaggcagacgacgtattagcgactctcgcaaagaaagccgaacgtgagggctatgaagtccagatcttgacagcagatcgcgatcttttccagcttttatctccgcgcatctcggtgttacacccggaagggcatcgtatcaccccggaatggctctgggagaaatatggtttgcgtcccgaacaatgggtggattttcgcgccttagcaggcgatccgagcgacaatattccgggagttaaaggtatcggcgagaagacggcgctcaagctccttaaagaatgggggtcgttggagaacttgcttaagaatttagatcaggtcaaaccagagtcagtgcgtgagaagattcttgctcacctcgaagacctcaaattaagccgcgaattgtcccgtgtacgcaccgatttgccgctcgaagttgatttcggtcgccgccgcgaacctgactgggagggtcttaaagcgtttttagagcgtcttgaatttggttcgctcttgcatgaattcggccttttagaaagcccgttactggccgaagaagcaccttggccaccgcccgagggcgcgtttttaggttaccgtttgagtcgcccggaaccgatgtgggccgaattactggctcttgcagcgtctgcccagggacgtgtgtatcgcgcggaagaccctcatggtgcgctccgcggcctcttcgaagtccgtggactccttgccaaagacttagctgttgttgcattgcgcgaaggtcttgatttacctccgactgatgatccaatgcttcttgcgtacctcttggacccgtcaaacacgacgcccgaaggcgtagcccgtcgttacggcggcgagtggaccgaagatgcagcgaaacgcgcgttattggccgaacgtttgcacgccaatttattaggacgtttgcaaggcgaggaacgtctcctctggctttacgaagaagtggagaaaccattgagtcgcgtgctcgcgcatatggaagctaccggtgtcaaattagacgtggcgtatttggagaatctcagccttgaagttgctgcccacatgcgccgcttggaggaagaagtattccgtttagcaggccgttcctttcgccttaactctcgcgatcagttagaacgtgtgttgttcgatgaacttggtctccctcctatcggcaagacagagaagaccggtaaacgtagcacttcagcggcggttttagaagctcttcgcgaagtccatcccattgtggacaagatcttgcagtaccgcgaactcgcgaaattgaaaggcacctatattgaccgtcttccggcattagtccacccgaaaacgggacgcctccatacccgcttcaactgtacagccacggcgaccggtcgtttgtcctcctctgatccaaaccttcagaatattccagtacgtaccccattgggccagaagatccgccgtgcgtttgtagctgaggagggttggcgtttagtggccctcgattatcgtcaaattgaattacgtgtccttgcccatctttctggcgatgagaacctcatccgcgtgtttcaggaaggcaaagacattcacactcaaacggcaagctggatgtttggattatcagctgaagcgatcgatcctttgatgcgtcgtgcagcgaagaccatcaatttcggtgttctctacggtatgagtgcctttcgtttgtcgcaggaattaggcattccctatgaagaagctcaggcgttcattcagaaatactttcaaagctatcccaaagttaaagcatggatcgagaagactctccgtgaaggccgcacacgtggttacgtagagaccttatttggacgtcgccgctatgttcccgatttaaacgctcgcgtgaaaggcaagcgtgaagccgccgaacgcatggcgttcaacatgcctgtacagggcacggcagctgacctcatgaaacttgcaatggtgcgcctttttccacaattgcgtgaagttggtgcccgcatgctcttgcaggtccacgatgaactcttgttagaagcgccaaaagagcgtgcggaagaggtggcagccctcgcgaaagaagttatggaaggcgtgtggcccttagcggtgcctcttgaagtcgaagttggtattggcgaggattggctggctgccaaagga

SEQ ID NO: 4730 - protein, 841 aa, synthetic construct
  REGION 1..841: note = Variant of DNA polymerase I from Thermus sp. strain 2.9
MHHHHHHGGSGVLPVFEPKGRVLLVDGHHLAYRNFFALKGLTTSLGEPVQGVYGFAKSLLKALKEDGDVVIVVFDAKAPSFRHEAYEAYKAGRAPTPEDFPRQLALMKELVDLLGLERLEVPGFEADDVLATLAKKAEREGYEVQILTADRDLFQLLSPRISVLHPEGHRITPEWLWEKYGLRPEQWVDFRALAGDPSDNIPGVKGIGEKTALKLLKEWGSLENLLKNLDQVKPESVREKILAHLEDLKLSRELSRVRTDLPLEVDFGRRREPDWEGLKAFLERLEFGSLLHEFGLLESPLLAEEAPWPPPEGAFLGYRLSRPEPMWAELLALAASAQGRVYRAEDPHGALRGLFEVRGLLAKDLAVVALREGLDLPPTDDPMLLAYLLDPSNTTPEGVARRYGGEWTEDAAKRALLAERLHANLLGRLQGEERLLWLYEEVEKPLSRVLAHMEATGVKLDVAYLENLSLEVAAHMRRLEEEVFRLAGRSFRLNSRDQLERVLFDELGLPPIGKTEKTGKRSTSAAVLEALREVHPIVDKILQYRELAKLKGTYIDRLPALVHPKTGRLHTRFNCTATATGRLSSSDPNLQNIPVRTPLGQKIRRAFVAEEGWRLVALDYRQIELRVLAHLSGDENLIRVFQEGKDIHTQTASWMFGLSAEAIDPLMRRAAKTINFGVLYGMSAFRLSQELGIPYEEAQAFIQKYFQSYPKVKAWIEKTLREGRTRGYVETLFGRRRYVPDLNARVKGKREAAERMAFNMPVQGTAADLMKLAMVRLFPQLREVGARMLLQVHDELLLEAPKERAEEVAALAKEVMEGVWPLAVPLEVEVGIGEDWLAAKG

SEQ ID NO: 4731 - DNA, 2523 bp, synthetic construct
  misc_feature 1..2523: note = Variant of DNA polymerase I from Thermus sp. strain 2.9
  source 1..2523: mol_type = other DNA
atgcaccatcatcatcatcatggcggtagcggcgtgttaccggtgttcgagcctaaaggtcgcgtgcttctggttgatggccatcatctcgcgtatcgtaacttctttgccctgaaaggattaaccaccagcctgggcgagccggtacagggtgtctacggctttgcaaagtcgctcctgaaagctctgaaagaagacggtgatgtggtgattgttgtctttgatgcgaaagcgccaagttttcgccacgaagcgtacgaagcttacaaagccgggcgtgctccaacgccggaagactttcctcgccaattggcgcttatgaaggaattagtggatttgcttggcctcgaacgcttggaagttcccggtttcgaggcagacgacgtattagcgactctcgcaaagaaagccgaacgtgagggctatgaagtccagatcttgacagcagatcgcgatcttttccagcttttatctccgcgcatctcggtgttacacccggaagggcatcgtatcaccccggaatggctctgggagaaatatggtttgcgtcccgaacaatgggtggattttcgcgccttagcaggcgatccgagcgacaatattccgggagttaaaggtatcggcgagaagacggcgctcaagctccttaaagaatgggggtcgttggagaacttgcttaagaatttagatcaggtcaaaccagagtcagtgcgtgagaagattcttgctcacctcgaagacctcaaattaagccgcgaattgtcccgtgtacgcaccgatttgccgctcgaagttgatttcggtcgccgccgcgaacctgactgggagggtcttaaagcgtttttagagcgtcttgaatttggttcgctcttgcatgaattcggccttttagaaagcccgttactggccgaagaagcaccttggccaccgcccgagggcgcgtttttaggttaccgtttgagtcgcccggaaccgatgtgggccgaattactggctcttgcagcgtctgcccagggacgtgtgtatcgcgcggaagaccctcatggtgcgctccgcggcctcttcgaagtccgtggactccttgccaaagacttagctgttgttgcattgcgcgaaggtcttgatttacctccgactgatgatccaatgcttcttgcgtacctcttggacccgtcaaacacgacgcccgaaggcgtagcccgtcgttacggcggcgagtggaccgaagatgcagcgaaacgcgcgttattggccgaacgtttgcacgccaatttattaggacgtttgcaaggcgaggaacgtctcctctggctttacgaagaagtggagaaaccattgagtcgcgtgctcgcgcatatggaagctaccggtgtcaaattagacgtggcgtatttggagaatctcagccttgaagttgctgcccacatgcgccgcttggaggaagaagtattccgtttagcaggccgttcctttcgccttaactctcgcgatcagttagaacgtgtgttgttcgatgaacttggtctccctcctatcggcaagacagagaagaccggtaaacgtagcacttcagcggcggttttagaagctcttcgcgaagtccatcccattgtggacaagatcttgcagtaccgcgaactcgcgaaattgaaaggcacctatattgaccgtcttccggcattagtccacccgaaaacgggacgcctccatacccgcttcaaccaaacagccacggcgaccggtcgtttgtcctcctctgatccaaaccttcagaatattccagtacgtaccccattgggccagaagatccgccgtgcgtttgtagctgaggagggttggcgtttagtggccctcgattatcgtcaaattgaattacgtgtccttgcccatctttctggcgatgagaacctcatccgcgtgtttcaggaaggcaaagacattcacactcaaacggcaagctggatgtttggattatcagctgaagcgatcgatcctttgatgcgtcgtgcagcgaagaccatcaatttcggtgttctctacggtatgagtgcctttcgtttgtcgcaggaattaggcattccctatgaagaagctcaggcgttcattcagaaatactttcaaagctatcccaaagttaaagcatggatcgagaagactctccgtgaaggccgcacacgtggttacgtagagaccttatttggacgtcgccgctatgttcccgatttaaacgctcgcgtgaaaggcaagcgtgaagccgccgaacgcatggcgttcaacatgcctgtacagggcacggtggctgacctcatgaaacttgcaatggtgcgcctttttccacaattgcgtgaagttggtgcccgcatgctcttgcaggtccacgatgaactcttgttagaagcgccaaaagagcgtgcggaagaggtggcagccctcgcgaaagaagttatggaaggcgtgtggcccttagcggtgcctcttgaagtcgaagttggtattggcgaggattggctggctgccaaagga

SEQ ID NO: 4732 - protein, 841 aa, synthetic construct
  REGION 1..841: note = Variant of DNA polymerase I from Thermus sp. strain 2.9
MHHHHHHGGSGVLPVFEPKGRVLLVDGHHLAYRNFFALKGLTTSLGEPVQGVYGFAKSLLKALKEDGDVVIVVFDAKAPSFRHEAYEAYKAGRAPTPEDFPRQLALMKELVDLLGLERLEVPGFEADDVLATLAKKAEREGYEVQILTADRDLFQLLSPRISVLHPEGHRITPEWLWEKYGLRPEQWVDFRALAGDPSDNIPGVKGIGEKTALKLLKEWGSLENLLKNLDQVKPESVREKILAHLEDLKLSRELSRVRTDLPLEVDFGRRREPDWEGLKAFLERLEFGSLLHEFGLLESPLLAEEAPWPPPEGAFLGYRLSRPEPMWAELLALAASAQGRVYRAEDPHGALRGLFEVRGLLAKDLAVVALREGLDLPPTDDPMLLAYLLDPSNTTPEGVARRYGGEWTEDAAKRALLAERLHANLLGRLQGEERLLWLYEEVEKPLSRVLAHMEATGVKLDVAYLENLSLEVAAHMRRLEEEVFRLAGRSFRLNSRDQLERVLFDELGLPPIGKTEKTGKRSTSAAVLEALREVHPIVDKILQYRELAKLKGTYIDRLPALVHPKTGRLHTRFNQTATATGRLSSSDPNLQNIPVRTPLGQKIRRAFVAEEGWRLVALDYRQIELRVLAHLSGDENLIRVFQEGKDIHTQTASWMFGLSAEAIDPLMRRAAKTINFGVLYGMSAFRLSQELGIPYEEAQAFIQKYFQSYPKVKAWIEKTLREGRTRGYVETLFGRRRYVPDLNARVKGKREAAERMAFNMPVQGTVADLMKLAMVRLFPQLREVGARMLLQVHDELLLEAPKERAEEVAALAKEVMEGVWPLAVPLEVEVGIGEDWLAAKG

SEQ ID NO: 4733 - DNA, 2523 bp, synthetic construct
  misc_feature 1..2523: note = Variant of DNA polymerase I from Thermus sp. strain 2.9
  source 1..2523: mol_type = other DNA
atgcaccatcatcatcatcatggcggtagcggcgtgttaccggtgttcgagcctaaaggtcgcgtgcttctggttgatggccatcatctcgcgtatcgtaacttctttgccctgaaaggattaaccaccagcctgggcgagccggtacagggtgtctacggctttgcaaagtcgctcctgaaagctctgaaagaagacggtgatgtggtgattgttgtctttgatgcgaaagcgccaagttttcgccacgaagcgtacgaagcttacaaagccgggcgtgctccaacgccggaagactttcctcgccaattggcgcttatgaaggaattagtggatttgcttggcctcgaacgcttggaagttcccggtttcgaggcagacgacgtattagcgactctcgcaaagaaagccgaacgtgagggctatgaagtccagatcttgacagcagatcgcgatcttttccagcttttatctccgcgcatctcggtgttacacccggaagggcatcgtatcaccccggaatggctctgggagaaatatggtttgcgtcccgaacaatgggtggattttcgcgccttagcaggcgatccgagcgacaatattccgggagttaaaggtatcggcgagaagacggcgctcaagctccttaaagaatgggggtcgttggagaacttgcttaagaatttagatcaggtcaaaccagagtcagtgcgtgagaagattcttgctcacctcgaagacctcaaattaagccgcgaattgtcccgtgtacgcaccgatttgccgctcgaagttgatttcggtcgccgccgcgaacctgactgggagggtcttaaagcgtttttagagcgtcttgaatttggttcgctcttgcatgaattcggccttttagaaagcccgttactggccgaagaagcaccttggccaccgcccgagggcgcgtttttaggttaccgtttgagtcgcccggaaccgatgtgggccgaattactggctcttgcagcgtctgcccagggacgtgtgtatcgcgcggaagaccctcatggtgcgctccgcggcctcttcgaagtccgtggactccttgccaaagacttagctgttgttgcattgcgcgaaggtcttgatttacctccgactgatgatccaatgcttcttgcgtacctcttggacccgtcaaacacgacgcccgaaggcgtagcccgtcgttacggcggcgagtggaccgaagatgcagcgaaacgcgcgttattggccgaacgtttgttggccaatttattaggacgtttgcaaggcgaggaacgtctcctctggctttacgaagaagtggagaaaccattgagtcgcgtgctcgcgcatatggaagctaccggtgtcaaattagacgtggcgtatttggagaatctcagccttgaagttgctgcccacatgcgccgcttggaggaagaagtattccgtttagcaggccgttcctttcgccttaactctcgcgatcagttagaacgtgtgttgttcgatgaacttggtctccctcctatcggcaagacagagaagaccggtaaacgtagcacttcagcggcggttttagaagctcttcgcgaagtccatcccattgtggacaagatcttgcagtaccgcgaactcgcgaaattgaaaggcacctatattgaccgtcttccggcattagtccacccgaaaacgggacgcctccatacccgcttcaaccaaacagccacggcgaccggtcgtttgtcctcctctgatccaaaccttcagaatattccagtacgtaccccattgggccagaagatccgccgtgcgtttgtagctgaggagggttggcgtttagtggccctcgattatcgtcaaattgaattacgtgtccttgcccatctttctggcgatgagaacctcatccgcgtgtttcaggaaggcaaagacattcacactcaaacggcaagctggatgtttggattatcagctgaagcgatcgatcctttgatgcgtcgtgcagcgaagaccatcaatttcggtgttctctacggtatgagtgcctttcgtttgtcgcaggaattaggcattccctatgaagaagctcaggcgttcattcagaaatactttcaaagctatcccaaagttaaagcatggatcgagaagactctccgtgaaggccgcacacgtggttacgtagagaccttatttggacgtcgccgctatgttcccgatttaaacgctcgcgtgaaaggcaagcgtgaagccgccgaacgcatggcgttcaacatgcctgtacagggcacggcagctgacctcatgaaacttgcaatggtgcgcctttttccacaattgcgtgaagttggtgcccgcatgctcttgcaggtccacgatgaactcttgttagaagcgccaaaagagcgtgcggaagaggtggcagccctcgcgaaagaagttatggaaggcgtgtggcccttagcggtgcctcttgaagtcgaagttggtattggcgaggattggctggctgccaaagga

SEQ ID NO: 4734 - protein, 841 aa, synthetic construct
  REGION 1..841: note = Variant of DNA polymerase I from Thermus sp. strain 2.9
MHHHHHHGGSGVLPVFEPKGRVLLVDGHHLAYRNFFALKGLTTSLGEPVQGVYGFAKSLLKALKEDGDVVIVVFDAKAPSFRHEAYEAYKAGRAPTPEDFPRQLALMKELVDLLGLERLEVPGFEADDVLATLAKKAEREGYEVQILTADRDLFQLLSPRISVLHPEGHRITPEWLWEKYGLRPEQWVDFRALAGDPSDNIPGVKGIGEKTALKLLKEWGSLENLLKNLDQVKPESVREKILAHLEDLKLSRELSRVRTDLPLEVDFGRRREPDWEGLKAFLERLEFGSLLHEFGLLESPLLAEEAPWPPPEGAFLGYRLSRPEPMWAELLALAASAQGRVYRAEDPHGALRGLFEVRGLLAKDLAVVALREGLDLPPTDDPMLLAYLLDPSNTTPEGVARRYGGEWTEDAAKRALLAERLLANLLGRLQGEERLLWLYEEVEKPLSRVLAHMEATGVKLDVAYLENLSLEVAAHMRRLEEEVFRLAGRSFRLNSRDQLERVLFDELGLPPIGKTEKTGKRSTSAAVLEALREVHPIVDKILQYRELAKLKGTYIDRLPALVHPKTGRLHTRFNQTATATGRLSSSDPNLQNIPVRTPLGQKIRRAFVAEEGWRLVALDYRQIELRVLAHLSGDENLIRVFQEGKDIHTQTASWMFGLSAEAIDPLMRRAAKTINFGVLYGMSAFRLSQELGIPYEEAQAFIQKYFQSYPKVKAWIEKTLREGRTRGYVETLFGRRRYVPDLNARVKGKREAAERMAFNMPVQGTAADLMKLAMVRLFPQLREVGARMLLQVHDELLLEAPKERAEEVAALAKEVMEGVWPLAVPLEVEVGIGEDWLAAKG

SEQ ID NO: 4735 - DNA, 2523 bp, synthetic construct
  misc_feature 1..2523: note = Variant of DNA polymerase I from Thermus sp. strain 2.9
  source 1..2523: mol_type = other DNA
atgcaccatcatcatcatcatggcggtagcggcgtgttaccggtgttcgagcctaaaggtcgcgtgcttctggttgatggccatcatctcgcgtatcgtaacttctttgccctgaaaggattaaccaccagcctgggcgagccggtacagggtgtctacggctttgcaaagtcgctcctgaaagctctgaaagaagacggtgatgtggtgattgttgtctttgatgcgaaagcgccaagttttcgccacgaagcgtacgaagcttacaaagccgggcgtgctccaacgccggaagactttcctcgccaattggcgcttatgaaggaattagtggatttgcttggcctcgaacgcttggaagttcccggtttcgaggcagacgacgtattagcgactctcgcaaagaaagccgaacgtgagggctatgaagtccagatcttgacagcagatcgcgatcttttccagcttttatctccgcgcatctcggtgttacacccggaagggcatcgtatcaccccggaatggctctgggagaaatatggtttgcgtcccgaacaatgggtggattttcgcgccttagcaggcgatccgagcgacaatattccgggagttaaaggtatcggcgagaagacggcgctcaagctccttaaagaatgggggtcgttggagaacttgcttaagaatttagatcaggtcaaaccagagtcagtgcgtgagaagattcttgctcacctcgaagacctcaaattaagccgcgaattgtcccgtgtacgcaccgatttgccgctcgaagttgatttcggtcgccgccgcgaacctgactgggagggtcttaaagcgtttttagagcgtcttgaatttggttcgctcttgcatgaattcggccttttagaaagcccgttactggccgaagaagcaccttggccaccgcccgagggcgcgtttttaggttaccgtttgagtcgcccggaaccgatgtgggccgaattactggctcttgcagcgtctgcccagggacgtgtgtatcgcgcggaagaccctcatggtgcgctccgcggcctcttcgaagtccgtggactccttgccaaagacttagctgttgttgcattgcgcgaaggtcttgatttacctccgactgatgatccaatgcttcttgcgtacctcttggacccgtcaaacacgacgcccgaaggcgtagcccgtcgttacggcggcgagtggaccgaagatgcagcgaaacgcgcgttattggccgaacgtttgcacgccaatttattaggacgtttgcaaggcgaggaacgtctcctctggctttacgaagaagtggagaaaccattgagtcgcgtgctcgcgcatatggaagctaccggtgtcaaattagacgtggcgtatttggagaatctcagccttgaagttgctttgcacatgcgccgcttggaggaagaagtattccgtttagcaggccgttcctttcgccttaactctcgcgatcagttagaacgtgtgttgttcgatgaacttggtctccctcctatcggcaagacagagaagaccggtaaacgtagcacttcagcggcggttttagaagctcttcgcgaagtccatcccattgtggacaagatcttgcagtaccgcgaactcgcgaaattgaaaggcacctatattgaccgtcttccggcattagtccacccgaaaacgggacgcctccatacccgcttcaaccaaacagccacggcgaccggtcgtttgtcctcctctgatccaaaccttcagaatattccagtacgtaccccattgggccagaagatccgccgtgcgtttgtagctgaggagggttggcgtttagtggccctcgattatcgtcaaattgaattacgtgtccttgcccatctttctggcgatgagaacctcatccgcgtgtttcaggaaggcaaagacattcacactcaaacggcaagctggatgtttggattatcagctgaagcgatcgatcctttgatgcgtcgtgcagcgaagaccatcaatttcggtgttctctacggtatgagtgcctttcgtttgtcgcaggaattaggcattccctatgaagaagctcaggcgttcattcagaaatactttcaaagctatcccaaagttaaagcatggatcgagaagactctccgtgaaggccgcacacgtggttacgtagagaccttatttggacgtcgccgctatgttcccgatttaaacgctcgcgtgaaaggcaagcgtgaagccgccgaacgcatggcgttcaacatgcctgtacagggcacggcagctgacctcatgaaacttgcaatggtgcgcctttttccacaattgcgtgaagttggtgcccgcatgctcttgcaggtccacgatgaactcttgttagaagcgccaaaagagcgtgcggaagaggtggcagccctcgcgaaagaagttatggaaggcgtgtggtccttagcggtgcctcttgaagtcgaagttggtattggcgaggattggctggctgccaaagga

SEQ ID NO: 4736 - protein, 841 aa, synthetic construct
  REGION 1..841: note = Variant of DNA polymerase I from Thermus sp. strain 2.9
MHHHHHHGGSGVLPVFEPKGRVLLVDGHHLAYRNFFALKGLTTSLGEPVQGVYGFAKSLLKALKEDGDVVIVVFDAKAPSFRHEAYEAYKAGRAPTPEDFPRQLALMKELVDLLGLERLEVPGFEADDVLATLAKKAEREGYEVQILTADRDLFQLLSPRISVLHPEGHRITPEWLWEKYGLRPEQWVDFRALAGDPSDNIPGVKGIGEKTALKLLKEWGSLENLLKNLDQVKPESVREKILAHLEDLKLSRELSRVRTDLPLEVDFGRRREPDWEGLKAFLERLEFGSLLHEFGLLESPLLAEEAPWPPPEGAFLGYRLSRPEPMWAELLALAASAQGRVYRAEDPHGALRGLFEVRGLLAKDLAVVALREGLDLPPTDDPMLLAYLLDPSNTTPEGVARRYGGEWTEDAAKRALLAERLHANLLGRLQGEERLLWLYEEVEKPLSRVLAHMEATGVKLDVAYLENLSLEVALHMRRLEEEVFRLAGRSFRLNSRDQLERVLFDELGLPPIGKTEKTGKRSTSAAVLEALREVHPIVDKILQYRELAKLKGTYIDRLPALVHPKTGRLHTRFNQTATATGRLSSSDPNLQNIPVRTPLGQKIRRAFVAEEGWRLVALDYRQIELRVLAHLSGDENLIRVFQEGKDIHTQTASWMFGLSAEAIDPLMRRAAKTINFGVLYGMSAFRLSQELGIPYEEAQAFIQKYFQSYPKVKAWIEKTLREGRTRGYVETLFGRRRYVPDLNARVKGKREAAERMAFNMPVQGTAADLMKLAMVRLFPQLREVGARMLLQVHDELLLEAPKERAEEVAALAKEVMEGVWSLAVPLEVEVGIGEDWLAAKG

SEQ ID NO: 4737 - DNA, 2523 bp, synthetic construct
  misc_feature 1..2523: note = Variant of DNA polymerase I from Thermus sp. strain 2.9
  source 1..2523: mol_type = other DNA
atgcaccatcatcatcatcatggcggtagcggcgtgttaccggtgttcgagcctaaaggtcgcgtgcttctggttgatggccatcatctcgcgtatcgtaacttctttgccctgaaaggattaaccaccagcctgggcgagccggtacagggtgtctacggctttgcaaagtcgctcctgaaagctctgaaagaagacggtgatgtggtgattgttgtctttgatgcgaaagcgccaagttttcgccacgaagcgtacgaagcttacaaagccgggcgtgctccaacgccggaagactttcctcgccaattggcgcttatgaaggaattagtggatttgcttggcctcgaacgcttggaagttcccggtttcgaggcagacgacgtattagcgactctcgcaaagaaagccgaacgtgagggctatgaagtccagatcttgacagcagatcgcgatcttttccagcttttatctccgcgcatctcggtgttacacccggaagggcatcgtatcaccccggaatggctctgggagaaatatggtttgcgtcccgaacaatgggtggattttcgcgccttagcaggcgatccgagcgacaatattccgggagttaaaggtatcggcgagaagacggcgctcaagctccttaaagaatgggggtcgttggagaacttgcttaagaatttagatcaggtcaaaccagagtcagtgcgtgagaagattcttgctcacctcgaagacctcaaattaagccgcgaattgtcccgtgtacgcaccgatttgccgctcgaagttgatttcggtcgccgccgcgaacctgactgggagggtcttaaagcgtttttagagcgtcttgaatttggttcgctcttgcatgaattcggccttttagaaagcccgttactggccgaagaagcaccttggccaccgcccgagggcgcgtttttaggttaccgtttgagtcgcccggaaccgatgtgggccgaattactggctcttgcagcgtctgcccagggacgtgtgtatcgcgcggaagaccctcatggtgcgctccgcggcctcttcgaagtccgtggactccttgccaaagacttagctgttgttgcattgcgcgaaggtcttgatttacctccgactgatgatccaatgcttcttgcgtacctcttggacccgtcaaacacgacgcccgaaggcgtagcccgtcgttacggcggcgagtggaccgaagatgcagcgaaacgcgcgttattggccgaacgtttgcacgccaatttattaggacgtttgcaaggcgaggaacgtctcctctggctttacgaagaagtggagaaaccattgagtcgcgtgctcgcgcatatggaagctaccggtgtcaaattagacgtggcgtatttggagaatctcagccttgaagttgctgcccacatgcgccgcttggaggaagaagtattccgtttagcaggccgttcctttcgccttaactctcgcgatcagttagaacgtgtgttgttcgatgaacttggtctccctcctatcggcaagacagagaagaccggtaaacgtagcacttcagcggcggttttagaagctcttcgcgaagtccatcccattgtggacaagatcttgcagtaccgcgaactcgcgaaattgaaaggcacctatattgaccgtcttccggcattagtccacccgaaaacgggacgcctccatacccgcttcaaccaaacagccacggcgaccggtcgtttgtcctcctctgatccaaaccttcagaatattccagtacgtaccccattgggccagaagatccgccgtgcgtttgtagctgaggagggttggcgtttagtggccctcgattatcgtcaaattgaattacgtgtccttgcccatctttctggcgatgagaacctcatccgcgtgtttcaggaaggcaaagacattcacactcaaacggcaagctggatgtttggattatcagctgaagcgatcgatcctttgatgcgtcgtgcagcgaagaccatcaatttcggtgttctctacggtatgagtgcctttcgtttgtcgcaggaattaggcattccctatgaagaagctcaggcgttcattcagaaatactttcaaagctatcccaaagttaaagcatggatcgagaagactctccgtgaaggccgcacacgtggttacgtagagaccttatttggacgtcgccgctatgttcccgatttaaacgctcgcgtgaaaggcaagcgtgaagccgccgaacgcatggcgttcaacatgcctgtacagggcacggcagctgacctcatgaaacttgcaatggtgcgcctttttcgtcaattgcgtgaagttggtgcccgcatgctcttgcaggtccacgatgaactcttgttagaagcgccaaaagagcgtgcggaagaggtggcagccctcgcgaaagaagttatggaaggcgtgtggcccttagcggtgcctcttgaagtcgaagttggtattggcgaggattggctggctgccaaagga

SEQ ID NO: 4738 - protein, 841 aa, synthetic construct
  REGION 1..841: note = Variant of DNA polymerase I from Thermus sp. strain 2.9
MHHHHHHGGSGVLPVFEPKGRVLLVDGHHLAYRNFFALKGLTTSLGEPVQGVYGFAKSLLKALKEDGDVVIVVFDAKAPSFRHEAYEAYKAGRAPTPEDFPRQLALMKELVDLLGLERLEVPGFEADDVLATLAKKAEREGYEVQILTADRDLFQLLSPRISVLHPEGHRITPEWLWEKYGLRPEQWVDFRALAGDPSDNIPGVKGIGEKTALKLLKEWGSLENLLKNLDQVKPESVREKILAHLEDLKLSRELSRVRTDLPLEVDFGRRREPDWEGLKAFLERLEFGSLLHEFGLLESPLLAEEAPWPPPEGAFLGYRLSRPEPMWAELLALAASAQGRVYRAEDPHGALRGLFEVRGLLAKDLAVVALREGLDLPPTDDPMLLAYLLDPSNTTPEGVARRYGGEWTEDAAKRALLAERLHANLLGRLQGEERLLWLYEEVEKPLSRVLAHMEATGVKLDVAYLENLSLEVAAHMRRLEEEVFRLAGRSFRLNSRDQLERVLFDELGLPPIGKTEKTGKRSTSAAVLEALREVHPIVDKILQYRELAKLKGTYIDRLPALVHPKTGRLHTRFNQTATATGRLSSSDPNLQNIPVRTPLGQKIRRAFVAEEGWRLVALDYRQIELRVLAHLSGDENLIRVFQEGKDIHTQTASWMFGLSAEAIDPLMRRAAKTINFGVLYGMSAFRLSQELGIPYEEAQAFIQKYFQSYPKVKAWIEKTLREGRTRGYVETLFGRRRYVPDLNARVKGKREAAERMAFNMPVQGTAADLMKLAMVRLFRQLREVGARMLLQVHDELLLEAPKERAEEVAALAKEVMEGVWPLAVPLEVEVGIGEDWLAAKG

SEQ ID NO: 4739 - DNA, 2523 bp, synthetic construct
  misc_feature 1..2523: note = Variant of DNA polymerase I from Thermus sp. strain 2.9
  source 1..2523: mol_type = other DNA
atgcaccatcatcatcatcatggcggtagcggcgtgttaccggtgttcgagcctaaaggtcgcgtgcttctggttgatggccatcatctcgcgtatcgtaacttctttgccctgaaaggattaaccaccagcctgggcgagccggtacagggtgtctacggctttgcaaagtcgctcctgaaagctctgaaagaagacggtgatgtggtgattgttgtctttgatgcgaaagcgccaagttttcgccacgaagcgtacgaagcttacaaagccgggcgtgctccaacgccggaagactttcctcgccaattggcgcttatgaaggaattagtggatttgcttggcctcgaacgcttggaagttcccggtttcgaggcagacgacgtattagcgactctcgcaaagaaagccgaacgtgagggctatgaagtccagatcttgacagcagatcgcgatcttttccagcttttatctccgcgcatctcggtgttacacccggaagggcatcgtatcaccccggaatggctctgggagaaatatggtttgcgtcccgaacaatgggtggattttcgcgccttagcaggcgatccgagcgacaatattccgggagttaaaggtatcggcgagaagacggcgctcaagctccttaaagaatgggggtcgttggagaacttgcttaagaatttagatcaggtcaaaccagagtcagtgcgtgagaagattcttgctcacctcgaagacctcaaattaagccgcgaattgtcccgtgtacgcaccgatttgccgctcgaagttgatttcggtcgccgccgcgaacctgactgggagggtcttaaagcgtttttagagcgtcttgaatttggttcgctcttgcatgaattcggccttttagaaagcccgttactggccgaagaagcaccttggccaccgcccgagggcgcgtttttaggttaccgtttgagtcgcccggaaccgatgtgggccgaattactggctcttgcagcgtctgcccagggacgtgtgtatcgcgcggaagaccctcatggtgcgctccgcggcctcttcgaagtccgtggactccttgccaaagacttagctgttgttgcattgcgcgaaggtcttgatttacctccgactgatgatccaatgcttcttgcgtacctcttggacccgtcaaacacgacgcccgaaggcgtagcccgtcgttacggcggcgagtggaccgaagatgcagcgaaacgcgcgttattggccgaacgtttgcacgccaatttattaggacgtttgcaaggcgaggaacgtctcctctggctttacgaagaagtggagaaaccattgagtcgcgtgctcgcgcatatggaagctaccggtgtcaaattagacgtggcgtatttggagaatctcagccttgaagttgctgcccacatgcgccgcttggaggaagaagtattccgtttagcaggccgttcctttcgccttaactctcgcgatcagttagaacgtgtgttgttcgatgaacttggtctccctcctatcggcaagacagagaagaccggtaaacgtagcacttcagcggcggttttagaagctcttcgcgaagtccatcccattgtggacaagatcttgcagtaccgcgaactcgcgaaattgaaaggcacctatattgaccgtcttccggcattagtccacccgaaaacgggacgcctccatacccgcttcaaccaaacagccacggcgaccggtcgtttgtcctcctctgatccaaaccttcagaatattccagtacgtaccccattgggccagaagatccgccgtgcgtttgtagctgaggagggttggcgtttagtggccctcgattatcgtcaaattgaattacgtgtccttgcccatctttctggcgatgagaacctcatccgcgtgtttcaggaaggcaaagacattcacactcaaacggcaagctggatgtttggattatcagctgaagcgatcgatcctttgatgcgtcgtgcagcgaagaccatcaatttcggtgttctctacggtatgagtgcctttcgtttgtcgcaggaattaggcattccctatgaagaagctcaggcgttcattcagaaatactttcaaagctatcccaaagttaaagcatggatcgagaagactctccgtgaaggccgcacacgtggttacgtagagaccttatttggacgtcgccgctatgttcccgatttaaacgctcgcgtgaaaggcaagcgtgaagccgccgaacgcatggcgttcaacatgcctgtacagggcacggcagctgacctcatgaaacttgcaatggtgcgcctttttccacaattgcgtgaagttggtgcccgcatgctcttgcaggtccacgatgaactcttgttagaagcgccaaaagagcgtgcggaagaggtggcagccctcgcgaaagaagttatggaaggcgtgtggcccttagcggtgcctcttgaagtcttggttggtattggcgaggattggctggctgccaaagga

SEQ ID NO: 4740 - protein, 841 aa, synthetic construct
  REGION 1..841: note = Variant of DNA polymerase I from Thermus sp. strain 2.9
MHHHHHHGGSGVLPVFEPKGRVLLVDGHHLAYRNFFALKGLTTSLGEPVQGVYGFAKSLLKALKEDGDVVIVVFDAKAPSFRHEAYEAYKAGRAPTPEDFPRQLALMKELVDLLGLERLEVPGFEADDVLATLAKKAEREGYEVQILTADRDLFQLLSPRISVLHPEGHRITPEWLWEKYGLRPEQWVDFRALAGDPSDNIPGVKGIGEKTALKLLKEWGSLENLLKNLDQVKPESVREKILAHLEDLKLSRELSRVRTDLPLEVDFGRRREPDWEGLKAFLERLEFGSLLHEFGLLESPLLAEEAPWPPPEGAFLGYRLSRPEPMWAELLALAASAQGRVYRAEDPHGALRGLFEVRGLLAKDLAVVALREGLDLPPTDDPMLLAYLLDPSNTTPEGVARRYGGEWTEDAAKRALLAERLHANLLGRLQGEERLLWLYEEVEKPLSRVLAHMEATGVKLDVAYLENLSLEVAAHMRRLEEEVFRLAGRSFRLNSRDQLERVLFDELGLPPIGKTEKTGKRSTSAAVLEALREVHPIVDKILQYRELAKLKGTYIDRLPALVHPKTGRLHTRFNQTATATGRLSSSDPNLQNIPVRTPLGQKIRRAFVAEEGWRLVALDYRQIELRVLAHLSGDENLIRVFQEGKDIHTQTASWMFGLSAEAIDPLMRRAAKTINFGVLYGMSAFRLSQELGIPYEEAQAFIQKYFQSYPKVKAWIEKTLREGRTRGYVETLFGRRRYVPDLNARVKGKREAAERMAFNMPVQGTAADLMKLAMVRLFPQLREVGARMLLQVHDELLLEAPKERAEEVAALAKEVMEGVWPLAVPLEVLVGIGEDWLAAKG

SEQ ID NO: 4741 - DNA, 2523 bp, synthetic construct
  misc_feature 1..2523: note = Variant of DNA polymerase I from Thermus sp. strain 2.9
  source 1..2523: mol_type = other DNA
atgcaccatcatcatcatcatggcggtagcggcgtgttaccggtgttcgagcctaaaggtcgcgtgcttctggttgatggccatcatctcgcgtatcgtaacttctttgccctgaaaggattaaccaccagcctgggcgagccggtacagggtgtctacggctttgcaaagtcgctcctgaaagctctgaaagaagacggtgatgtggtgattgttgtctttgatgcgaaagcgccaagttttcgccacgaagcgtacgaagcttacaaagccgggcgtgctccaacgccggaagactttcctcgccaattggcgcttatgaaggaattagtggatttgcttggcctcgaacgcttggaagttcccggtttcgaggcagacgacgtattagcgactctcgcaaagaaagccgaacgtgagggctatgaagtccagatcttgacagcagatcgcgatcttttccagcttttatctccgcgcatctcggtgttacacccggaagggcatcgtatcaccccggaatggctctgggagaaatatggtttgcgtcccgaacaatgggtggattttcgcgccttagcaggcgatccgagcgacaatattccgggagttaaaggtatcggcgagaagacggcgctcaagctccttaaagaatgggggtcgttggagaacttgcttaagaatttagatcaggtcaaaccagagtcagtgcgtgagaagattcttgctcacctcgaagacctcaaattaagccgcgaattgtcccgtgtacgcaccgatttgccgctcgaagttgatttcggtcgccgccgcgaacctgactgggagggtcttaaagcgtttttagagcgtcttgaatttggttcgctcttgcatgaattcggccttttagaaagcccgttactggccgaagaagcaccttggccaccgcccgagggcgcgtttttaggttaccgtttgagtcgcccggaaccgatgtgggccgaattactggctcttgcagcgtctgcccagggacgtgtgtatcgcgcggaagaccctcatggtgcgctccgcggcctcttcgaagtccgtggactccttgccaaagacttagctgttgttgcattgcgcgaaggtcttgatttacctccgactgatgatccaatgcttcttgcgtacctcttggacccgtcaaacacgacgcccgaaggcgtagcccgtcgttacggcggcgagtggaccgaagatgcagcgaaacgcgcgttattggccgaacgtttgcacgccaatttattaggacgtttgcaaggcgaggaacgtctcctctggctttacgaagaagtggagaaaccattgagtcgcgtgctcgcgcatatggaagctaccggtgtcaaattagacgtggcgtatttggagaatctcagccttgaagttgctgcccacatgcgccgcttggaggaagaagtattccgtttagcaggccgttcctttcgccttaactctcgcgatcagttagaacgtgtgttgttcgatgaacttggtctccctcctatcggcaagacagagaagaccggtaaacgtagcacttcagcggcggttttagaagctcttcgcgaagtccatcccattgtggacaagatcttgcagtaccgcgaactcgcgaaattgaaaggctcttatattgaccgtcttccggcattagtccacccgaaaacgggacgcctccatacccgcttcaaccaaacagccacggcgaccggtcgtttgtcctcctctgatccaaaccttcagaatattccagtacgtaccccattgggccagaagatccgccgtgcgtttgtagctgaggagggttggcgtttagtggccctcgattatcgtcaaattgaattacgtgtccttgcccatctttctggcgatgagaacctcatccgcgtgtttcaggaaggcaaagacattcacactcaaacggcaagctggatgtttggattatcagctgaagcgatcgatcctttgatgcgtcgtgcagcgaagaccatcaatttcggtgttctctacggtatgagtgcctttcgtttgtcgcaggaattaggcattccctatgaagaagctcaggcgttcattcagaaatactttcaaagctatcccaaagttaaagcatggatcgagaagactctccgtgaaggccgcacacgtggttacgtagagaccttatttggacgtcgccgctatgttcccgatttaaacgctcgcgtgaaaggcaagcgtgaagccgccgaacgcatggcgttcaacatgcctgtacagggcacggcagctgacctcatgaaacttgcaatggtgcgcctttttccacaattgcgtgaagttggtgcccgcatgctcttgcaggtccacgatgaactcttgttagaagcgccaaaagagcgtgcggaagaggtggcagccctcgcgaaagaagttatggaaggcgtgtggcccttagcggtgcctcttgaagtcgaagttggtattggcgaggattggctggctgccaaagga

SEQ ID NO: 4742 - protein, 841 aa, synthetic construct
  REGION 1..841: note = Variant of DNA polymerase I from Thermus sp. strain 2.9
MHHHHHHGGSGVLPVFEPKGRVLLVDGHHLAYRNFFALKGLTTSLGEPVQGVYGFAKSLLKALKEDGDVVIVVFDAKAPSFRHEAYEAYKAGRAPTPEDFPRQLALMKELVDLLGLERLEVPGFEADDVLATLAKKAEREGYEVQILTADRDLFQLLSPRISVLHPEGHRITPEWLWEKYGLRPEQWVDFRALAGDPSDNIPGVKGIGEKTALKLLKEWGSLENLLKNLDQVKPESVREKILAHLEDLKLSRELSRVRTDLPLEVDFGRRREPDWEGLKAFLERLEFGSLLHEFGLLESPLLAEEAPWPPPEGAFLGYRLSRPEPMWAELLALAASAQGRVYRAEDPHGALRGLFEVRGLLAKDLAVVALREGLDLPPTDDPMLLAYLLDPSNTTPEGVARRYGGEWTEDAAKRALLAERLHANLLGRLQGEERLLWLYEEVEKPLSRVLAHMEATGVKLDVAYLENLSLEVAAHMRRLEEEVFRLAGRSFRLNSRDQLERVLFDELGLPPIGKTEKTGKRSTSAAVLEALREVHPIVDKILQYRELAKLKGSYIDRLPALVHPKTGRLHTRFNQTATATGRLSSSDPNLQNIPVRTPLGQKIRRAFVAEEGWRLVALDYRQIELRVLAHLSGDENLIRVFQEGKDIHTQTASWMFGLSAEAIDPLMRRAAKTINFGVLYGMSAFRLSQELGIPYEEAQAFIQKYFQSYPKVKAWIEKTLREGRTRGYVETLFGRRRYVPDLNARVKGKREAAERMAFNMPVQGTAADLMKLAMVRLFPQLREVGARMLLQVHDELLLEAPKERAEEVAALAKEVMEGVWPLAVPLEVEVGIGEDWLAAKG

SEQ ID NO: 4743 - DNA, 2523 bp, synthetic construct
  misc_feature 1..2523: note = Variant of DNA polymerase I from Thermus sp. strain 2.9
  source 1..2523: mol_type = other DNA
atgcaccatcatcatcatcatggcggtagcggcgtgttaccggtgttcgagcataaaggtcgcgtgcttctggttgatggccatcatctcgcgtatcgtaacttctttgccctgaaaggattaaccaccagcctgggcgagccggtacagggtgtctacggctttgcaaagtcgctcctgaaagctctgaaagaagacggtgatgtggtgattgttgtctttgatgcgaaagcgccaagttttcgccacgaagcgtacgaagcttacaaagccgggcgtgctccaacgccggaagactttcctcgccaattggcgcttatgaaggaattagtggatttgcttggcctcgaacgcttggaagttcccggtttcgaggcagacgacgtattagcgactctcgcaaagaaagccgaacgtgagggctatgaagtccagatcttgacagcagatcgcgatcttttccagcttttatctccgcgcatctcggtgttacacccggaagggcatcgtatcaccccggaatggctctgggagaaatatggtttgcgtcccgaacaatgggtggattttcgcgccttagcaggcgatccgagcgacaatattccgggagttaaaggtatcggcgagaagacggcgctcaagctccttaaagaatgggggtcgttggagaacttgcttaagaatttagatcaggtcaaaccagagtcagtgcgtgagaagattcttgctcacctcgaagacctcaaattaagccgcgaattgtcccgtgtacgcaccgatttgccgctcgaagttgatttcggtcgccgccgcgaacctgactgggagggtcttaaagcgtttttagagcgtcttgaatttggttcgctccagcatgaattcggccttttagaaagcccgttagtggccgaagaagcaccttggccaccgcccgagggcgcgtttttaggttaccgtttgagtcgcccggaaccgatgtgggccgaattactggctcttgcagcgtctgcccagggacgtgtgtatcgcgcggaagaccctcatggtgcgctccgcggcctcttcgaagtccgtggactccttgccaaagacttagctgttgttgcattgcgcgaaggtcttgatttacctccgactgatgatccaatgcttcttgcgtacctcttggacccgtcaaacacgacgcccgaaggcgtagcccgtcgttacggcggcgagtggaccgaagatgcagcgaaacgcgcgttattggccgaacgtttgcacgccaatttattaggacgtttgcaaggcgagaaacgtctcctctggctttacgaagaagtggagaaaccattgagtcgcgtgctcgcgcatatggaagctaccggtgtcaaattagacgtggcgtatttggagaatctcagccttgaagttgctgcccacatgcgccgcttggaggaagaagtattccgtttagcaggccgttcctttcgccttaactctcgcgatcagttagaacgtgtgttgttcgatgaacttggtctccctcctatcggcaagacagagaagaccggtaaacgtagcacttcagcggcggttttagaagctcttcgcgaagtccatcccattgtggacaagatcttgcagtaccgcgaactcgcgaaattgaaaggcacctatattgaccgtcttccggcattagtccacccgaaaacgggacgcctccatacccgcttcaaccaaacagccacggcgaccggtcgtttgtcctcctctgatccaaaccttcagaatattccagtacgtaccccattgggccagaagatccgccgtgcgtttgtagctgaggagggttggcgtttagtggccctcgattatcgtcaaattgaattacgtgtccttgcccatctttctggcgatgagaacctcatccgcgtgtttcaggaaggcaaagacattcacactcaaacggcaagctggatgtttggattatcagctgaagcgatcgatcctttgatgcgtcgtgcagcgaagaccatcaatttcggtgttctctacggtatgagtgcctttcgtttgtcgcaggaattaggcattccctatgaagaagctcaggcgttcattcagaaatactttcaaagctatcccaaagttaaagcatggatcgagaagactctccgtgaaggccgcacacgtggttacgtagagaccttatttggacgtcgccgctatgttcccgatttaaacgctcgcgtgaaaggcaagcgtgaagccgccgaacgcatggcgttcaacatgcctgtacagggcacggcagctgacctcatgaaacttgcaatggtgcgcctttttccacaattgcgtgaagttggtgcccgcatgctcttgcaggtccacgatgaactcttgttagaagcgccaaaagagcgtgcggaagaggtggcagccctcgcgaaagaagttatggaaggcgtgtggcccttagcggtgcctcttgaagtcgaagttggtattggcgaggattggctggctgccaaagga

SEQ ID NO: 4744 - protein, 841 aa, synthetic construct
  REGION 1..841: note = Variant of DNA polymerase I from Thermus sp. strain 2.9
MHHHHHHGGSGVLPVFEHKGRVLLVDGHHLAYRNFFALKGLTTSLGEPVQGVYGFAKSLLKALKEDGDVVIVVFDAKAPSFRHEAYEAYKAGRAPTPEDFPRQLALMKELVDLLGLERLEVPGFEADDVLATLAKKAEREGYEVQILTADRDLFQLLSPRISVLHPEGHRITPEWLWEKYGLRPEQWVDFRALAGDPSDNIPGVKGIGEKTALKLLKEWGSLENLLKNLDQVKPESVREKILAHLEDLKLSRELSRVRTDLPLEVDFGRRREPDWEGLKAFLERLEFGSLQHEFGLLESPLVAEEAPWPPPEGAFLGYRLSRPEPMWAELLALAASAQGRVYRAEDPHGALRGLFEVRGLLAKDLAVVALREGLDLPPTDDPMLLAYLLDPSNTTPEGVARRYGGEWTEDAAKRALLAERLHANLLGRLQGEKRLLWLYEEVEKPLSRVLAHMEATGVKLDVAYLENLSLEVAAHMRRLEEEVFRLAGRSFRLNSRDQLERVLFDELGLPPIGKTEKTGKRSTSAAVLEALREVHPIVDKILQYRELAKLKGTYIDRLPALVHPKTGRLHTRFNQTATATGRLSSSDPNLQNIPVRTPLGQKIRRAFVAEEGWRLVALDYRQIELRVLAHLSGDENLIRVFQEGKDIHTQTASWMFGLSAEAIDPLMRRAAKTINFGVLYGMSAFRLSQELGIPYEEAQAFIQKYFQSYPKVKAWIEKTLREGRTRGYVETLFGRRRYVPDLNARVKGKREAAERMAFNMPVQGTAADLMKLAMVRLFPQLREVGARMLLQVHDELLLEAPKERAEEVAALAKEVMEGVWPLAVPLEVEVGIGEDWLAAKG

SEQ ID NO: 4745 - DNA, 2523 bp, synthetic construct
  misc_feature 1..2523: note = Variant of DNA polymerase I from Thermus sp. strain 2.9
  source 1..2523: mol_type = other DNA
atgcaccatcatcatcatcatggcggtagcggcgtgttaccggtgttcgagcctaaaggtcgcgtgcttctggttgatggccatcatctcgcgtatcgtaacttctttgccctgaaaggattaaccaccagcctgggcgagccggtacagggtgtctacggctttgcaaagtcgctcctgaaagctctgaaagaagacggtgatgtggtgattgttgtctttgatgcgaaagcgccaagttttcgccacgaagcgtacgaagcttacaaagccgggcgtgctccaacgccggaagactttcctcgccaattggcgcttatgaaggaattagtggatttgcttggcctcgaacgcttggaagttcccggtttcgaggcagacgacgtattagcgactctcgcaaagaaagccgaacgtgagggctatgaagtccagatcttgacagcagatcgcgatcttttccagcttttatctccgcgcatctcggtgttacacccggaagggcatcgtatcaccccggaatggctctgggagaaatatggtttgcgtcccgaacaatgggtggattttcgcgccttagcaggcgatccgagcgacaatattccgggagttaaaggtatcggcgagaagacggcgctcaagctccttaaagaatgggggtcgttggagaacttgcttaagaatttagatcaggtcaaaccagagtcagtgcgtgagaagattcttgctcacctcgaagacctcaaattaagccgcgaattgtcccgtgtacgcaccgatttgccgctcgaagttgatttcggtcgccgccgcgaacctgactgggagggtcttaaagcgtttttagagcgtcttgaatttggttcgctcttgcatgaattcggccttttagaaagcccgttactggccgaagaagcaccttggccaccgcccgagggcgcgtttttaggttaccgtttgagtcgcccggaaccgatgtgggccgaattactggctcttgcagcgtctgcccagggacgtgtgtatcgcgcggaagaccctcatggtgcgctccgcggcctcttcgaagtccgtggactccttgccaaagacttagctgttgttgcattgcgcgaaggtcttgatttacctccgactgatgatccaatgcttcttgcgtacctcttggacccgtcaaacacgacgcccgaaggcgtagcccgtcgttacggcggcgagtggaccgaagatgcagcgaaacgcgcgttattggccgaacgtttgcacgccaatttattaggacgtttgcaaggcgaggaacgtctcctctggctttacgaagaagtggagaaaccattgagtcgcgtgctcgcgcatatggaatggaccggtgtcaaattagacgtggcgtatttggagaatctcagccttgaagttgctgcccacatgcgccgcttggaggaagaagtattccgtttagcaggccgttcctttcgccttaactctcgcgatcagttagaacgtgtgttgttcgatgaacttggtctccctcctatcggcaagacagagaagaccggtaaacgtagcacttcagcggcggttttagaagctcttcgcgaagtccatcccattgtggacaagatcttgcagtaccgcgaactcgcgaaattgaaaggcacctatattgaccgtcttccggcattagtccacccgaaaacgggacgcctccatacccgcttcaaccaaacagccacggcgaccggtcgtttgtcctcctctgatccaaaccttcagaatattccagtacgtaccccattgggccagaagatccgccgtgcgtttgtagctgaggagggttggcgtttagtggccctcgattatcgtcaaattgaattacgtgtccttgcccatctttctggcgatgagaacctcatccgcgtgtttcaggaaggcaaagacattcacactcaaacggcaagctggatgtttggattatcagctgaagcgatcgatcctttgatgcgtcgtgcagcgaagaccatcaatttcggtgttctctacggtatgagtgcctttcgtttgtcgcaggaattaggcattccctatgaagaagctcaggcgttcattcagaaatactttcaaagctatcccaaagttaaagcatggatcgagaagactctccgtgaaggccgcacacgtggttacgtagagaccttatttggacgtcgccgctatgttcccgatttaaacgctcgcgtgaaaggcaagcgtgaagccgccgaacgcatggcgttcaacatgcctgtacagggcacggcagctgacctcatgaaacttgcaatggtgcgcctttttccacaattgcgtgaagttggtgcccgcatgctcttgcaggtccacgatgaactcttgttagaagcgccaaaagagcgtgcggaagaggtggcagccctcgcgaaagaagttatggaaggcgtgtggcccttagcggtgcctcttgaagtcgaagttggtattggcgaggattggctggctgccaaagga

SEQ ID NO: 4746 - protein, 841 aa, synthetic construct
  REGION 1..841: note = Variant of DNA polymerase I from Thermus sp. strain 2.9
MHHHHHHGGSGVLPVFEPKGRVLLVDGHHLAYRNFFALKGLTTSLGEPVQGVYGFAKSLLKALKEDGDVVIVVFDAKAPSFRHEAYEAYKAGRAPTPEDFPRQLALMKELVDLLGLERLEVPGFEADDVLATLAKKAEREGYEVQILTADRDLFQLLSPRISVLHPEGHRITPEWLWEKYGLRPEQWVDFRALAGDPSDNIPGVKGIGEKTALKLLKEWGSLENLLKNLDQVKPESVREKILAHLEDLKLSRELSRVRTDLPLEVDFGRRREPDWEGLKAFLERLEFGSLLHEFGLLESPLLAEEAPWPPPEGAFLGYRLSRPEPMWAELLALAASAQGRVYRAEDPHGALRGLFEVRGLLAKDLAVVALREGLDLPPTDDPMLLAYLLDPSNTTPEGVARRYGGEWTEDAAKRALLAERLHANLLGRLQGEERLLWLYEEVEKPLSRVLAHMEWTGVKLDVAYLENLSLEVAAHMRRLEEEVFRLAGRSFRLNSRDQLERVLFDELGLPPIGKTEKTGKRSTSAAVLEALREVHPIVDKILQYRELAKLKGTYIDRLPALVHPKTGRLHTRFNQTATATGRLSSSDPNLQNIPVRTPLGQKIRRAFVAEEGWRLVALDYRQIELRVLAHLSGDENLIRVFQEGKDIHTQTASWMFGLSAEAIDPLMRRAAKTINFGVLYGMSAFRLSQELGIPYEEAQAFIQKYFQSYPKVKAWIEKTLREGRTRGYVETLFGRRRYVPDLNARVKGKREAAERMAFNMPVQGTAADLMKLAMVRLFPQLREVGARMLLQVHDELLLEAPKERAEEVAALAKEVMEGVWPLAVPLEVEVGIGEDWLAAKG

SEQ ID NO: 4747 - DNA, 2523 bp, synthetic construct
  misc_feature 1..2523: note = Variant of DNA polymerase I from Thermus sp. strain 2.9
  source 1..2523: mol_type = other DNA
atgcaccatcatcatcatcatggcggtagcggcgtgttaccggtgttcgagcctaaaggtcgcgtgcttctggttgatggccatcatctcgcgtatcgtaacttctttgccctgaaaggattaaccaccagcctgggcgagccggtacagggtgtctacggctttgcaaagtcgctcctgaaagctctgaaagaagacggtgatgtggtgattgttgtctttgatgcgaaagcgccaagttttcgccacgaagcgtacgaagcttacaaagccgggcgtgctccaacgccggaagactttcctcgccaattggcgcttatgaaggaattagtggatttgcttggcctcgaacgcttggaagttcccggtttcgaggcagacgacgtattagcgactctcgcaaagaaagccgaacgtgagggctatgaagtccagatcttgacagcagatcgcgatcttttccagcttttatctccgcgcatctcggtgttacacccggaagggcatcgtatcaccccggaatggctctgggagaaatatggtttgcgtcccgaacaatgggtggattttcgcgccttagcaggcgatccgagcgacaatattccgggagttaaaggtatcggcgagaagacggcgctcaagctccttaaagaatgggggtcgttggagaacttgcttaagaatttagatcaggtcaaaccagagtcagtgcgtgagaagattcttgctcacctcgaagacctcaaattaagccgcgaattgtcccgtgtacgcaccgatttgccgctcgaagttgatttcggtcgccgccgcgaacctgactgggagggtcttaaagcgtttttagagcgtcttgaatttggttcgctcttgcatgaattcggccttttagaaagcccgttactggccgaagaagcaccttggccaccgcccgagggcgcgtttttaggttaccgtttgagtcgcccggaaccgatgtgggccgaattactggctcttgcagcgtctgcccagggacgtgtgtatcgcgcggaagaccctcatggtgcgctccgcggcctcttcgaagtccgtggactccttgccaaagacttagctgttgttgcattgcgcgaaggtcttgatttacctccgactgatgatccaatgcttcttgcgtacctcttggacccgtcaaacacgacgcccgaaggcgtagcccgtcgttacggcggcgagtggaccgaagatgcagcgaaacgcgcgttattggccgaacgtttgcacgccaatttattaggacgtttgcaaggcgaggaacgtctcctctggctttacgaagaagtggagaaaccattgagtcgcgtgctcgcgcatatggaagctaccggtgtcaaattagacgtggcgtatttggagaatctcagccttgaagttgctgcccacatgcgccgcttggaggaagaagtattccgtttagcaggccgttcctttcgccttaactctcgcgatcagttagaacgtgtgttgttcgatgaacttggtctccctcctatcggcaagacagagaagaccggtaaacgtagcacttcagcggcggttttagaagctcttcgcgaagtccatcccattgtggacaagatcttgcagtaccgcgaactcgcgaaattgaaaggcacctatattgaccgtcttccggcattagtccacccgaaaacgggacgcctccatacccgcttcaaccaaacagccacggcgaccggtcgtttgtcctcctctgatccaaaccttcagaatattccagtacgtaccccattgggccagaagatccgccgtgcgtttgtagctgaggagggttggcgtttagtggccctcgattatcgtcaaattgaattacgtgtccttgcccatctttctggcgatgagaacctcatccgcgtgtttcaggaaggcaaagacattcacactcaaacggcaagctgggtgtttggattatcagctgaagcgatcgatcctttgatgcgtcgtgcagcgaagaccatcaatttcggtgttctctacggtatgagtgcctttcgtttgtcgcaggaattaggcattccctatgaagaagctcaggcgttcattcagaaatactttcaaagctatcccaaagttaaagcatggatcgagaagactctccgtgaaggccgcacacgtggttacgtagagaccttatttggacgtcgccgctatgttcccgatttaaacgctcgcgtgaaaggcaagcgtgaagccgccgaacgcatggcgttcaacatgcctgtacagggcacggcagctgacctcatgaaacttgcaatggtgcgcctttttccacaattgcgtgaagttggtgcccgcatgctcttgcaggtccacgatgaactcttgttagaagcgccaaaagagcgtgcggaagaggtggcagccctcgcgaaagaagttatggaaggcgtgtggcccttagcggtgcctcttgaagtcgaagttggtattggcgaggattggctggctgccaaagga

SEQ ID NO: 4748 - protein, 841 aa, synthetic construct
  REGION 1..841: note = Variant of DNA polymerase I from Thermus sp. strain 2.9
MHHHHHHGGSGVLPVFEPKGRVLLVDGHHLAYRNFFALKGLTTSLGEPVQGVYGFAKSLLKALKEDGDVVIVVFDAKAPSFRHEAYEAYKAGRAPTPEDFPRQLALMKELVDLLGLERLEVPGFEADDVLATLAKKAEREGYEVQILTADRDLFQLLSPRISVLHPEGHRITPEWLWEKYGLRPEQWVDFRALAGDPSDNIPGVKGIGEKTALKLLKEWGSLENLLKNLDQVKPESVREKILAHLEDLKLSRELSRVRTDLPLEVDFGRRREPDWEGLKAFLERLEFGSLLHEFGLLESPLLAEEAPWPPPEGAFLGYRLSRPEPMWAELLALAASAQGRVYRAEDPHGALRGLFEVRGLLAKDLAVVALREGLDLPPTDDPMLLAYLLDPSNTTPEGVARRYGGEWTEDAAKRALLAERLHANLLGRLQGEERLLWLYEEVEKPLSRVLAHMEATGVKLDVAYLENLSLEVAAHMRRLEEEVFRLAGRSFRLNSRDQLERVLFDELGLPPIGKTEKTGKRSTSAAVLEALREVHPIVDKILQYRELAKLKGTYIDRLPALVHPKTGRLHTRFNQTATATGRLSSSDPNLQNIPVRTPLGQKIRRAFVAEEGWRLVALDYRQIELRVLAHLSGDENLIRVFQEGKDIHTQTASWVFGLSAEAIDPLMRRAAKTINFGVLYGMSAFRLSQELGIPYEEAQAFIQKYFQSYPKVKAWIEKTLREGRTRGYVETLFGRRRYVPDLNARVKGKREAAERMAFNMPVQGTAADLMKLAMVRLFPQLREVGARMLLQVHDELLLEAPKERAEEVAALAKEVMEGVWPLAVPLEVEVGIGEDWLAAKG

SEQ ID NO: 4749 - DNA, 2523 bp, synthetic construct
  misc_feature 1..2523: note = Variant of DNA polymerase I from Thermus sp. strain 2.9
  source 1..2523: mol_type = other DNA
atgcaccatcatcatcatcatggcggtagcggcgtgttaccggtgttcgagcctaaaggtcgcgtgcttctggttgatggccatcatctcgcgtatcgtaacttctttgccctgaaaggattaaccaccagcctgggcgagccggtacagggtgtctacggctttgcaaagtcgctcctgaaagctctgaaagaagacggtgatgtggtgattgttgtctttgatgcgaaagcgccaagttttcgccacgaagcgtacgaagcttacaaagccgggcgtgctccaacgccggaagactttcctcgccaattggcgcttatgaaggaattagtggatttgcttggcctcgaacgcttggaagttcccggtttcgaggcagacgacgtattagcgactctcgcaaagaaagccgaacgtgagggctatgaagtccagatcttgacagcagatcgcgatcttttccagcttttatctccgcgcatctcggtgttacacccggaagggcatcgtatcaccccggaatggctctgggagaaatatggtttgcgtcccgaacaatgggtggattttcgcgccttagcaggcgatccgagcgacaatattccgggagttaaaggtatcggcgagaagacggcgctcaagctccttaaagaatgggggtcgttggagaacttgcttaagaatttagatcaggtcaaaccagagtcagtgcgtgagaagattcttgctcacctcgaagacctcaaattaagccgcgaattgtcccgtgtacgcaccgatttgccgctcgaagttgatttcggtcgccgccgcgaacctgactgggagggtcttaaagcgtttttagagcgtcttgaatttggttcgctcttgcatgaattcggccttttagaaagcccgttactggccgaagaagcaccttggccaccgcccgagggcgcgtttttaggttaccgtttgagtcgcccggaaccgatgtgggccgaattactggctcttgcagcgtctgcccagggacgtgtgtatcgcgcggaagaccctcatggtgcgctccgcggcctcttcgaagtccgtggactccttgccaaagacttagctgttgttgcattgcgcgaaggtcttgatttacctccgactgatgatccaatgcttcttgcgtacctcttggacccgtcaaacacgacgcccgaaggcgtagcccgtcgttacggcggcgagtggaccgaagatgcagcgaaacgcgcgttattggccgaacgtttgcacgccaatttattaggacgtttgcaaggcgaggaacgtctcctctggctttacgaagaagtggagaaaccattgagtcgcgtgctcgcgcatatggaagctaccggtgtcaaattagacgtggcgtatttggagaatctcagccttgaagttgctgcccacatgcgccgcttggaggaagaagtattccgtttagcaggccgttcctttcgccttaactctcgcgatcagttagaacgtgtgttgttcgatgaacttggtctccctcctatcggcaagacagagaagaccggtaaacgtagcacttcagcggcggttttagaagctcttcgcgaagtccatcccattgtggacaagatcttgcagtaccgcgaactcgcgaaattgaaaggcacctatattgaccgtcttccggcattagtccacccgaaaacgggacgcctccatacccgcttcaaccaaacagccacggcgaccggtcgtttgtcctcctctgatccaaaccttcagaatattccagtacgtaccccattgggccttaagatccgccgtgcgtttgtagctgaggagggttggcgtttagtggccctcgattatcgtcaaattgaattacgtgtccttgcccatctttctggcgatgagaacctcatccgcgtgtttcaggaaggcaaagacattcacactcaaacggcaagctggatgtttggattatcagctgaagcgatcgatcctttgatgcgtcgtgcagcgaagaccatcaatttcggtgttctctacggtatgagtgcctttcgtttgtcgcaggaattaggcattccctatgaagaagctcaggcgttcattcagaaatactttcaaagctatcccaaagttaaagcatggatcgagaagactctccgtgaaggccgcacacgtggttacgtagagaccttatttggacgtcgccgctatgttcccgatttaaacgctcgcgtgaaaggcaagcgtgaagccgccgaacgcatggcgttcaacatgcctgtacagggcacggcagctgacctcatgaaacttgcaatggtgcgcctttttccacaattgcgtgaagttggtgcccgcatgctcttgcaggtccacgatgaactcttgttagaagcgccaaaagagcgtgcggaagaggtggcagccctcgcgaaagaagttatggaaggcgtgtggcccttagcggtgcctcttgaagtcgaagttggtattggcgaggattggctggctgccaaagga

SEQ ID NO: 4750 - protein, 841 aa, synthetic construct
  REGION 1..841: note = Variant of DNA polymerase I from Thermus sp. strain 2.9
MHHHHHHGGSGVLPVFEPKGRVLLVDGHHLAYRNFFALKGLTTSLGEPVQGVYGFAKSLLKALKEDGDVVIVVFDAKAPSFRHEAYEAYKAGRAPTPEDFPRQLALMKELVDLLGLERLEVPGFEADDVLATLAKKAEREGYEVQILTADRDLFQLLSPRISVLHPEGHRITPEWLWEKYGLRPEQWVDFRALAGDPSDNIPGVKGIGEKTALKLLKEWGSLENLLKNLDQVKPESVREKILAHLEDLKLSRELSRVRTDLPLEVDFGRRREPDWEGLKAFLERLEFGSLLHEFGLLESPLLAEEAPWPPPEGAFLGYRLSRPEPMWAELLALAASAQGRVYRAEDPHGALRGLFEVRGLLAKDLAVVALREGLDLPPTDDPMLLAYLLDPSNTTPEGVARRYGGEWTEDAAKRALLAERLHANLLGRLQGEERLLWLYEEVEKPLSRVLAHMEATGVKLDVAYLENLSLEVAAHMRRLEEEVFRLAGRSFRLNSRDQLERVLFDELGLPPIGKTEKTGKRSTSAAVLEALREVHPIVDKILQYRELAKLKGTYIDRLPALVHPKTGRLHTRFNQTATATGRLSSSDPNLQNIPVRTPLGLKIRRAFVAEEGWRLVALDYRQIELRVLAHLSGDENLIRVFQEGKDIHTQTASWMFGLSAEAIDPLMRRAAKTINFGVLYGMSAFRLSQELGIPYEEAQAFIQKYFQSYPKVKAWIEKTLREGRTRGYVETLFGRRRYVPDLNARVKGKREAAERMAFNMPVQGTAADLMKLAMVRLFPQLREVGARMLLQVHDELLLEAPKERAEEVAALAKEVMEGVWPLAVPLEVEVGIGEDWLAAKG

SEQ ID NO: 4751 - DNA, 2523 bp, synthetic construct
  misc_feature 1..2523: note = Variant of DNA polymerase I from Thermus sp. strain 2.9
  source 1..2523: mol_type = other DNA
atgcaccatcatcatcatcatggcggtagcggcgtgttaccggtgttcgagcctaaaggtcgcgtgcttctggttgatggccatcatctcgcgtatcgtaacttctttgccctgaaaggattaaccaccagcctgggcgagccggtacagggtgtctacggctttgcaaagtcgctcctgaaagctctgaaagaagacggtgatgtggtgattgttgtctttgatgcgaaagcgccaagttttcgccacgaagcgtacgaagcttacaaagccgggcgtgctccaacgccggaagactttcctcgccaattggcgcttatgaaggaattagtggatttgcttggcctcgaacgcttggaagttcccggtttcgaggcagacgacgtattagcgactctcgcaaagaaagccgaacgtgagggctatgaagtccagatcttgacagcagatcgcgatcttttccagcttttatctccgcgcatctcggtgttacacccggaagggcatcgtatcaccccggaatggctctgggagaaatatggtttgcgtcccgaacaatgggtggattttcgcgccttagcaggcgatccgagcgacaatattccgggagttaaaggtatcggcgagaagacggcgctcaagctccttaaagaatgggggtcgttggagaacttgcttaagaatttagatcaggtcaaaccagagtcagtgcgtgagaagattcttgctcacctcgaagacctcaaattaagccgcgaattgtcccgtgtacgcaccgatttgccgctcgaagttgatttcggtcgccgccgcgaacctgactgggagggtcttaaagcgtttttagagcgtcttgaatttggttcgctcttgcatgaattcggccttttagaaagcccgttactggccgaagaagcaccttggccaccgcccgagggcgcgtttttaggttaccgtttgagtcgcccggaaccgatgtgggccgaattactggctcttgcagcgtctgcccagggacgtgtgtatcgcgcggaagaccctcatggtgcgctccgcggcctcttcgaagtccgtggactccttgccaaagacttagctgttgttgcattgcgcgaaggtcttgatttacctccgactgatgatccaatgcttcttgcgtacctcttggacccgtcaaacacgacgcccgaaggcgtagcccgtcgttacggcggcgagtggaccgaagatgcagcgaaacgcgcgttattggccgaacgtttgcacgccaatttattaggacgtttgcaaggcgaggaacgtctcctctggctttacgaagaagtggagaaaccattgagtcgcgtgctcgcgcatatggaagctaccggtgtcaaattagacgtggcgtatttggagaatctcagccttgaagttgctgcccacatgcgccgcttggaggaagaagtattccgtttagcaggccgttcctttcgccttaactctcgcgatcagttagaacgtgtgttgttcgatgaacttggtctccctcctatcggcaagacagagaagaccggtaaacgtagcacttcagcggcggttttagaagctcttcgcgaagtccatcccattgtggacaagatcttgcagtaccgcgaactcgcgaaattgaaaggcacctatattgaccgtcttccggcattagtccacccgaaaacgggacgcctccatacccgcttcaaccaaacagccacggcgaccggtcgtttgtcctcctctgatccaaaccttcagaatattccagtacgtaccccattgggccagaagatccgccgtgcgtttgtagctgaggagggttggcgtttagtggccctcgattatcgtcaaattgaattacgtgtccttgcccatctttctggcgatgagaacctcatccgcgtgtttcaggaaggcaaagacattcacactcaaacggcaagctggatgtttggattatcagctgaagcgatcgatcctttgatgcgtcgtgcagcgaagaccatcaatttcggtgttctctacggtatgagtgcctttcgtttgtcgcaggaattaggcattccctatgaaggggctcaggcgttcattcagaaatactttcaaagctatcccaaagttaaagcatggatcgagaagactctccgtgaaggccgcacacgtggttacgtagagaccttatttggacgtcgccgctatgttcccgatttaaacgctcgcgtgaaaggcaagcgtgaagccgccgaacgcatggcgttcaacatgcctgtacagggcacggcagctgacctcatgaaacttgcaatggtgcgcctttttccacaattgcgtgaagttggtgcccgcatgctcttgcaggtccacgatgaactcttgttagaagcgccaaaagagcgtgcggaagaggtggcagccctcgcgaaagaagttatggaaggcgtgtggcccttagcggtgcctcttgaagtcgaagttggtattggcgaggattggctggctgccaaagga

SEQ ID NO: 4752 - protein, 841 aa, synthetic construct
  REGION 1..841: note = Variant of DNA polymerase I from Thermus sp. strain 2.9
MHHHHHHGGSGVLPVFEPKGRVLLVDGHHLAYRNFFALKGLTTSLGEPVQGVYGFAKSLLKALKEDGDVVIVVFDAKAPSFRHEAYEAYKAGRAPTPEDFPRQLALMKELVDLLGLERLEVPGFEADDVLATLAKKAEREGYEVQILTADRDLFQLLSPRISVLHPEGHRITPEWLWEKYGLRPEQWVDFRALAGDPSDNIPGVKGIGEKTALKLLKEWGSLENLLKNLDQVKPESVREKILAHLEDLKLSRELSRVRTDLPLEVDFGRRREPDWEGLKAFLERLEFGSLLHEFGLLESPLLAEEAPWPPPEGAFLGYRLSRPEPMWAELLALAASAQGRVYRAEDPHGALRGLFEVRGLLAKDLAVVALREGLDLPPTDDPMLLAYLLDPSNTTPEGVARRYGGEWTEDAAKRALLAERLHANLLGRLQGEERLLWLYEEVEKPLSRVLAHMEATGVKLDVAYLENLSLEVAAHMRRLEEEVFRLAGRSFRLNSRDQLERVLFDELGLPPIGKTEKTGKRSTSAAVLEALREVHPIVDKILQYRELAKLKGTYIDRLPALVHPKTGRLHTRFNQTATATGRLSSSDPNLQNIPVRTPLGQKIRRAFVAEEGWRLVALDYRQIELRVLAHLSGDENLIRVFQEGKDIHTQTASWMFGLSAEAIDPLMRRAAKTINFGVLYGMSAFRLSQELGIPYEGAQAFIQKYFQSYPKVKAWIEKTLREGRTRGYVETLFGRRRYVPDLNARVKGKREAAERMAFNMPVQGTAADLMKLAMVRLFPQLREVGARMLLQVHDELLLEAPKERAEEVAALAKEVMEGVWPLAVPLEVEVGIGEDWLAAKG

SEQ ID NO: 4753 - DNA, 2523 bp, synthetic construct
  misc_feature 1..2523: note = Variant of DNA polymerase I from Thermus sp. strain 2.9
  source 1..2523: mol_type = other DNA
atgcaccatcatcatcatcatggcggtagcggcgtgttaccggtgttcgagcctaaaggtcgcgtgcttctggttgatggccatcatctcgcgtatcgtaacttctttgccctgaaaggattaaccaccagcctgggcgagccggtacagggtgtctacggctttgcaaagtcgctcctgaaagctctgaaagaagacggtgatgtggtgattgttgtctttgatgcgaaagcgccaagttttcgccacgaagcgtacgaagcttacaaagccgggcgtgctccaacgccggaagactttcctcgccaattggcgcttatgaaggaattagtggatttgcttggcctcgaacgcttggaagttcccggtttcgaggcagacgacgtattagcgactctcgcaaagaaagccgaacgtgagggctatgaagtccagatcttgacagcagatcgcgatcttttccagcttttatctccgcgcatctcggtgttacacccggaagggcatcgtatcaccccggaatggctctgggagaaatatggtttgcgtcccgaacaatgggtggattttcgcgccttagcaggcgatccgagcgacaatattccgggagttaaaggtatcggcgagaagacggcgctcaagctccttaaagaatgggggtcgttggagaacttgcttaagaatttagatcaggtcaaaccagagtcagtgcgtgagaagattcttgctcacctcgaagacctcaaattaagccgcgaattgtcccgtgtacgcaccgatttgccgctcgaagttgatttcggtcgccgccgcgaacctgactgggagggtcttaaagcgtttttagagcgtcttgaatttggttcgctcttgcatgaattcggccttttagaaagcccgttactggccgaagaagcaccttggccaccgcccgagggcgcgtttttaggttaccgtttgagtcgcccggaaccgatgtgggccgaattactggctcttgcagcgtctgcccagggacgtgtgtatcgcgcggaagaccctcatggtgcgctccgcggcctcttcgaagtccgtggactccttgccaaagacttagctgttgttgcattgcgcgaaggtcttgatttacctccgactgatgatccaatgcttcttgcgtacctcttggacccgtcaaacacgacgcccgaaggcgtagcccgtcgttacggcggcgagtggaccgaagatgcagcgaaacgcgcgttattggccgaacgtttgcacgccaatttattaggacgtttgcaaggcgaggaacgtctcctctggctttacgaagaagtggagaaaccattgagtcgcgtgctcgcgcatatggaagctaccggtgtcaaattagacgtggcgtatttggagaatctcagccttgaagttgctgcccacatgcgccgcttggaggaagaagtattccgtttagcaggccgttcctttcgccttaactctcgcgatcagttagaacgtgtgttgttcgatgaacttggtctccctcctatcggcaagacagagaagaccggtaaacgtagcacttcagcggcggttttagaagctcttcgcgaagtccatcccattgtggacaagatcttgcagtaccgcgaactcgcgaaattgaaaggcacctatattgaccgtcttccggcattagtccacccgaaaacgggacgcctccatacccgcttcaaccaaacagccacggcgaccggtcgtttgtcctcctctgatccaaaccttcagaatattccagtacgtaccccattgggccagaagatccgccgtgcgtttgtagctgaggagggttggcgtttagtggccctcgattatcgtcaaattgaattacgtgtccttgcccatctttctggcgatgagaacctcatccgcgtgtttcagggtggcaaagacattcacactcaaacggcaagctggatgtttggattatcagctgaagcgatcgatcctttgatgcgtcgtgcagcgaagaccatcaatttcggtgttctctacggtatgagtgcctttcgtttgtcgcaggaattaggcattccctatgaagaagctcaggcgttcattcagaaatactttcaaagctatcccaaagttaaagcatggatcgagaagactctccgtgaaggccgcacacgtggttacgtagagaccttatttggacgtcgccgctatgttcccgatttaaacgctcgcgtgaaaggcaagcgtgaagccgccgaacgcatggcgttcaacatgcctgtacagggcacggcagctgacctcatgaaacttgcaatggtgcgcctttttccacaattgcgtgaagttggtgcccgcatgctcttgcaggtccacgatgaactcttgttagaagcgccaaaagagcgtgcggaagaggtggcagccctcgcgaaagaagttatggaaggcgtgtggcccttagcggtgcctcttgaagtcgaagttggtattggcgaggattggctggctgccaaagga

SEQ ID NO: 4754 - protein, 841 aa, synthetic construct
  REGION 1..841: note = Variant of DNA polymerase I from Thermus sp. strain 2.9
MHHHHHHGGSGVLPVFEPKGRVLLVDGHHLAYRNFFALKGLTTSLGEPVQGVYGFAKSLLKALKEDGDVVIVVFDAKAPSFRHEAYEAYKAGRAPTPEDFPRQLALMKELVDLLGLERLEVPGFEADDVLATLAKKAEREGYEVQILTADRDLFQLLSPRISVLHPEGHRITPEWLWEKYGLRPEQWVDFRALAGDPSDNIPGVKGIGEKTALKLLKEWGSLENLLKNLDQVKPESVREKILAHLEDLKLSRELSRVRTDLPLEVDFGRRREPDWEGLKAFLERLEFGSLLHEFGLLESPLLAEEAPWPPPEGAFLGYRLSRPEPMWAELLALAASAQGRVYRAEDPHGALRGLFEVRGLLAKDLAVVALREGLDLPPTDDPMLLAYLLDPSNTTPEGVARRYGGEWTEDAAKRALLAERLHANLLGRLQGEERLLWLYEEVEKPLSRVLAHMEATGVKLDVAYLENLSLEVAAHMRRLEEEVFRLAGRSFRLNSRDQLERVLFDELGLPPIGKTEKTGKRSTSAAVLEALREVHPIVDKILQYRELAKLKGTYIDRLPALVHPKTGRLHTRFNQTATATGRLSSSDPNLQNIPVRTPLGQKIRRAFVAEEGWRLVALDYRQIELRVLAHLSGDENLIRVFQGGKDIHTQTASWMFGLSAEAIDPLMRRAAKTINFGVLYGMSAFRLSQELGIPYEEAQAFIQKYFQSYPKVKAWIEKTLREGRTRGYVETLFGRRRYVPDLNARVKGKREAAERMAFNMPVQGTAADLMKLAMVRLFPQLREVGARMLLQVHDELLLEAPKERAEEVAALAKEVMEGVWPLAVPLEVEVGIGEDWLAAKG

SEQ ID NO: 4755 - DNA, 2523 bp, synthetic construct
  misc_feature 1..2523: note = Variant of DNA polymerase I from Thermus sp. strain 2.9
  source 1..2523: mol_type = other DNA
atgcaccatcatcatcatcatggcggtagcggcgtgttaccggtgttcgagcctaaaggtcgcgtgcttctggttgatggccatcatctcgcgtatcgtaacttctttgccctgaaaggattaaccaccagcctgggcgagccggtacagggtgtctacggctttgcaaagtcgctcctgaaagctctgaaagaagacggtgatgtggtgattgttgtctttgatgcgaaagcgccaagttttcgccacgaagcgtacgaagcttacaaagccgggcgtgctccaacgccggaagactttcctcgccaattggcgcttatgaaggaattagtggatttgcttggcctcgaacgcttggaagttcccggtttcgaggcagacgacgtattagcgactctcgcaaagaaagccgaacgtgagggctatgaagtccagatcttgacagcagatcgcgatcttttccagcttttatctccgcgcatctcggtgttacacccggaagggcatcgtatcaccccggaatggctctgggagaaatatggtttgcgtcccgaacaatgggtggattttcgcgccttagcaggcgatccgagcgacaatattccgggagttaaaggtatcggcgagaagacggcgctcaagctccttaaagaatgggggtcgttggagaacttgcttaagaatttagatcaggtcaaaccagagtcagtgcgtgagaagattcttgctcacctcgaagacctcaaattaagccgcgaattgtcccgtgtacgcaccgatttgccgctcgaagttgatttcggtcgccgccgcgaacctgactgggagggtcttaaagcgtttttagagcgtcttgaatttggttcgctcttgcatgaattcggccttttagaaagcccgttactggccgaagaagcaccttggccaccgcccgagggcgcgtttttaggttaccgtttgagtcgcccggaaccgatgtgggccgaattactggctcttgcagcgtctgcccagggacgtgtgtatcgcgcggaagaccctcatggtgcgctccgcggcctcttcgaagtccgtggactccttgccaaagacttagctgttgttgcattgcgcgaaggtcttgatttacctccgactgatgatccaatgcttcttgcgtacctcttggacccgtcaaacacgacgcccgaaggcgtagcccgtcgttacggcggcgagtggaccgaagatgcagcgaaacgcgcgttattggccgaacgtttgcacgccaatttattaggacgtttgcaaggcgaggaacgtctcctctggctttacgaagaagtggagaaaccattgagtcgcgtgctcgcgcatatggaagctaccggtgtcaaattagacgtggcgtatttggagaatctcagccttgaagttgctgcccacatgcgccgcttggaggaagaagtattccgtttagcaggccgttcctttcgccttaactctcgcgatcagttagaacgtgtgttgttcgatgaacttggtctccctcctatcggcaagacagagaagaccggtaaacgtagcacttcagcggcggttttagaagctcttcgcgaagtccatcccattgtggacaagatcttgcagtaccgcgaactcgcgaaattgaaaggcacctatattgaccgtcttccggcattagtccacccgaaaacgggacgcctcagtacccgcttcaaccaaacagccacggcgaccggtcgtttgtcctcctctgatccaaaccttcagaatattccagtacgtaccccattgggccagaagatccgccgtgcgtttgtagctgaggagggttggcgtttagtggccctcgattatcgtcaaattgaattacgtgtccttgcccatctttctggcgatgagaacctcatccgcgtgtttcaggaaggcaaagacattcacactcaaacggcaagctggatgtttggattatcagctgaagcgatcgatcctttgatgcgtcgtgcagcgaagaccatcaatttcggtgttctctacggtatgagtgcctttcgtttgtcgcaggaattaggcattccctatgaagaagctcaggcgttcattcagaaatactttcaaagctatcccaaagttaaagcatggatcgagaagactctccgtgaaggccgcacacgtggttacgtagagaccttatttggacgtcgccgctatgttcccgatttaaacgctcgcgtgaaaggcaagcgtgaagccgccgaacgcatggcgttcaacatgcctgtacagggcacggcagctgacctcatgaaacttgcaatggtgcgcctttttccacaattgcgtgaagttggtgcccgcatgctcttgcaggtccacgatgaactcttgttagaagcgccaaaagagcgtgcggaagaggtggcagccctcgcgaaagaagttatggaaggcgtgtggcccttagcggtgcctcttgaagtcgaagttggtattggcgaggattggctggctgccaaagga

SEQ ID NO: 4756 - protein, 841 aa, synthetic construct
  REGION 1..841: note = Variant of DNA polymerase I from Thermus sp. strain 2.9
MHHHHHHGGSGVLPVFEPKGRVLLVDGHHLAYRNFFALKGLTTSLGEPVQGVYGFAKSLLKALKEDGDVVIVVFDAKAPSFRHEAYEAYKAGRAPTPEDFPRQLALMKELVDLLGLERLEVPGFEADDVLATLAKKAEREGYEVQILTADRDLFQLLSPRISVLHPEGHRITPEWLWEKYGLRPEQWVDFRALAGDPSDNIPGVKGIGEKTALKLLKEWGSLENLLKNLDQVKPESVREKILAHLEDLKLSRELSRVRTDLPLEVDFGRRREPDWEGLKAFLERLEFGSLLHEFGLLESPLLAEEAPWPPPEGAFLGYRLSRPEPMWAELLALAASAQGRVYRAEDPHGALRGLFEVRGLLAKDLAVVALREGLDLPPTDDPMLLAYLLDPSNTTPEGVARRYGGEWTEDAAKRALLAERLHANLLGRLQGEERLLWLYEEVEKPLSRVLAHMEATGVKLDVAYLENLSLEVAAHMRRLEEEVFRLAGRSFRLNSRDQLERVLFDELGLPPIGKTEKTGKRSTSAAVLEALREVHPIVDKILQYRELAKLKGTYIDRLPALVHPKTGRLSTRFNQTATATGRLSSSDPNLQNIPVRTPLGQKIRRAFVAEEGWRLVALDYRQIELRVLAHLSGDENLIRVFQEGKDIHTQTASWMFGLSAEAIDPLMRRAAKTINFGVLYGMSAFRLSQELGIPYEEAQAFIQKYFQSYPKVKAWIEKTLREGRTRGYVETLFGRRRYVPDLNARVKGKREAAERMAFNMPVQGTAADLMKLAMVRLFPQLREVGARMLLQVHDELLLEAPKERAEEVAALAKEVMEGVWPLAVPLEVEVGIGEDWLAAKG

SEQ ID NO: 4757 - DNA, 2523 bp, synthetic construct
  misc_feature 1..2523: note = Variant of DNA polymerase I from Thermus sp. strain 2.9
  source 1..2523: mol_type = other DNA
atgcaccatcatcatcatcatggcggtagcggcgtgttaccggtgttcgagcctaaaggtcgcgtgcttctggttgatggccatcatctcgcgtatcgtaacttctttgccctgaaaggattaaccaccagcctgggcgagccggtacagggtgtctacggctttgcaaagtcgctcctgaaagctctgaaagaagacggtgatgtggtgattgttgtctttgatgcgaaagcgccaagttttcgccacgaagcgtacgaagcttacaaagccgggcgtgctccaacgccggaagactttcctcgccaattggcgcttatgaaggaattagtggatttgcttggcctcgaacgcttggaagttcccggtttcgaggcagacgacgtattagcgactctcgcaaagaaagccgaacgtgagggctatgaagtccagatcttgacagcagatcgcgatcttttccagcttttatctccgcgcatctcggtgttacacccggaagggcatcgtatcaccccggaatggctctgggagaaatatggtttgcgtcccgaacaatgggtggattttcgcgccttagcaggcgatccgagcgacaatattccgggagttaaaggtatcggcgagaagacggcgctcaagctccttaaagaatgggggtcgttggagaacttgcttaagaatttagatcaggtcaaaccagagtcagtgcgtgagaagattcttgctcacctcgaagacctcaaattaagccgcgaattgtcccgtgtacgcaccgatttgccgctcgaagttgatttcggtcgccgccgcgaacctgactgggagggtcttaaagcgtttttagagcgtcttgaatttggttcgctcttgcatgaattcggccttttagaaagcccgttactggccgaagaagcaccttggccaccgcccgagggcgcgtttttaggttaccgtttgagtcgcccggaaccgatgtgggccgaattactggctcttgcagcgtctgcccagggacgtgtgtatcgcgcggaagaccctcatggtgcgctccgcggcctcttcgaagtccgtggactccttgccaaagacttagctgttgttgcattgcgcgaaggtcttgatttacctccgactgatgatccaatgcttcttgcgtacctcttggacccgtcaaacacgacgcccgaaggcgtagcccgtcgttacggcggcgagtggaccgaagatgcagcgaaacgcgcgttattggccgaacgtttgcacgccaatttattaggacgtttgcaaggcgaggaacgtctcctctggctttacgaagaagtggagaaaccattgagtcgcgtgctcgcgcatatggaagctaccggtgtcaaattagacgtggcgtatttggagaatctcagccttgaagttgctgcccacatgcgccgcttggaggaagaagtattccgtttagcaggccgttcctttcgccttaactctcgcgatcagttagaacgtgtgttgttcgatgaacttggtctccctcctatcggcaagacagagaagaccggtaaacgtagcacttcagcggcggttttagaagctcttcgcgaagtccatcccattgtggacaagatcttgcagtaccgcgaactcgcgaaattgaaaggcacctatattgaccgtcttccggcattagtccacccgaaaacgggacgcctccatacccgcttcaaccaaacagccacggcgaccggtcgtttgtcctcctctgatccaaaccttcagaatattccagtacgtaccccattgggccagaagatccgccgtgcgtttgtagctgaggagggttggcgttatgtggccctcgattatcgtcaaattgaattacgtgtccttgcccatctttctggcgatgagaacctcatccgcgtgtttcaggaaggcaaagacattcacactcaaacggcaagctggatgtttggattatcagctgaagcgatcgatcctttgatgcgtcgtgcagcgaagaccatcaatttcggtgttctctacggtatgagtgcctttcgtttgtcgcaggaattaggcattccctatgaagaagctcaggcgttcattcagaaatactttcaaagctatcccaaagttaaagcatggatcgagaagactctccgtgaaggccgcacacgtggttacgtagagaccttatttggacgtcgccgctatgttcccgatttaaacgctcgcgtgaaaggcaagcgtgaagccgccgaacgcatggcgttcaacatgcctgtacagggcacggcagctgacctcatgaaacttgcaatggtgcgcctttttccacaattgcgtgaagttggtgcccgcatgctcttgcaggtccacgatgaactcttgttagaagcgccaaaagagcgtgcggaagaggtggcagccctcgcgaaagaagttatggaaggcgtgtggcccttagcggtgcctcttgaagtcgaagttggtattggcgaggattggctggctgccaaagga

SEQ ID NO: 4758 - protein, 841 aa, synthetic construct
  REGION 1..841: note = Variant of DNA polymerase I from Thermus sp. strain 2.9
MHHHHHHGGSGVLPVFEPKGRVLLVDGHHLAYRNFFALKGLTTSLGEPVQGVYGFAKSLLKALKEDGDVVIVVFDAKAPSFRHEAYEAYKAGRAPTPEDFPRQLALMKELVDLLGLERLEVPGFEADDVLATLAKKAEREGYEVQILTADRDLFQLLSPRISVLHPEGHRITPEWLWEKYGLRPEQWVDFRALAGDPSDNIPGVKGIGEKTALKLLKEWGSLENLLKNLDQVKPESVREKILAHLEDLKLSRELSRVRTDLPLEVDFGRRREPDWEGLKAFLERLEFGSLLHEFGLLESPLLAEEAPWPPPEGAFLGYRLSRPEPMWAELLALAASAQGRVYRAEDPHGALRGLFEVRGLLAKDLAVVALREGLDLPPTDDPMLLAYLLDPSNTTPEGVARRYGGEWTEDAAKRALLAERLHANLLGRLQGEERLLWLYEEVEKPLSRVLAHMEATGVKLDVAYLENLSLEVAAHMRRLEEEVFRLAGRSFRLNSRDQLERVLFDELGLPPIGKTEKTGKRSTSAAVLEALREVHPIVDKILQYRELAKLKGTYIDRLPALVHPKTGRLHTRFNQTATATGRLSSSDPNLQNIPVRTPLGQKIRRAFVAEEGWRYVALDYRQIELRVLAHLSGDENLIRVFQEGKDIHTQTASWMFGLSAEAIDPLMRRAAKTINFGVLYGMSAFRLSQELGIPYEEAQAFIQKYFQSYPKVKAWIEKTLREGRTRGYVETLFGRRRYVPDLNARVKGKREAAERMAFNMPVQGTAADLMKLAMVRLFPQLREVGARMLLQVHDELLLEAPKERAEEVAALAKEVMEGVWPLAVPLEVEVGIGEDWLAAKG

SEQ ID NO: 4759 - DNA, 2523 bp, synthetic construct
  misc_feature 1..2523: note = Variant of DNA polymerase I from Thermus sp. strain 2.9
  source 1..2523: mol_type = other DNA
atgcaccatcatcatcatcatggcggtagcggcgtgttaccggtgttcgagcctaaaggtcgcgtgcttctggttgatggccatcatctcgcgtatcgtaacttctttgccctgaaaggattaaccaccagcctgggcgagccggtacagggtgtctacggctttgcaaagtcgctcctgaaagctctgaaagaagacggtgatgtggtgattgttgtctttgatgcgaaagcgccaagttttcgccacgaagcgtacgaagcttacaaagccgggcgtgctccaacgccggaagactttcctcgccaattggcgcttatgaaggaattagtggatttgcttggcctcgaacgcttggaagttcccggtttcgaggcagacgacgtattagcgactctcgcaaagaaagccgaacgtgagggctatgaagtccagatcttgacagcagatcgcgatcttttccagcttttatctccgcgcatctcggtgttacacccggaagggcatcgtatcaccccggaatggctctgggagaaatatggtttgcgtcccgaacaatgggtggattttcgcgccttagcaggcgatccgagcgacaatattccgggagttaaaggtatcggcgagaagacggcgctcaagctccttaaagaatgggggtcgttggagaacttgcttaagaatttagatcaggtcaaaccagagtcagtgcgtgagaagattcttgctcacctcgaagacctcaaattaagccgcgaattgtcccgtgtacgcaccgatttgccgctcgaagttgatttcggtcgccgccgcgaacctgactgggagggtcttaaagcgtttttagagcgtcttgaatttggttcgctcttgcatgaattcggccttttagaaagcccgttactggccgaagaagcaccttggccaccgcccgagggcgcgtttttaggttaccgtttgagtcgcccggaaccgatgtgggccgaattactggctcttgcagcgtctgcccagggacgtgtgtatcgcgcggaagaccctcatggtgcgctccgcggcctcttcgaagtccgtggactccttgccaaagacttagctgttgttgcattgcgcgaaggtcttgatttacctccgactgatgatccaatgcttcttgcgtacctcttggacccgtcaaacacgacgcccgaaggcgtagcccgtcgttacggcggcgagtggaccgaagatgcagcgaaacgcgcgttattggccgaacgtttgcacgccaatttattaggacgtttgcaaggcgaggaacgtctcctctggctttacgaagaagtggagaaaccattgagtcgcgtgctcgcgcatatggaagctaccggtgtcaaattagacgtggcgtatttggagaatctcagccttgaagttgctgcccacatgcgccgcttggaggaagaagtattccgtttagcaggccgttcctttcgccttaactctcgcgatcagttagaacgtgtgttgttcgatgaacttggtctccctcctatcggcaagacagagaagaccggtaaacgtagcacttcagcggcggttttagaagctcttcgcgaagtccatcccattgtggacaagatcttgcagtaccgcgaactcgcgaaattgaaaggcacctatattgaccgtcttccggcattagtccacccgaaaacgggacgcctccatacccgcttcaaccaaacatggacggcgaccggtcgtttgtcctcctctgatccaaaccttcagaatattccagtacgtaccccattgggccagaagatccgccgtgcgtttgtagctgaggagggttggcgtttagtggccctcgattatcgtcaaattgaattacgtgtccttgcccatctttctggcgatgagaacctcatccgcgtgtttcaggaaggcaaagacattcacactcaaacggcaagctggatgtttggattatcagctgaagcgatcgatcctttgatgcgtcgtgcagcgaagaccatcaatttcggtgttctctacggtatgagtgcctttcgtttgtcgcaggaattaggcattccctatgaagaagctcaggcgttcattcagaaatactttcaaagctatcccaaagttaaagcatggatcgagaagactctccgtgaaggccgcacacgtggttacgtagagaccttatttggacgtcgccgctatgttcccgatttaaacgctcgcgtgaaaggcaagcgtgaagccgccgaacgcatggcgttcaacatgcctgtacagggcacggcagctgacctcatgaaacttgcaatggtgcgcctttttccacaattgcgtgaagttggtgcccgcatgctcttgcaggtccacgatgaactcttgttagaagcgccaaaagagcgtgcggaagaggtggcagccctcgcgaaagaagttatggaaggcgtgtggcccttagcggtgcctcttgaagtcgaagttggtattggcgaggattggctggctgccaaagga

SEQ ID NO: 4760 - protein, 841 aa, synthetic construct
  REGION 1..841: note = Variant of DNA polymerase I from Thermus sp. strain 2.9
MHHHHHHGGSGVLPVFEPKGRVLLVDGHHLAYRNFFALKGLTTSLGEPVQGVYGFAKSLLKALKEDGDVVIVVFDAKAPSFRHEAYEAYKAGRAPTPEDFPRQLALMKELVDLLGLERLEVPGFEADDVLATLAKKAEREGYEVQILTADRDLFQLLSPRISVLHPEGHRITPEWLWEKYGLRPEQWVDFRALAGDPSDNIPGVKGIGEKTALKLLKEWGSLENLLKNLDQVKPESVREKILAHLEDLKLSRELSRVRTDLPLEVDFGRRREPDWEGLKAFLERLEFGSLLHEFGLLESPLLAEEAPWPPPEGAFLGYRLSRPEPMWAELLALAASAQGRVYRAEDPHGALRGLFEVRGLLAKDLAVVALREGLDLPPTDDPMLLAYLLDPSNTTPEGVARRYGGEWTEDAAKRALLAERLHANLLGRLQGEERLLWLYEEVEKPLSRVLAHMEATGVKLDVAYLENLSLEVAAHMRRLEEEVFRLAGRSFRLNSRDQLERVLFDELGLPPIGKTEKTGKRSTSAAVLEALREVHPIVDKILQYRELAKLKGTYIDRLPALVHPKTGRLHTRFNQTWTATGRLSSSDPNLQNIPVRTPLGQKIRRAFVAEEGWRLVALDYRQIELRVLAHLSGDENLIRVFQEGKDIHTQTASWMFGLSAEAIDPLMRRAAKTINFGVLYGMSAFRLSQELGIPYEEAQAFIQKYFQSYPKVKAWIEKTLREGRTRGYVETLFGRRRYVPDLNARVKGKREAAERMAFNMPVQGTAADLMKLAMVRLFPQLREVGARMLLQVHDELLLEAPKERAEEVAALAKEVMEGVWPLAVPLEVEVGIGEDWLAAKG

SEQ ID NO: 4761 - DNA, 2523 bp, synthetic construct
  misc_feature 1..2523: note = Variant of DNA polymerase I from Thermus sp. strain 2.9
  source 1..2523: mol_type = other DNA
atgcaccatcatcatcatcatggcggtagcggcgtgttaccggtgttcgagcataaaggtcgcgtgcttctggttgatggccatcatctcgcgtatcgtaacttctttgccctgaaaggattaaccaccagcctgggcgagccggtacagggtgtctacggctttgcaaagtcgctcctgaaagctctgaaagaagacggtgatgtggtgattgttgtctttgatgcgaaagcgccaagttttcgccacgaagcgtacgaagcttacaaagccgggcgtgctccaacgccggaagactttcctcgccaattggctcttatgaaggaattagtggatttgcttggcctcgaacgcttggaagttcccggtttcgaggcagacgacgtattagcgactctcgcaaagaaagccgaacgtgagggctatgaagtccagatcttgacagcagatcgcgatcttttccagcttttatctccgcgcatctcggtgttacacccggaagggcatcgtatcaccccggaatggctctgggagaaatatggtttgcgtcccgaacaatgggtggattttcgcgccttagcaggcgatccgagcgacaatattccgggagttaaaggtatcggcgagaagacggcgctcaagctccttaaagaatgggggtcgttggagaacttgcttaagaatttagatcaggtcaaaccagagtcagtgcgtgagaagattcttgctcacctcgaagacctcgagttaagccgcgaattgtcccgtgtacgcaccgatttgccgctcgaagttgatttcggtcgccgccgcgaacctgactgggagggtcttaaagcgtttttagagcgtcttgaatttggttcgctcctgcatgaattcggccttttagaaaacccgttagtggccgaagaagcaccttggccaccgcccgagggcgcgtttttaggttaccgtttgagccgcccggaaccgatgtgggccgaattactggctcttgcagcgtctgcccagggacgtgtgtatcgcgcggaagaccctcatggtgcgctccgcggcctcttcgaagtccgtggactccttgccaaagacttagctgttgttgcattgcgcgaaggtcttgatttacctccgactgatgatccaatgcttcttgcgtacctcttggacccgtcaaacacgacgcccgaaggcgtagcccgtcgttacggcggcgagtggaccgaagatgcagcgaaacgcgcgttattggccgaacgtttgcacgagaatttactgggacgtttgcaaggcgaggaacgtctcctctggctttacgaagaagtggagaaaccattgagtcgcgtgctcgcgcatatggaagctaccggtgtcaaattagacgtggcgtatttggagaatctcagccttgaagttgctgcccacatgcgccgcttggaggaagaagtattccgtttagcaggccgttcctttcgccttaactctcgcgatcagttagaacgtgtgttgttcgatgaacttggtctccctcctatcggcaagacagagaagaccggtaaacgtagcacttcagcggcggttttagatgctcttcgctgtgtccatcccattgtggacaagatcttgcagtaccgcgaactcgcgaaattgaaaggcacctatattgaccgtcttccggcattagtccacccgaaaacgggacgcctccatacccgcttcaaccaaacagccacggcgaccggtcgtttgtcctcctctgatccaaaccttcagaatattccagtacgtaccccattgggccagaagatccgccgtgcgtttgtagctgaggagggttggcgtttagtggccctcgattatcgtcaaattgaattacgtgtccttgcccatctttctggcgatgagaacctcatccgcgtgtttgaagaaggcaaagacattcacactcaaacggcaagctggatgtttggattaggcgctgaagcgatcgatcctttgatgcgtcgtgcagcgaagaagatcaatttcggtgttctctacggtatgagtgcctttcgtttgtcgcaggaattaggcattccctatgaagaagctcaggcgttcattcagaaatactttcaaagctatcccaaagttaaagcatggatcgagaagactctccgtgaaggccgcacacgtggttacgtagagaccttatttggacgtcgccgctatgttcccgatttaaacgctcgcgtgaaaggcaagcgtgaagccgccgaacgcatggcgttcaacatgcctgtacagggcacggcagctgacctcatgaaacttgcaatggtgcgcctttttccacaattgcgtgaagttggtgcccgcatgctcttgcaggtccacgatgaactcttgttagaagcgccaaaagagcgtgcggaagaggtggcagccctcgcgaaagaagttatggaaggcgtgtggcccttagcggtgcctcttgaagtcgaagttggtattggcgaggattggctggctgccaaagga

SEQ ID NO: 4762 - protein, 841 aa, synthetic construct
  REGION 1..841: note = Variant of DNA polymerase I from Thermus sp. strain 2.9
MHHHHHHGGSGVLPVFEHKGRVLLVDGHHLAYRNFFALKGLTTSLGEPVQGVYGFAKSLLKALKEDGDVVIVVFDAKAPSFRHEAYEAYKAGRAPTPEDFPRQLALMKELVDLLGLERLEVPGFEADDVLATLAKKAEREGYEVQILTADRDLFQLLSPRISVLHPEGHRITPEWLWEKYGLRPEQWVDFRALAGDPSDNIPGVKGIGEKTALKLLKEWGSLENLLKNLDQVKPESVREKILAHLEDLELSRELSRVRTDLPLEVDFGRRREPDWEGLKAFLERLEFGSLLHEFGLLENPLVAEEAPWPPPEGAFLGYRLSRPEPMWAELLALAASAQGRVYRAEDPHGALRGLFEVRGLLAKDLAVVALREGLDLPPTDDPMLLAYLLDPSNTTPEGVARRYGGEWTEDAAKRALLAERLHENLLGRLQGEERLLWLYEEVEKPLSRVLAHMEATGVKLDVAYLENLSLEVAAHMRRLEEEVFRLAGRSFRLNSRDQLERVLFDELGLPPIGKTEKTGKRSTSAAVLDALRCVHPIVDKILQYRELAKLKGTYIDRLPALVHPKTGRLHTRFNQTATATGRLSSSDPNLQNIPVRTPLGQKIRRAFVAEEGWRLVALDYRQIELRVLAHLSGDENLIRVFEEGKDIHTQTASWMFGLGAEAIDPLMRRAAKKINFGVLYGMSAFRLSQELGIPYEEAQAFIQKYFQSYPKVKAWIEKTLREGRTRGYVETLFGRRRYVPDLNARVKGKREAAERMAFNMPVQGTAADLMKLAMVRLFPQLREVGARMLLQVHDELLLEAPKERAEEVAALAKEVMEGVWPLAVPLEVEVGIGEDWLAAKG

SEQ ID NO: 4763 - DNA, 2523 bp, synthetic construct
  misc_feature 1..2523: note = Variant of DNA polymerase I from Thermus sp. strain 2.9
  source 1..2523: mol_type = other DNA
atgcaccatcatcatcatcatggcggtagcggcgtgttaccggtgttcgagcctaaaggtcgcgtgcttctggttgatggccatcatctcgcgtatcgtaacttctttgccctgaaaggattaaccaccagcctgggcgagccggtacagggtgtctacggctttgcaaagtcgctcctgaaagctctgaaagaagacggtgatgtggtgattgttgtctttgatgcgaaagcgccaagttttcgccacgaagcgtacgaagcttacaaagccgggcgtgctccaacgccggaagactttcctcgccaattggcgcttatgaaggaattagtggatttgcttggcctcgaacgcttggaagttcccggtttcgaggcagacgacgtattagcgactctcgcaaagaaagccgaacgtgagggctatgaagtccagatcttgacagcagatcgcgatcttttccagcttttatctccgcgcatctcggtgttacacccggaagggcatcgtatcaccccggaatggctctgggagaaatatggtttgcgtcccgaacaatgggtggattttcgcgccttagcaggcgatccgagcgacaatattccgggagttaaaggtatcggcgagaagacggcgctcaagctccttaaagaatgggggtcgttggagaacttgcttaagaatttagatcaggtcaaaccagagtcagtgcgtgagaagattcttgctcacctcgaagacctcaagttaagccgcgaattgtcccgtgtacgcaccgatttgccgctcgaagttgatttcggtcgccgccgcgaacctgactgggagggtcttaaagcgtttttagagcgtcttgaatttggttcgctccagcatgaattcggccttttagaaagcccgttagtggccgaagaagcaccttggccaccgcccgagggcgcgtttttaggttaccgtttgagtcgcccggaaccgatgtgggccgaattactggctcttgcagcgtctgcccagggacgtgtgtatcgcgcggaagaccctcatggtgcgctccgcggcctcttcgaagtccgtggactccttgccaaagacttagctgttgttgcattgcgcgaaggtcttgatttacctccgactgatgatccaatgcttcttgcgtacctcttggacccgtcaaacacgacgcccgaaggcgtagcccgtcgttacggcggcgagtggaccgaagatgcagcgaaacgcgcgttattggccgaacgtttgcacgccaatttattaggacgtttgcaaggcgaggagcgtctcctctggctttacgaagaagtggagaaaccattgagtcgcgtgctcgcgcatatggaagctaccggtgtcaaattagacgtggcgtatttggagaatctcagccttgaagttgctgcccacatgcgccgcttggaggaagaagtattccgtttagcaggccgttcctttcgccttaactctcgcgatcagttagaacgtgtgttgttcgatgaacttggtctccctcctatcggcaagacagagaagaccggtaaacgtagcacttcagcggcggttttagatgctcttcgcgaagtccatcccattgtggacaagatcttgcagtaccgcgaactcgcgaaattgaaaggcacctatattgaccgtcttccggcattagtccacccgaaaacgggacgcctccatacccgcttcaaccaaacagccacggcgaccggtcgtttgtcctcctctgatccaaaccttcagaatattccagtacgtaccccattgggccagaagatccgccgtgcgtttgtagctgaggagggttggcgtttagtggccctcgattatcgtcaaattgaattacgtgtccttgcccatctttctggcgatgagaacctcatccgcgtgtttcaggaaggcaaagacattcacactcaaacggcaagctggatgtttggattatcagctgaagcgatcgatcctttgatgcgtcgtgcagcgaagaccatcaatttcggtgttctctacggtatgagtgcctttcgtttgtcgcaggaattaggcattccctatgaagaagctcaggcgttcattcagaaatactttcaaagctatcccaaagttaaagcatggatcgagaagactctccgtgaaggccgcacacgtggttacgtagagaccttatttggacgtcgccgctatgttcccgatttaaacgctcgcgtgaaaggcaagcgtgaagccgccgaacgcatggcgttcaacatgcctgtacagggcacggcagctgacctcatgaaacttgcaatggtgcgcctttttccacaattgcgtgaagttggtgcccgcatgctcttgcaggtccacgatgaactcttgttagaagcgccaaaagagcgtgcggaagaggtggcagccctcgcgaaagaagttatggaaggcgtgtggcccttagcggtgcctcttgaagtcgaagttggtattggcgaggattggctggctgccaaagga

SEQ ID NO: 4764 - protein, 841 aa, synthetic construct
  REGION 1..841: note = Variant of DNA polymerase I from Thermus sp. strain 2.9
MHHHHHHGGSGVLPVFEPKGRVLLVDGHHLAYRNFFALKGLTTSLGEPVQGVYGFAKSLLKALKEDGDVVIVVFDAKAPSFRHEAYEAYKAGRAPTPEDFPRQLALMKELVDLLGLERLEVPGFEADDVLATLAKKAEREGYEVQILTADRDLFQLLSPRISVLHPEGHRITPEWLWEKYGLRPEQWVDFRALAGDPSDNIPGVKGIGEKTALKLLKEWGSLENLLKNLDQVKPESVREKILAHLEDLKLSRELSRVRTDLPLEVDFGRRREPDWEGLKAFLERLEFGSLQHEFGLLESPLVAEEAPWPPPEGAFLGYRLSRPEPMWAELLALAASAQGRVYRAEDPHGALRGLFEVRGLLAKDLAVVALREGLDLPPTDDPMLLAYLLDPSNTTPEGVARRYGGEWTEDAAKRALLAERLHANLLGRLQGEERLLWLYEEVEKPLSRVLAHMEATGVKLDVAYLENLSLEVAAHMRRLEEEVFRLAGRSFRLNSRDQLERVLFDELGLPPIGKTEKTGKRSTSAAVLDALREVHPIVDKILQYRELAKLKGTYIDRLPALVHPKTGRLHTRFNQTATATGRLSSSDPNLQNIPVRTPLGQKIRRAFVAEEGWRLVALDYRQIELRVLAHLSGDENLIRVFQEGKDIHTQTASWMFGLSAEAIDPLMRRAAKTINFGVLYGMSAFRLSQELGIPYEEAQAFIQKYFQSYPKVKAWIEKTLREGRTRGYVETLFGRRRYVPDLNARVKGKREAAERMAFNMPVQGTAADLMKLAMVRLFPQLREVGARMLLQVHDELLLEAPKERAEEVAALAKEVMEGVWPLAVPLEVEVGIGEDWLAAKG

SEQ ID NO: 4765 - DNA, 2523 bp, synthetic construct
  misc_feature 1..2523: note = Variant of DNA polymerase I from Thermus sp. strain 2.9
  source 1..2523: mol_type = other DNA
atgcaccatcatcatcatcatggcggtagcggcgtgttaccggtgttcgagcataaaggtcgcgtgcttctggttgatggccatcatctcgcgtatcgtaacttctttgccctgaaaggattaaccaccagcctgggcgagccggtacagggtgtctacggctttgcaaagtcgctcctgaaagctctgaaagaagacggtgatgtggtgattgttgtctttgatgcgaaagcgccaagttttcgccacgaagcgtacgaagcttacaaagccgggcgtgctccaacgccggaagactttcctcgccaattggcgcttatgaaggaattagtggatttgcttggcctcgaacgcttggaagttcccggtttcgaggcagacgacgtattagcgactctcgcaaagaaagccgaacgtgagggctatgaagtccagatcttgacagcagatcgcgatcttttccagcttttatctccgcgcatctcggtgttacacccggaagggcatcgtatcaccccggaatggctctgggagaaatatggtttgcgtcccgaacaatgggtggattttcgcgccttagcaggcgatccgagcgacaatattccgggagttaaaggtatcggcgagaagacggcgctcaagctccttaaagaatgggggtcgttggagaacttgcttaagaatttagatcaggtcaaaccagagtcagtgcgtgagaagattcttgctcacctcgaagacctcgagttaagccgcgaattgtcccgtgtacgcaccgatttgccgctcgaagttgatttcggtcgccgccgcgaacctgactgggagggtcttaaagcgtttttagagcgtcttgaatttggttcgctcttgcatgaattcggccttttagaaagcccgttactggccgaagaagcaccttggccaccgcccgagggcgcgtttttaggttaccgtttgagtcgcccggaaccgatgtgggccgaattactggctcttgcagcgtctgcccagggacgtgtgtatcgcgcggaagaccctcatggtgcgctccgcggcctcttcgaagtccgtggactccttgccaaagacttagctgttgttgcattgcgcgaaggtcttgatttacctccgactgatgatccaatgcttcttgcgtacctcttggacccgtcaaacacgacgcccgaaggcgtagcccgtcgttacggcggcgagtggaccgaagatgcagcgaaacgcgcgttattggccgaacgtttgcacgcgaatttactgggacgtttgcaaggcgaggaacgtctcctctggctttacgaagaagtggagaaaccattgagtcgcgtgctcgcgcatatggaagctaccggtgtcaaattagacgtggcgtatttggagaatctcagccttgaagttgctgcccacatgcgccgcttggaggaagaagtattccgtttagcaggccgttcctttcgccttaactctcgcgatcagttagaacgtgtgttgttcgatgaacttggtctccctcctatcggcaagacagagaagaccggtaaacgtagcacttcagcggcggttttagaagctcttcgcgaagtccatcccattgtggacaagatcttgcagtaccgcgaactcgcgaaattgaaaggcacctatattgaccgtcttccggcattagtccacccgaaaacgggacgcctccatacccgcttcaaccaaacagccacggcgaccggtcgtttgtcctcctctgatccaaaccttcagaatattccagtacgtaccccattgggccagaagatccgccgtgcgtttgtagctgaggagggttggcgtttagtggccctcgattatcgtcaaattgaattacgtgtccttgcccatctttctggcgatgagaacctcatccgcgtgtttcaggaaggcaaagacattcacactcaaacggcaagctggatgtttggattatcagctgaagcgatcgatcctttgatgcgtcgtgcagcgaagaagatcaatttcggtgttctctacggtatgagtgcctttcgtttgtcgcaggaattaggcattccctatgaagaagctcaggcgttcattcagaaatactttcaaagctatcccaaagttaaagcatggatcgagaagactctccgtgaaggccgcacccgtggttacgtagagaccttatttggacgtcgccgctatgttcccgatttaaacgctcgcgtgaaaggcaagcgtgaagccgccgaacgcatggcgttcaacatgcctgtacagggcacggcagctgacctcatgaaacttgcaatggtgcgcctttttccacaattgcgtgaagttggtgcccgcatgctcttgcaggtccacgatgaactcttgttagaagcgccaaaagagcgtgcggaagaggtggcagccctcgcgaaagaagttatggaaggcgtgtggcccttagcggtgcctcttgaagtcgaagttggtattggcgaggattggctggctgccaaagga

SEQ ID NO: 4766 - protein, 841 aa, synthetic construct
  REGION 1..841: note = Variant of DNA polymerase I from Thermus sp. strain 2.9
MHHHHHHGGSGVLPVFEHKGRVLLVDGHHLAYRNFFALKGLTTSLGEPVQGVYGFAKSLLKALKEDGDVVIVVFDAKAPSFRHEAYEAYKAGRAPTPEDFPRQLALMKELVDLLGLERLEVPGFEADDVLATLAKKAEREGYEVQILTADRDLFQLLSPRISVLHPEGHRITPEWLWEKYGLRPEQWVDFRALAGDPSDNIPGVKGIGEKTALKLLKEWGSLENLLKNLDQVKPESVREKILAHLEDLELSRELSRVRTDLPLEVDFGRRREPDWEGLKAFLERLEFGSLLHEFGLLESPLLAEEAPWPPPEGAFLGYRLSRPEPMWAELLALAASAQGRVYRAEDPHGALRGLFEVRGLLAKDLAVVALREGLDLPPTDDPMLLAYLLDPSNTTPEGVARRYGGEWTEDAAKRALLAERLHANLLGRLQGEERLLWLYEEVEKPLSRVLAHMEATGVKLDVAYLENLSLEVAAHMRRLEEEVFRLAGRSFRLNSRDQLERVLFDELGLPPIGKTEKTGKRSTSAAVLEALREVHPIVDKILQYRELAKLKGTYIDRLPALVHPKTGRLHTRFNQTATATGRLSSSDPNLQNIPVRTPLGQKIRRAFVAEEGWRLVALDYRQIELRVLAHLSGDENLIRVFQEGKDIHTQTASWMFGLSAEAIDPLMRRAAKKINFGVLYGMSAFRLSQELGIPYEEAQAFIQKYFQSYPKVKAWIEKTLREGRTRGYVETLFGRRRYVPDLNARVKGKREAAERMAFNMPVQGTAADLMKLAMVRLFPQLREVGARMLLQVHDELLLEAPKERAEEVAALAKEVMEGVWPLAVPLEVEVGIGEDWLAAKG

SEQ ID NO: 4767 - DNA, 2523 bp, synthetic construct
  misc_feature 1..2523: note = Variant of DNA polymerase I from Thermus sp. strain 2.9
  source 1..2523: mol_type = other DNA
atgcaccatcatcatcatcatggcggtagcggcgtgttaccggtgttcgagcctaaaggtcgcgtgcttctggttgatggccatcatctcgcgtatcgtaacttctttgccctgaaaggattaaccaccagcctgggcgagccggtacagggtgtctacggctttgcaaagtcgctcctgaaagctctgaaagaagacggtgatgtggtgattgttgtctttgatgcgaaagcgccaagttttcgccacgaagcgtacgaagcttacaaagccgggcgtgctccaacgccggaagactttcctcgccaattggcgcttatgaaggaattagtggatttgcttggcctcgaacgcttggaagttcccggtttcgaggcagacgacgtattagcgactctcgcaaagaaagccgaacgtgagggctatgaagtccagatcttgacagcagatcgcgatcttttccagcttttatctccgcgcatctcggtgttacacccggaagggcatcgtatcaccccggaatggctctgggagaaatatggtttgcgtcccgaacaatgggtggattttcgcgccttagcaggcgatccgagcgacaatattccgggagttaaaggtatcggcgagaagacggcgctcaagctccttaaagaatgggggtcgttggagaacttgcttaagaatttagatcaggtcaaaccagagtcagtgcgtgagaagattcttgctcacctcgaagacctcaaattaagccgcgaattgtcccgtgtacgcaccgatttgccgctcgaagttgatttcggtcgccgccgcgaacctgactgggagggtcttaaagcgtttttagagcgtcttgaatttggttcgctcttgcatgaattcggccttttagaaagcccgttactggccgaagaagcaccttggccaccgcccgagggcgcgtttttaggttaccgtttgagtcgcccggaaccgatgtgggccgaattactggctcttgcagcgtctgcccagggacgtgtgtatcgcgcggaagaccctcatggtgcgctccgcggcctcttcgaagtccgtggactccttgccaaagacttagctgttgttgcattgcgcgaaggtcttgatttacctccgactgatgatccaatgcttcttgcgtacctcttggacccgtcaaacacgacgcccgaaggcgtagcccgtcgttacggcggcgagtggaccgaagatgaggcgaaacgcgcgttattggccgaacgtttgcacgccaatttattaggacgtttgcaaggcgaggaacgtctcctctggctttacgaagaagtggagaaaccattgagtcgcgtgctcgcgcatatggaagctaccggtgtcaaattagacgtggcgtatttggagaatctcagccttgaagttgctgcccacatgcgccgcttggaggaagaagtattccgtttagcaggccgttcctttcgccttaactctcgcgatcagttagaacgtgtgttgttcgatgaacttggtctccctcctatcggcaagacagagaagaccggtaaacgtagcacttcagcggcggttttagaagctcttcgcgaagtccatcccattgtggacaagatcttgcagtaccgcgaactcgcgaaattgaaaggcacctatattgaccgtcttccggcattagtccacccgaaaacgggacgcctccatacccgcttcaaccaaacagccacggcgaccggtcgtttgtcctcctctgatccaaaccttcagaatattccagtacgtaccccattgggccagaagatccgccgtgcgtttgtagctgaggagggttggcgtttagtggccctcgattatcgtcaaattgaattacgtgtccttgcccatctttctggcgatgagaacctcatccgcgtgtttcaggaaggcaaagacattcacactcaaacggcaagctggatgtttggattatcagctgaagcgatcgatcctttgatgcgtcgtgcagcgaagaccatcaatttcggtgttctctacggtatgagtgcctttcgtttgtcgcaggaattaggcattccctatgaagaagctcaggcgttcattcagaaatactttcaaagctatcccaaagttaaagcatggatcgagaagactctccgtgaaggccgcacacgtggttacgtagagaccttatttggacgtcgccgctatgttcccgatttaaacgctcgcgtgaaaggcaagcgtgaagccgccgaacgcatggcgttcaacatgcctgtacagggcacggcagctgacctcatgaaacttgcaatggtgcgcctttttccacaattgcgtgaagttggtgcccgcatgctcttgcaggtccacgatgaactcttgttagaagcgccaaaagagcgtgcggaagaggtggcagccctcgcgaaagaagttatggaaggcgtgtggcccttagcggtgcctcttgaagtcgaagttggtattggcgaggattggctggctgccaaagga

SEQ ID NO: 4768 - protein, 841 aa, synthetic construct
  REGION 1..841: note = Variant of DNA polymerase I from Thermus sp. strain 2.9
MHHHHHHGGSGVLPVFEPKGRVLLVDGHHLAYRNFFALKGLTTSLGEPVQGVYGFAKSLLKALKEDGDVVIVVFDAKAPSFRHEAYEAYKAGRAPTPEDFPRQLALMKELVDLLGLERLEVPGFEADDVLATLAKKAEREGYEVQILTADRDLFQLLSPRISVLHPEGHRITPEWLWEKYGLRPEQWVDFRALAGDPSDNIPGVKGIGEKTALKLLKEWGSLENLLKNLDQVKPESVREKILAHLEDLKLSRELSRVRTDLPLEVDFGRRREPDWEGLKAFLERLEFGSLLHEFGLLESPLLAEEAPWPPPEGAFLGYRLSRPEPMWAELLALAASAQGRVYRAEDPHGALRGLFEVRGLLAKDLAVVALREGLDLPPTDDPMLLAYLLDPSNTTPEGVARRYGGEWTEDEAKRALLAERLHANLLGRLQGEERLLWLYEEVEKPLSRVLAHMEATGVKLDVAYLENLSLEVAAHMRRLEEEVFRLAGRSFRLNSRDQLERVLFDELGLPPIGKTEKTGKRSTSAAVLEALREVHPIVDKILQYRELAKLKGTYIDRLPALVHPKTGRLHTRFNQTATATGRLSSSDPNLQNIPVRTPLGQKIRRAFVAEEGWRLVALDYRQIELRVLAHLSGDENLIRVFQEGKDIHTQTASWMFGLSAEAIDPLMRRAAKTINFGVLYGMSAFRLSQELGIPYEEAQAFIQKYFQSYPKVKAWIEKTLREGRTRGYVETLFGRRRYVPDLNARVKGKREAAERMAFNMPVQGTAADLMKLAMVRLFPQLREVGARMLLQVHDELLLEAPKERAEEVAALAKEVMEGVWPLAVPLEVEVGIGEDWLAAKG

SEQ ID NO: 4769 - DNA, 2523 bp, synthetic construct
  misc_feature 1..2523: note = Variant of DNA polymerase I from Thermus sp. strain 2.9
  source 1..2523: mol_type = other DNA
atgcaccatcatcatcatcatggcggtagcggcgtgttaccggtgttcgagcctaaaggtcgcgtgcttctggttgatggccatcatctcgcgtatcgtaacttctttgccctgaaaggattaaccaccagcctgggcgagccggtacagggtgtctacggctttgcaaagtcgctcctgaaagctctgaaagaagacggtgatgtggtgattgttgtctttgatgcgaaagcgccaagttttcgccacgaagcgtacgaagcttacaaagccgggcgtgctccaacgccggaagactttcctcgccaattggcgcttatgaaggaattagtggatttgcttggcctcgaacgcttggaagttcccggtttcgaggcagacgacgtattagcgactctcgcaaagaaagccgaacgtgagggctatgaagtccagatcttgacagcagatcgcgatcttttccagcttttatctccgcgcatctcggtgttacacccggaagggcatcgtatcaccccggaatggctctgggagaaatatggtttgcgtcccgaacaatgggtggattttcgcgccttagcaggcgatccgagcgacaatattccgggagttaaaggtatcggcgagaagacggcgctcaagctccttaaagaatgggggtcgttggagaacttgcttaagaatttagatcaggtcaaaccagagtcagtgcgtgagaagattcttgctcacctcgaagacctcaaattaagccgcgaattgtcccgtgtacgcaccgatttgccgctcgaagttgatttcggtcgccgccgcgaacctgactgggagggtcttaaagcgtttttagagcgtcttgaatttggttcgctcctgcatgaattcggccttttagaaagcccgttagtggccgaagaagcaccttggccaccgcccgagggcgcgtttttaggttaccgtttgagtcgcccggaaccgatgtgggccgaattactggctcttgcagcgtctgcccagggacgtgtgtatcgcgcggaagaccctcatggtgcgctccgcggcctcttcgaagtccgtggactccttgccaaagacttagctgttgttgcattgcgcgaaggtcttgatttacctccgactgatgatccaatgcttcttgcgtacctcttggacccgtcaaacacgacgcccgaaggcgtagcccgtcgttacggcggcgagtggaccgaagatgcagcgaaacgcgcgttattggccgaacgtttgcacgaaaatttattaggacgtttgcaaggcgaggaacgtctcctctggctttacgaagaagtggagaaaccattgagtcgcgtgctcgcgcatatggaagctaccggtgtcaaattagacgtggcgtatttggagaatctcagccttgaagttgctgcccacatgcgccgcttggaggaagaagtattccgtttagcaggccgttcctttcgccttaactctcgcgatcagttagaacgtgtgttgttcgatgaacttggtctccctcctatcggcaagacagagaagaccggtaaacgtagcacttcagcagcggttttagaggctcttcgcgaagtccatcccattgtggacaagatcttgcagtaccgcgaaatggcgaaattgaaaggcacctatattgaccgtcttccggcattagtccacccgaaaacgggacgcctccatacccgcttcaaccaaacagccacggcgaccggtcgtttgtcctcctctgatccaaaccttcagaatattccagtacgtaccccattgggccagaagatccgccgtgcgtttgtagctgaggagggttggcgtttagtggccctcgattatcgtcaaattgaattacgtgtccttgcccatctttctggcgatgagaacctcatccgcgtgtttcaggaaggcaaagacattcacactcaaacggcaagctggatgtttggattaagtgctgaagcgatcgatcctttgatgcgtcgtgcagcgaagaccatcaatttcggtgttctctacggtatgagtccatttcgtttgtcgcaggaattaggcattcccaaggaagaagctcaggcgttcattcagaaatactttcaaagctatcccaaagttaaagcatggatcgagaagactctccgtgaaggccgcacacgtggttacgtagagaccttatttggacgtcgccgctatgttcccgatttaaacgctcgcgtgaaaggcaagcgtgaagccgccgaacgcatggcgttcaacatgcctgtacagggcacggcagctgacctcatgaaacttgcaatggtgcgcctttttccacaattgcgtgaagttggtgcccgcatgctcttgcaggtccacgatgaactcttgttagaagcgccaaaagagcgtgcggaagaggtggcagccctcgcgaaagaagttatggaaggcgtgtggcccttagcggtgcctcttgaagtcgaagttggtattggcgaggattggctggctgccaaagga

SEQ ID NO: 4770 - protein, 841 aa, synthetic construct
  REGION 1..841: note = Variant of DNA polymerase I from Thermus sp. strain 2.9
MHHHHHHGGSGVLPVFEPKGRVLLVDGHHLAYRNFFALKGLTTSLGEPVQGVYGFAKSLLKALKEDGDVVIVVFDAKAPSFRHEAYEAYKAGRAPTPEDFPRQLALMKELVDLLGLERLEVPGFEADDVLATLAKKAEREGYEVQILTADRDLFQLLSPRISVLHPEGHRITPEWLWEKYGLRPEQWVDFRALAGDPSDNIPGVKGIGEKTALKLLKEWGSLENLLKNLDQVKPESVREKILAHLEDLKLSRELSRVRTDLPLEVDFGRRREPDWEGLKAFLERLEFGSLLHEFGLLESPLVAEEAPWPPPEGAFLGYRLSRPEPMWAELLALAASAQGRVYRAEDPHGALRGLFEVRGLLAKDLAVVALREGLDLPPTDDPMLLAYLLDPSNTTPEGVARRYGGEWTEDAAKRALLAERLHENLLGRLQGEERLLWLYEEVEKPLSRVLAHMEATGVKLDVAYLENLSLEVAAHMRRLEEEVFRLAGRSFRLNSRDQLERVLFDELGLPPIGKTEKTGKRSTSAAVLEALREVHPIVDKILQYREMAKLKGTYIDRLPALVHPKTGRLHTRFNQTATATGRLSSSDPNLQNIPVRTPLGQKIRRAFVAEEGWRLVALDYRQIELRVLAHLSGDENLIRVFQEGKDIHTQTASWMFGLSAEAIDPLMRRAAKTINFGVLYGMSPFRLSQELGIPKEEAQAFIQKYFQSYPKVKAWIEKTLREGRTRGYVETLFGRRRYVPDLNARVKGKREAAERMAFNMPVQGTAADLMKLAMVRLFPQLREVGARMLLQVHDELLLEAPKERAEEVAALAKEVMEGVWPLAVPLEVEVGIGEDWLAAKG

SEQ ID NO: 4771 - DNA, 2523 bp, synthetic construct
  misc_feature 1..2523: note = Variant of DNA polymerase I from Thermus sp. strain 2.9
  source 1..2523: mol_type = other DNA
atgcaccatcatcatcatcatggcggtagcggcgtgttaccggtgttcgagcctaaaggtcgcgtgcttctggttgatggccatcatctcgcgtatcgtaacttctttgccctgaaaggattaaccaccagcctgggcgagccggtacagggtgtctacggctttgcaaagtcgctcctgaaagctctgaaagaagacggtgatgtggtgattgttgtctttgatgcgaaagcgccaagttttcgccacgaagcgtacgaagcttacaaagccgggcgtgctccaacgccggaagactttcctcgccaattggcgcttatgaaggaattagtggatttgcttggcctcgaacgcttggaagttcccggtttcgaggcagacgacgtattagcgactctcgcaaagaaagccgaacgtgagggctatgaagtccagatcttgacagcagatcgcgatcttttccagcttttatctccgcgcatctcggtgttacacccggaagggcatcgtatcaccccggaatggctctgggagaaatatggtttgcgtcccgaacaatgggtggattttcgcgccttagcaggcgatccgagcgacaatattccgggagttaaaggtatcggcgagaagacggcgctcaagctccttaaagaatgggggtcgttggagaacttgcttaagaatttagatcaggtcaaaccagagtcagtgcgtgagaagattcttgctcacctcgaagacctcaaattaagccgcgaattgtcccgtgtacgcaccgatttgccgctcgaagttgatttcggtcgccgccgcgaacctgactgggagggtcttaaagcgtttttagagcgtcttgaatttggttcgctcttgcatgaattcggccttttagaaagcccgttactggccgaagaagcaccttggccaccgcccgagggcgcgtttttaggttaccgtttgagtcgcccggaaccgatgtgggccgaattactggctcttgcagcgtctgcccagggacgtgtgtatcgcgcggaagaccctcatggtgcgctccgcggcctcttcgaagtccgtggactccttgccaaagacttagctgttgttgcattgcgcgaaggtcttgatttacctccgactgatgatccaatgcttcttgcgtacctcttggacccgtcaaacacgacgcccgaaggcgtagcccgtcgttacggcggcgagtggaccgaagatgcagcgaaacgcgcgttattggccgaacgtttgcacgccaatttattaggacgtttgcaaggcgaggaacgtctcctctggctttacgaagaagtggagaaaccattgagtcgcgtgctcgcgcatatggaagctaccggtgtcaaattagacgtggcgtatttggagaatctcagccttgaagttgctgcccacatgcgccgcttggaggaagaagtattccgtttagcaggccgttcctttcgccttaactctcgcgatcagttagaacgtgtgttgttcgatgaacttggtctccctcctatcggcaagacagagaagaccggtaaacgtagcacttcagcggcggttttagaagctcttcgcgaagtccatcccattgtggacaagatcttgcagtaccgcgaactcgcgaaattgaaaggcacctatattgaccgtcttccggcattagtccacccgaaaacgggacgcctccatacccgcttcaaccaaacagccacggcgaccggtcgtttgtcctcctctgatccaaaccttcagaatattccagtacgtaccccattgggccagaagatccgccgtgcgtttgtagctgaggagggttggcgtttagtggccctcgattatcgtcaaattgaattacgtgtccttgcccatctttctggcgatgagaacctcatccgcgtgtttcaggaaggcaaagacattcacactcaaacggcaagctggatgtttggattatcagctgaagcgatcgatcctttgatgcgtcgtgcagcgaagaccatcaatttcggtgttctctacggtatgagtgcctttcgtttgtcgcaggaattaggcattccctatgaagaagctcaggcgttcattcagaaatactttcaaagctatcccaaagttaaagcatggatcgagaagactctccgtgaaggccgcacacgtggttacgtagagaccttatttggacgtcgccgctatgttcccgatttacaggctcgcgtgaaaggcaagcgtgaagccgccgaacgcatggcgttcaacatgcctgtacagggcacggcagctgacctcatgaaacttgcaatggtgcgcctttttccacaattgcgtgaagttggtgcccgcatgctcttgcaggtccacgatgaactcttgttagaagcgccaaaagagcgtgcggaagaggtggcagccctcgcgaaagaagttatggaaggcgtgtggcccttagcggtgcctcttgaagtcgaagttggtattggcgaggattggctggctgccaaagga

SEQ ID NO: 4772 - protein, 841 aa, synthetic construct
  REGION 1..841: note = Variant of DNA polymerase I from Thermus sp. strain 2.9
MHHHHHHGGSGVLPVFEPKGRVLLVDGHHLAYRNFFALKGLTTSLGEPVQGVYGFAKSLLKALKEDGDVVIVVFDAKAPSFRHEAYEAYKAGRAPTPEDFPRQLALMKELVDLLGLERLEVPGFEADDVLATLAKKAEREGYEVQILTADRDLFQLLSPRISVLHPEGHRITPEWLWEKYGLRPEQWVDFRALAGDPSDNIPGVKGIGEKTALKLLKEWGSLENLLKNLDQVKPESVREKILAHLEDLKLSRELSRVRTDLPLEVDFGRRREPDWEGLKAFLERLEFGSLLHEFGLLESPLLAEEAPWPPPEGAFLGYRLSRPEPMWAELLALAASAQGRVYRAEDPHGALRGLFEVRGLLAKDLAVVALREGLDLPPTDDPMLLAYLLDPSNTTPEGVARRYGGEWTEDAAKRALLAERLHANLLGRLQGEERLLWLYEEVEKPLSRVLAHMEATGVKLDVAYLENLSLEVAAHMRRLEEEVFRLAGRSFRLNSRDQLERVLFDELGLPPIGKTEKTGKRSTSAAVLEALREVHPIVDKILQYRELAKLKGTYIDRLPALVHPKTGRLHTRFNQTATATGRLSSSDPNLQNIPVRTPLGQKIRRAFVAEEGWRLVALDYRQIELRVLAHLSGDENLIRVFQEGKDIHTQTASWMFGLSAEAIDPLMRRAAKTINFGVLYGMSAFRLSQELGIPYEEAQAFIQKYFQSYPKVKAWIEKTLREGRTRGYVETLFGRRRYVPDLQARVKGKREAAERMAFNMPVQGTAADLMKLAMVRLFPQLREVGARMLLQVHDELLLEAPKERAEEVAALAKEVMEGVWPLAVPLEVEVGIGEDWLAAKG

SEQ ID NO: 4773 - DNA, 2523 bp, synthetic construct
  misc_feature 1..2523: note = Variant of DNA polymerase I from Thermus sp. strain 2.9
  source 1..2523: mol_type = other DNA
atgcaccatcatcatcatcatggcggtagcggcgtgttaccggtgttcgagcctaaaggtcgcgtgcttctggttgatggccatcatctcgcgtatcgtaacttctttgccctgaaaggattaaccaccagcctgggcgagccggtacagggtgtctacggctttgcaaagtcgctcctgaaagctctgaaagaagacggtgatgtggtgattgttgtctttgatgcgaaagcgccaagttttcgccacgaagcgtacgaagcttacaaagccgggcgtgctccaacgccggaagactttcctcgccaattggcgcttatgaaggaattagtggatttgcttggcctcgaacgcttggaagttcccggtttcgaggcagacgacgtattagcgactctcgcaaagaaagccgaacgtgagggctatgaagtccagatcttgacagcagatcgcgatcttttccagcttttatctccgcgcatctcggtgttacacccggaagggcatcgtatcaccccggaatggctctgggagaaatatggtttgcgtcccgaacaatgggtggattttcgcgccttagcaggcgatccgagcgacaatattccgggagttaaaggtatcggcgagaagacggcgctcaagctccttaaagaatgggggtcgttggagaacttgcttaagaatttagatcaggtcaaaccagagtcagtgcgtgagaagattcttgctcacctcgaagacctcaaattaagccgcgaattgtcccgtgtacgcaccgatttgccgctcgaagttgatttcggtcgccgccgcgaacctgactgggagggtcttaaagcgtttttagagcgtcttgaatttggttcgctcttgcatgaattcggccttttagaaagcccgttactggccgaagaagcaccttggccaccgcccgagggcgcgtttttaggttaccgtttgagtcgcccggaaccgatgtgggccgaattactggctcttgcagcgtctgcccagggacgtgtgtatcgcgcggaagaccctcatggtgcgctccgcggcctcttcgaagtccgtggactccttgccaaagacttagctgttgttgcattgcgcgaaggtcttgatttacctccgactgatgatccaatgcttcttgcgtacctcttggacccgtcaaacacgacgcccgaaggcgtagcccgtcgttacggcggcgagtggaccgaagatgcagcgaaacgcgcgttattggccgaacgtttgcacgccaatttattaggacgtttgcaaggcgaggaacgtctcctctggctttacgaagaagtggagaaaccattgagtcgcgtgctcgcgcatatggaagctaccggtgtcaaattagacgtggcgtatttggagaatctcagccttgaagttgctgcccacatgcgccgcttggaggaagaagtattccgtttagcaggccgttcctttcgccttaactctcgcgatcagttagaacgtgtgttgttcgatgaacttggtctccctcctatcggcaagacagagaagaccggtaaacgtagcacttcagcggcggttttagaagctcttcgcgaagtccatcccattgtggacaagatcttgcagtaccgcgaactcgcgaaattgaaaggcacctatattgaccgtcttccggcattagtccacccgaaaacgggacgcctccatacccgcttcaaccaaacagccacggcgaccggtcgtttgtcctcctctgatccaaaccttcagaatattccagtacgtaccccattgggccagaagatccgccgtgcgtttgtagctgaggagggttggcgtttagtggccctcgattatcgtcaaattgaattacgtgtccttgcccatctttctggcgatgagaacctcatccgcgtgtttcaggaaggcaaagacattcacactcaaacggcaagctggatgtttggattatcagctgaagcgatcgatcctttgatgcgtcgtgcagcgaagaccatcaatttcggtgttctctacggtatgagtgcctttcgtttgtcgcaggaattattgattccctatgaagaagctcaggcgttcattcagaaatactttcaaagctatcccaaagttaaagcatggatcgagaagactctccgtgaaggccgcacacgtggttacgtagagaccttatttggacgtcgccgctatgttcccgatttaaacgctcgcgtgaaaggcaagcgtgaagccgccgaacgcatggcgttcaacatgcctgtacagggcacggcagctgacctcatgaaacttgcaatggtgcgcctttttccacaattgcgtgaagttggtgcccgcatgctcttgcaggtccacgatgaactcttgttagaagcgccaaaagagcgtgcggaagaggtggcagccctcgcgaaagaagttatggaaggcgtgtggcccttagcggtgcctcttgaagtcgaagttggtattggcgaggattggctggctgccaaagga

SEQ ID NO: 4774 - protein, 841 aa, synthetic construct
  REGION 1..841: note = Variant of DNA polymerase I from Thermus sp. strain 2.9
MHHHHHHGGSGVLPVFEPKGRVLLVDGHHLAYRNFFALKGLTTSLGEPVQGVYGFAKSLLKALKEDGDVVIVVFDAKAPSFRHEAYEAYKAGRAPTPEDFPRQLALMKELVDLLGLERLEVPGFEADDVLATLAKKAEREGYEVQILTADRDLFQLLSPRISVLHPEGHRITPEWLWEKYGLRPEQWVDFRALAGDPSDNIPGVKGIGEKTALKLLKEWGSLENLLKNLDQVKPESVREKILAHLEDLKLSRELSRVRTDLPLEVDFGRRREPDWEGLKAFLERLEFGSLLHEFGLLESPLLAEEAPWPPPEGAFLGYRLSRPEPMWAELLALAASAQGRVYRAEDPHGALRGLFEVRGLLAKDLAVVALREGLDLPPTDDPMLLAYLLDPSNTTPEGVARRYGGEWTEDAAKRALLAERLHANLLGRLQGEERLLWLYEEVEKPLSRVLAHMEATGVKLDVAYLENLSLEVAAHMRRLEEEVFRLAGRSFRLNSRDQLERVLFDELGLPPIGKTEKTGKRSTSAAVLEALREVHPIVDKILQYRELAKLKGTYIDRLPALVHPKTGRLHTRFNQTATATGRLSSSDPNLQNIPVRTPLGQKIRRAFVAEEGWRLVALDYRQIELRVLAHLSGDENLIRVFQEGKDIHTQTASWMFGLSAEAIDPLMRRAAKTINFGVLYGMSAFRLSQELLIPYEEAQAFIQKYFQSYPKVKAWIEKTLREGRTRGYVETLFGRRRYVPDLNARVKGKREAAERMAFNMPVQGTAADLMKLAMVRLFPQLREVGARMLLQVHDELLLEAPKERAEEVAALAKEVMEGVWPLAVPLEVEVGIGEDWLAAKG

SEQ ID NO: 4775 - DNA, 2523 bp, synthetic construct
  misc_feature 1..2523: note = Variant of DNA polymerase I from Thermus sp. strain 2.9
  source 1..2523: mol_type = other DNA
atgcaccatcatcatcatcatggcggtagcggcgtgttaccggtgttcgagcctaaaggtcgcgtgcttctggttgatggccatcatctcgcgtatcgtaacttctttgccctgaaaggattaaccaccagcctgggcgagccggtacagggtgtctacggctttgcaaagtcgctcctgaaagctctgaaagaagacggtgatgtggtgattgttgtctttgatgcgaaagcgccaagttttcgccacgaagcgtacgaagcttacaaagccgggcgtgctccaacgccggaagactttcctcgccaattggcgcttatgaaggaattagtggatttgcttggcctcgaacgcttggaagttcccggtttcgaggcagacgacgtattagcgactctcgcaaagaaagccgaacgtgagggctatgaagtccagatcttgacagcagatcgcgatcttttccagcttttatctccgcgcatctcggtgttacacccggaagggcatcgtatcaccccggaatggctctgggagaaatatggtttgcgtcccgaacaatgggtggattttcgcgccttagcaggcgatccgagcgacaatattccgggagttaaaggtatcggcgagaagacggcgctcaagctccttaaagaatgggggtcgttggagaacttgcttaagaatttagatcaggtcaaaccagagtcagtgcgtgagaagattcttgctcacctcgaagacctcaaattaagccgcgaattgtcccgtgtacgcaccgatttgccgctcgaagttgatttcggtcgccgccgcgaacctgactgggagggtcttaaagcgtttttagagcgtcttgaatttggttcgctcttgcatgaattcggccttttagaaagcccgttactggccgaagaagcaccttggccaccgcccgagggcgcgtttttaggttaccgtttgagtcgcccggaaccgatgtgggccgaattactggctcttgcagcgtctgcccagggacgtgtgtatcgcgcggaagaccctcatggtgcgctccgcggcctcttcgaagtccgtggactccttgccaaagacttagctgttgttgcattgcgcgaaggtcttgatttacctccgactgatgatccaatgcttcttgcgtacctcttggacccgtcaaacacgacgcccgaaggcgtagcccgtcgttacggcggcgagtggaccgaagatgcagcgaaacgcgcgttattggccgaacgtttgcacgccaatttattaggacgtttgcaaggcgaggaacgtctcctctggctttacgaagaagtggagaaaccattgagtcgcgtgctcgcgcatatggaagctaccggtgtcaaattagacgtggcgtatttggagaatctcagccttgaagttgctgcccacatgcgccgcttggaggaagaagtatggcgtttagcaggccgttcctttcgccttaactctcgcgatcagttagaacgtgtgttgttcgatgaacttggtctccctcctatcggcaagacagagaagaccggtaaacgtagcacttcagcggcggttttagaagctcttcgcgaagtccatcccattgtggacaagatcttgcagtaccgcgaactcgcgaaattgaaaggcacctatattgaccgtcttccggcattagtccacccgaaaacgggacgcctccatacccgcttcaaccaaacagccacggcgaccggtcgtttgtcctcctctgatccaaaccttcagaatattccagtacgtaccccattgggccagaagatccgccgtgcgtttgtagctgaggagggttggcgtttagtggccctcgattatcgtcaaattgaattacgtgtccttgcccatctttctggcgatgagaacctcatccgcgtgtttcaggaaggcaaagacattcacactcaaacggcaagctggatgtttggattatcagctgaagcgatcgatcctttgatgcgtcgtgcagcgaagaccatcaatttcggtgttctctacggtatgagtgcctttcgtttgtcgcaggaattaggcattccctatgaagaagctcaggcgttcattcagaaatactttcaaagctatcccaaagttaaagcatggatcgagaagactctccgtgaaggccgcacacgtggttacgtagagaccttatttggacgtcgccgctatgttcccgatttaaacgctcgcgtgaaaggcaagcgtgaagccgccgaacgcatggcgttcaacatgcctgtacagggcacggcagctgacctcatgaaacttgcaatggtgcgcctttttccacaattgcgtgaagttggtgcccgcatgctcttgcaggtccacgatgaactcttgttagaagcgccaaaagagcgtgcggaagaggtggcagccctcgcgaaagaagttatggaaggcgtgtggcccttagcggtgcctcttgaagtcgaagttggtattggcgaggattggctggctgccaaagga

SEQ ID NO: 4776 - protein, 841 aa, synthetic construct
  REGION 1..841: note = Variant of DNA polymerase I from Thermus sp. strain 2.9
MHHHHHHGGSGVLPVFEPKGRVLLVDGHHLAYRNFFALKGLTTSLGEPVQGVYGFAKSLLKALKEDGDVVIVVFDAKAPSFRHEAYEAYKAGRAPTPEDFPRQLALMKELVDLLGLERLEVPGFEADDVLATLAKKAEREGYEVQILTADRDLFQLLSPRISVLHPEGHRITPEWLWEKYGLRPEQWVDFRALAGDPSDNIPGVKGIGEKTALKLLKEWGSLENLLKNLDQVKPESVREKILAHLEDLKLSRELSRVRTDLPLEVDFGRRREPDWEGLKAFLERLEFGSLLHEFGLLESPLLAEEAPWPPPEGAFLGYRLSRPEPMWAELLALAASAQGRVYRAEDPHGALRGLFEVRGLLAKDLAVVALREGLDLPPTDDPMLLAYLLDPSNTTPEGVARRYGGEWTEDAAKRALLAERLHANLLGRLQGEERLLWLYEEVEKPLSRVLAHMEATGVKLDVAYLENLSLEVAAHMRRLEEEVWRLAGRSFRLNSRDQLERVLFDELGLPPIGKTEKTGKRSTSAAVLEALREVHPIVDKILQYRELAKLKGTYIDRLPALVHPKTGRLHTRFNQTATATGRLSSSDPNLQNIPVRTPLGQKIRRAFVAEEGWRLVALDYRQIELRVLAHLSGDENLIRVFQEGKDIHTQTASWMFGLSAEAIDPLMRRAAKTINFGVLYGMSAFRLSQELGIPYEEAQAFIQKYFQSYPKVKAWIEKTLREGRTRGYVETLFGRRRYVPDLNARVKGKREAAERMAFNMPVQGTAADLMKLAMVRLFPQLREVGARMLLQVHDELLLEAPKERAEEVAALAKEVMEGVWPLAVPLEVEVGIGEDWLAAKG

SEQ ID NO: 4777 - DNA, 2523 bp, synthetic construct
  misc_feature 1..2523: note = Variant of DNA polymerase I from Thermus sp. strain 2.9
  source 1..2523: mol_type = other DNA
atgcaccatcatcatcatcatggcggtagcggcgtgttaccggtgttcgagcctaaaggtcgcgtgcttctggttgatggccatcatctcgcgtatcgtaacttctttgccctgaaaggattaaccaccagcctgggcgagccggtacagggtgtctacggctttgcaaagtcgctcctgaaagctctgaaagaagacggtgatgtggtgattgttgtctttgatgcgaaagcgccaagttttcgccacgaagcgtacgaagcttacaaagccgggcgtgctccaacgccggaagactttcctcgccaattggcgcttatgaaggaattagtggatttgcttggcctcgaacgcttggaagttcccggtttcgaggcagacgacgtattagcgactctcgcaaagaaagccgaacgtgagggctatgaagtccagatcttgacagcagatcgcgatcttttccagcttttatctccgcgcatctcggtgttacacccggaagggcatcgtatcaccccggaatggctctgggagaaatatggtttgcgtcccgaacaatgggtggattttcgcgccttagcaggcgatccgagcgacaatattccgggagttaaaggtatcggcgagaagacggcgctcaagctccttaaagaatgggggtcgttggagaacttgcttaagaatttagatcaggtcaaaccagagtcagtgcgtgagaagattcttgctcacctcgaagacctcaaattaagccgcgaattgtcccgtgtacgcaccgatttgccgctcgaagttgatttcggtcgccgccgcgaacctgactgggagggtcttaaagcgtttttagagcgtcttgaatttggttcgctcttgcatgaattcggccttttagaaagcccgttactggccgaagaagcaccttggccaccgcccgagggcgcgtttttaggttaccgtttgagtcgcccggaaccgatgtgggccgaattactggctcttgcagcgtctgcccagggacgtgtgtatcgcgcggaagaccctcatggtgcgctccgcggcctcttcgaagtccgtggactccttgccaaagacttagctgttgttgcattgcgcgaaggtcttgatttacctccgactgatgatccaatgcttcttgcgtacctcttggacccgtcaaacacgacgcccgaaggcgtagcccgtcgttacggcggcgagtggaccgaagatgcagcgaaacgcgcgttattggccgaacgtttgcacgccaatttattaggacgtttgcaaggcgaggaacgtctcctctggctttacgaagaagtggagaaaccattgagtcgcgtgctcgcgcatatggaagctaccggtgtcaaattagacgtggcgtatttggagaatctcagccttgaagttgctgcccacatgcgccgcttggaggaagaagtattccgtttagcaggccgttcctttcgccttaactctcgcgatcagttagaacgtgtgttgttcgatgaacttggtctccctcctatcggcaagacagagaagaccggtaaacgtagcacttcagcggcggttttagaagctcttcgcgaagtccatcccattgtggacaagatcttgcagtaccgcgaactcgcgaaattgaaaggcacctatattgaccgtcttccggcattagtccacccgaaaacgggacgcctccatacccgcttcaaccaaacacatacggcgaccggtcgtttgtcctcctctgatccaaaccttcagaatattccagtacgtaccccattgggccagaagatccgccgtgcgtttgtagctgaggagggttggcgtttagtggccctcgattatcgtcaaattgaattacgtgtccttgcccatctttctggcgatgagaacctcatccgcgtgtttcaggaaggcaaagacattcacactcaaacggcaagctggatgtttggattatcagctgaagcgatcgatcctttgatgcgtcgtgcagcgaagaccatcaatttcggtgttctctacggtatgagtgcctttcgtttgtcgcaggaattaggcattccctatgaagaagctcaggcgttcattcagaaatactttcaaagctatcccaaagttaaagcatggatcgagaagactctccgtgaaggccgcacacgtggttacgtagagaccttatttggacgtcgccgctatgttcccgatttaaacgctcgcgtgaaaggcaagcgtgaagccgccgaacgcatggcgttcaacatgcctgtacagggcacggcagctgacctcatgaaacttgcaatggtgcgcctttttccacaattgcgtgaagttggtgcccgcatgctcttgcaggtccacgatgaactcttgttagaagcgccaaaagagcgtgcggaagaggtggcagccctcgcgaaagaagttatggaaggcgtgtggcccttagcggtgcctcttgaagtcgaagttggtattggcgaggattggctggctgccaaagga

SEQ ID NO: 4778 - protein, 841 aa, synthetic construct
  REGION 1..841: note = Variant of DNA polymerase I from Thermus sp. strain 2.9
MHHHHHHGGSGVLPVFEPKGRVLLVDGHHLAYRNFFALKGLTTSLGEPVQGVYGFAKSLLKALKEDGDVVIVVFDAKAPSFRHEAYEAYKAGRAPTPEDFPRQLALMKELVDLLGLERLEVPGFEADDVLATLAKKAEREGYEVQILTADRDLFQLLSPRISVLHPEGHRITPEWLWEKYGLRPEQWVDFRALAGDPSDNIPGVKGIGEKTALKLLKEWGSLENLLKNLDQVKPESVREKILAHLEDLKLSRELSRVRTDLPLEVDFGRRREPDWEGLKAFLERLEFGSLLHEFGLLESPLLAEEAPWPPPEGAFLGYRLSRPEPMWAELLALAASAQGRVYRAEDPHGALRGLFEVRGLLAKDLAVVALREGLDLPPTDDPMLLAYLLDPSNTTPEGVARRYGGEWTEDAAKRALLAERLHANLLGRLQGEERLLWLYEEVEKPLSRVLAHMEATGVKLDVAYLENLSLEVAAHMRRLEEEVFRLAGRSFRLNSRDQLERVLFDELGLPPIGKTEKTGKRSTSAAVLEALREVHPIVDKILQYRELAKLKGTYIDRLPALVHPKTGRLHTRFNQTHTATGRLSSSDPNLQNIPVRTPLGQKIRRAFVAEEGWRLVALDYRQIELRVLAHLSGDENLIRVFQEGKDIHTQTASWMFGLSAEAIDPLMRRAAKTINFGVLYGMSAFRLSQELGIPYEEAQAFIQKYFQSYPKVKAWIEKTLREGRTRGYVETLFGRRRYVPDLNARVKGKREAAERMAFNMPVQGTAADLMKLAMVRLFPQLREVGARMLLQVHDELLLEAPKERAEEVAALAKEVMEGVWPLAVPLEVEVGIGEDWLAAKG

SEQ ID NO: 4779 - DNA, 2523 bp, synthetic construct
  misc_feature 1..2523: note = Variant of DNA polymerase I from Thermus sp. strain 2.9
  source 1..2523: mol_type = other DNA
atgcaccatcatcatcatcatggcggtagcggcgtgttaccggtgttcgagcctaaaggtcgcgtgcttctggttgatggccatcatctcgcgtatcgtaacttctttgccctgaaaggattaaccaccagcctgggcgagccggtacagggtgtctacggctttgcaaagtcgctcctgaaagctctgaaagaagacggtgatgtggtgattgttgtctttgatgcgaaagcgccaagttttcgccacgaagcgtacgaagcttacaaagccgggcgtgctccaacgccggaagactttcctcgccaattggcgcttatgaaggaattagtggatttgcttggcctcgaacgcttggaagttcccggtttcgaggcagacgacgtattagcgactctcgcaaagaaagccgaacgtgagggctatgaagtccagatcttgacagcagatcgcgatcttttccagcttttatctccgcgcatctcggtgttacacccggaagggcatcgtatcaccccggaatggctctgggagaaatatggtttgcgtcccgaacaatgggtggattttcgcgccttagcaggcgatccgagcgacaatattccgggagttaaaggtatcggcgagaagacggcgctcaagctccttaaagaatgggggtcgttggagaacttgcttaagaatttagatcaggtcaaaccagagtcagtgcgtgagaagattcttgctcacctcgaagacctcaaattaagccgcgaattgtcccgtgtacgcaccgatttgccgctcgaagttgatttcggtcgccgccgcgaacctgactgggagggtcttaaagcgtttttagagcgtcttgaatttggttcgctcttgcatgaattcggccttttagaaagcccgttactggccgaagaagcaccttggccaccgcccgagggcgcgtttttaggttaccgtttgagtcgcccggaaccgatgtgggccgaattactggctcttgcagcgtctgcccagggacgtgtgtatcgcgcggaagaccctcatggtgcgctccgcggcctcttcgaagtccgtggactccttgccaaagacttagctgttgttgcattgcgcgaaggtcttgatttacctccgactgatgatccaatgcttcttgcgtacctcttggacccgtcaaacacgacgcccgaaggcgtagcccgtcgttacggcggcgagtggaccgaagatgcagcgaaacgcgcgttattggccgaacgtttgcacgccaatttattaggacgtttgcaaggcgaggaacgtctcctctggctttacgaagaagtggagaaaccattgagtcgcgtgctcgcgcatatggaagctaccggtgtcaaattagacgtggcgtatttggagaatctcagccttgaagttgctgcccacatgcgccgcttggaggaagaagtattccgtttagcaggccgttcctttcgccttaactctcgcgatcagttagaacgtgtgttgttcgatgaacttggtctccctcctatcggcaagacagagaagaccggtaaacgtagcacttcagcggcggttttagaagctcttcgcgaagtccatcccattgtggacaagatcttgcagtaccgcgaactcgcgaaattgaaaggcacctatattgaccgtcttccggcattagtccacccgaaaacgggacgcctccatacccgcttcaaccaaacagccacggcgaccggtcgtttgtcctcctctgatccaaaccttcagaatattccagtacgtaccccattgggccagaagatccgccgtgcgtttgtagctgaggagggttggcgtttagtggccctcgattatcgtcaaattgaattacgtgtccttgcccatctttctggcgatgagaacctcatccgcgtgtttcaggaaggcaaagacattcacactcaaacggcaagctggatgtttggattatcagctgaagcgatcgatcctttgatgcgtcgtgcagcgaagaccatcaatttcggtgttctctacggtatgagtgcctttcgtttgtcgcaggaattaggcattccctatgaagaagctcaggcgttcattcagaaatactttcaaagctatcccaaagttaaagcatggatcgagaagactctccgtgaaggccgcacacgtggttacgtagagaccttatttggacgtcgccgctatgttcccgatttaaacgctcgcgtgaaaggcaagcgtgaagccgccgaacgcatggcgttcaacatgcctgtacagggcacggcagctgacctcatgaaacttgcaatggtgcgcctttttccacaattgcgtgaagttggtgcccgcatgctcttgcaggtccacgatgaactcttgttagaaattccaaaagagcgtgcggaagaggtggcagccctcgcgaaagaagttatggaaggcgtgtggcccttagcggtgcctcttgaagtcgaagttggtattggcgaggattggctggctgccaaagga

SEQ ID NO: 4780 - protein, 841 aa, synthetic construct
  REGION 1..841: note = Variant of DNA polymerase I from Thermus sp. strain 2.9
MHHHHHHGGSGVLPVFEPKGRVLLVDGHHLAYRNFFALKGLTTSLGEPVQGVYGFAKSLLKALKEDGDVVIVVFDAKAPSFRHEAYEAYKAGRAPTPEDFPRQLALMKELVDLLGLERLEVPGFEADDVLATLAKKAEREGYEVQILTADRDLFQLLSPRISVLHPEGHRITPEWLWEKYGLRPEQWVDFRALAGDPSDNIPGVKGIGEKTALKLLKEWGSLENLLKNLDQVKPESVREKILAHLEDLKLSRELSRVRTDLPLEVDFGRRREPDWEGLKAFLERLEFGSLLHEFGLLESPLLAEEAPWPPPEGAFLGYRLSRPEPMWAELLALAASAQGRVYRAEDPHGALRGLFEVRGLLAKDLAVVALREGLDLPPTDDPMLLAYLLDPSNTTPEGVARRYGGEWTEDAAKRALLAERLHANLLGRLQGEERLLWLYEEVEKPLSRVLAHMEATGVKLDVAYLENLSLEVAAHMRRLEEEVFRLAGRSFRLNSRDQLERVLFDELGLPPIGKTEKTGKRSTSAAVLEALREVHPIVDKILQYRELAKLKGTYIDRLPALVHPKTGRLHTRFNQTATATGRLSSSDPNLQNIPVRTPLGQKIRRAFVAEEGWRLVALDYRQIELRVLAHLSGDENLIRVFQEGKDIHTQTASWMFGLSAEAIDPLMRRAAKTINFGVLYGMSAFRLSQELGIPYEEAQAFIQKYFQSYPKVKAWIEKTLREGRTRGYVETLFGRRRYVPDLNARVKGKREAAERMAFNMPVQGTAADLMKLAMVRLFPQLREVGARMLLQVHDELLLEIPKERAEEVAALAKEVMEGVWPLAVPLEVEVGIGEDWLAAKG

SEQ ID NO: 4781 - DNA, 2523 bp, synthetic construct
  misc_feature 1..2523: note = Variant of DNA polymerase I from Thermus sp. strain 2.9
  source 1..2523: mol_type = other DNA
atgcaccatcatcatcatcatggcggtagcggcgtgttaccggtgttcgagcctaaaggtcgcgtgcttctggttgatggccatcatctcgcgtatcgtaacttctttgccctgaaaggattaaccaccagcctgggcgagccggtacagggtgtctacggctttgcaaagtcgctcctgaaagctctgaaagaagacggtgatgtggtgattgttgtctttgatgcgaaagcgccaagttttcgccacgaagcgtacgaagcttacaaagccgggcgtgctccaacgccggaagactttcctcgccaattggcgcttatgaaggaattagtggatttgcttggcctcgaacgcttggaagttcccggtttcgaggcagacgacgtattagcgactctcgcaaagaaagccgaacgtgagggctatgaagtccagatcttgacagcagatcgcgatcttttccagcttttatctccgcgcatctcggtgttacacccggaagggcatcgtatcaccccggaatggctctgggagaaatatggtttgcgtcccgaacaatgggtggattttcgcgccttagcaggcgatccgagcgacaatattccgggagttaaaggtatcggcgagaagacggcgctcaagctccttaaagaatgggggtcgttggagaacttgcttaagaatttagatcaggtcaaaccagagtcagtgcgtgagaagattcttgctcacctcgaagacctcaaattaagccgcgaattgtcccgtgtacgcaccgatttgccgctcgaagttgatttcggtcgccgccgcgaacctgactgggagggtcttaaagcgtttttagagcgtcttgaatttggttcgctcttgcatgaattcggccttttagaaagcccgttactggccgaagaagcaccttggccaccgcccgagggcgcgtttttaggttaccgtttgagtcgcccggaaccgatgtgggccgaattactggctcttgcagcgtctgcccagggacgtgtgtatcgcgcggaagaccctcatggtgcgctccgcggcctcttcgaagtccgtggactccttgccaaagacttagctgttgttgcattgcgcgaaggtcttgatttacctccgactgatgatccaatgcttcttgcgtacctcttggacccgtcaaacacgacgcccgaaggcgtagcccgtcgttacggcggcgagtggaccgaagatgcagcgaaacgcgcgttattggccgaacgtttgcacgccaatttattaggacgtttgcaaggcgaggaacgtctcctctggctttacgaagaagtggagaaaccattgagtcgcgtgctcgcgcatatggaagctaccggtgtcaaattagacgtggcgtatttggagaatctcagccttgaagttgctgcccacatgcgccgcttggaggaagaagtattccgtttagcaggccgttcctttcgccttaactctcgcgatcagttagaacgtgtgttgttcgatgaacttggtctccctcctatcggcaagacagagaagaccggtaaacgtagcacttcagcggcggttttagaagctcttcgcgaagtccatcccattgtggacaagatcttgcagtaccgcgaactcgcgaaattgaaaggcacctatattgaccgtcttccggcattagtccacccgaaaacgggacgcctccatacccgcttcaaccaaacagccacggcgaccggtcgtttgtcctcctctgatccaaaccttcagaatattccagtacgtaccccattgggccagaagatccgccgtgcgtttgtagctgaggagggttggcgtttagtggccctcgattatcgtcaaattgaattacgtgtccttgcccatctttctggcgatgagaacctcatccgcgtgtttcaggaaggcaaagacattcacactcaaacggcaagctggatgtttggattatcagctgaagcgatcgatcctttgatgcgtcgtgcagcgaagaccatcaatttcggtgttctctacggtatgagtgcctttcgtttgtcgcaggaattaggcattccctatgaagaagctcaggcgttcattcagaaatactttcaaagctatcccaaagttaaagcatggatcgagaagactctccgtgaaggccgcacacgtggttacgtagagaccttatttggacgtcgccgctatgttcccgatttaaacgctcgcgtgaaaggcaagcgtgaagccgccgaacgcatggcgttcaacatgcctgtacagggcacggcagctgacctcatgaaacttgcaatggtgcgcctttttccacaattgcgtgaagttggtgcccgcatgctcttgcaggtccacgatgaactcttgttagaagcgccaaaagagcgtattgaagaggtggcagccctcgcgaaagaagttatggaaggcgtgtggcccttagcggtgcctcttgaagtcgaagttggtattggcgaggattggctggctgccaaagga

SEQ ID NO: 4782 - protein, 841 aa, synthetic construct
  REGION 1..841: note = Variant of DNA polymerase I from Thermus sp. strain 2.9
MHHHHHHGGSGVLPVFEPKGRVLLVDGHHLAYRNFFALKGLTTSLGEPVQGVYGFAKSLLKALKEDGDVVIVVFDAKAPSFRHEAYEAYKAGRAPTPEDFPRQLALMKELVDLLGLERLEVPGFEADDVLATLAKKAEREGYEVQILTADRDLFQLLSPRISVLHPEGHRITPEWLWEKYGLRPEQWVDFRALAGDPSDNIPGVKGIGEKTALKLLKEWGSLENLLKNLDQVKPESVREKILAHLEDLKLSRELSRVRTDLPLEVDFGRRREPDWEGLKAFLERLEFGSLLHEFGLLESPLLAEEAPWPPPEGAFLGYRLSRPEPMWAELLALAASAQGRVYRAEDPHGALRGLFEVRGLLAKDLAVVALREGLDLPPTDDPMLLAYLLDPSNTTPEGVARRYGGEWTEDAAKRALLAERLHANLLGRLQGEERLLWLYEEVEKPLSRVLAHMEATGVKLDVAYLENLSLEVAAHMRRLEEEVFRLAGRSFRLNSRDQLERVLFDELGLPPIGKTEKTGKRSTSAAVLEALREVHPIVDKILQYRELAKLKGTYIDRLPALVHPKTGRLHTRFNQTATATGRLSSSDPNLQNIPVRTPLGQKIRRAFVAEEGWRLVALDYRQIELRVLAHLSGDENLIRVFQEGKDIHTQTASWMFGLSAEAIDPLMRRAAKTINFGVLYGMSAFRLSQELGIPYEEAQAFIQKYFQSYPKVKAWIEKTLREGRTRGYVETLFGRRRYVPDLNARVKGKREAAERMAFNMPVQGTAADLMKLAMVRLFPQLREVGARMLLQVHDELLLEAPKERIEEVAALAKEVMEGVWPLAVPLEVEVGIGEDWLAAKG

SEQ ID NO: 4783 - DNA, 2523 bp, synthetic construct
  misc_feature 1..2523: note = Variant of DNA polymerase I from Thermus sp. strain 2.9
  source 1..2523: mol_type = other DNA
atgcaccatcatcatcatcatggcggtagcggcgtgttaccggtgttcgagcctaaaggtcgcgtgcttctggttgatggccatcatctcgcggggcgtaacttctttgccctgaaaggattaaccaccagcctgggcgagccggtacagggtgtctacggctttgcaaagtcgctcctgaaagctctgaaagaagacggtgatgtggtgattgttgtctttgatgcgaaagcgccaagttttcgccacgaagcgtacgaagcttacaaagccgggcgtgctccaacgccggaagactttcctcgccaattggcgcttatgaaggaattagtggatttgcttggcctcgaacgcttggaagttcccggtttcgaggcagacgacgtattagcgactctcgcaaagaaagccgaacgtgagggctatgaagtccagatcttgacagcagatcgcgatcttttccagcttttatctccgcgcatctcggtgttacacccggaagggcatcgtatcaccccggaatggctctgggagaaatatggtttgcgtcccgaacaatgggtggattttcgcgccttagcaggcgatccgagcgacaatattccgggagttaaaggtatcggcgagaagacggcgctcaagctccttaaagaatgggggtcgttggagaacttgcttaagaatttagatcaggtcaaaccagagtcagtgcgtgagaagattcttgctcacctcgaagacctcaaattaagccgcgaattgtcccgtgtacgcaccgatttgccgctcgaagttgatttcggtcgccgccgcgaacctgactgggagggtcttaaagcgtttttagagcgtcttgaatttggttcgctcttgcatgaattcggccttttagaaagcccgttactggccgaagaagcaccttggccaccgcccgagggcgcgtttttaggttaccgtttgagtcgcccggaaccgatgtgggccgaattactggctcttgcagcgtctgcccagggacgtgtgtatcgcgcggaagaccctcatggtgcgctccgcggcctcttcgaagtccgtggactccttgccaaagacttagctgttgttgcattgcgcgaaggtcttgatttacctccgactgatgatccaatgcttcttgcgtacctcttggacccgtcaaacacgacgcccgaaggcgtagcccgtcgttacggcggcgagtggaccgaagatgcagcgaaacgcgcgttattggccgaacgtttgcacgccaatttattaggacgtttgcaaggcgaggaacgtctcctctggctttacgaagaagtggagaaaccattgagtcgcgtgctcgcgcatatggaagctaccggtgtcaaattagacgtggcgtatttggagaatctcagccttgaagttgctgcccacatgcgccgcttggaggaagaagtattccgtttagcaggccgttcctttcgccttaactctcgcgatcagttagaacgtgtgttgttcgatgaacttggtctccctcctatcggcaagacagagaagaccggtaaacgtagcacttcagcggcggttttagaagctcttcgcgaagtccatcccattgtggacaagatcttgcagtaccgcgaactcgcgaaattgaaaggcacctatattgaccgtcttccggcattagtccacccgaaaacgggacgcctccatacccgcttcaaccaaacagccacggcgaccggtcgtttgtcctcctctgatccaaaccttcagaatattccagtacgtaccccattgggccagaagatccgccgtgcgtttgtagctgaggagggttggcgtttagtggccctcgattatcgtcaaattgaattacgtgtccttgcccatctttctggcgatgagaacctcatccgcgtgtttcaggaaggcaaagacattcacactcaaacggcaagctggatgtttggattatcagctgaagcgatcgatcctttgatgcgtcgtgcagcgaagaccatcaatttcggtgttctctacggtatgagtgcctttcgtttgtcgcaggaattaggcattccctatgaagaagctcaggcgttcattcagaaatactttcaaagctatcccaaagttaaagcatggatcgagaagactctccgtgaaggccgcacacgtggttacgtagagaccttatttggacgtcgccgctatgttcccgatttaaacgctcgcgtgaaaggcaagcgtgaagccgccgaacgcatggcgttcaacatgcctgtacagggcacggcagctgacctcatgaaacttgcaatggtgcgcctttttccacaattgcgtgaagttggtgcccgcatgctcttgcaggtccacgatgaactcttgttagaagcgccaaaagagcgtgcggaagaggtggcagccctcgcgaaagaagttatggaaggcgtgtggcccttagcggtgcctcttgaagtcgaagttggtattggcgaggattggctggctgccaaagga

SEQ ID NO: 4784 - protein, 841 aa, synthetic construct
  REGION 1..841: note = Variant of DNA polymerase I from Thermus sp. strain 2.9
MHHHHHHGGSGVLPVFEPKGRVLLVDGHHLAGRNFFALKGLTTSLGEPVQGVYGFAKSLLKALKEDGDVVIVVFDAKAPSFRHEAYEAYKAGRAPTPEDFPRQLALMKELVDLLGLERLEVPGFEADDVLATLAKKAEREGYEVQILTADRDLFQLLSPRISVLHPEGHRITPEWLWEKYGLRPEQWVDFRALAGDPSDNIPGVKGIGEKTALKLLKEWGSLENLLKNLDQVKPESVREKILAHLEDLKLSRELSRVRTDLPLEVDFGRRREPDWEGLKAFLERLEFGSLLHEFGLLESPLLAEEAPWPPPEGAFLGYRLSRPEPMWAELLALAASAQGRVYRAEDPHGALRGLFEVRGLLAKDLAVVALREGLDLPPTDDPMLLAYLLDPSNTTPEGVARRYGGEWTEDAAKRALLAERLHANLLGRLQGEERLLWLYEEVEKPLSRVLAHMEATGVKLDVAYLENLSLEVAAHMRRLEEEVFRLAGRSFRLNSRDQLERVLFDELGLPPIGKTEKTGKRSTSAAVLEALREVHPIVDKILQYRELAKLKGTYIDRLPALVHPKTGRLHTRFNQTATATGRLSSSDPNLQNIPVRTPLGQKIRRAFVAEEGWRLVALDYRQIELRVLAHLSGDENLIRVFQEGKDIHTQTASWMFGLSAEAIDPLMRRAAKTINFGVLYGMSAFRLSQELGIPYEEAQAFIQKYFQSYPKVKAWIEKTLREGRTRGYVETLFGRRRYVPDLNARVKGKREAAERMAFNMPVQGTAADLMKLAMVRLFPQLREVGARMLLQVHDELLLEAPKERAEEVAALAKEVMEGVWPLAVPLEVEVGIGEDWLAAKG

SEQ ID NO: 4785 - DNA, 2523 bp, synthetic construct
  misc_feature 1..2523: note = Variant of DNA polymerase I from Thermus sp. strain 2.9
  source 1..2523: mol_type = other DNA
atgcaccatcatcatcatcatggcggtagcggcgtgttaccggtgttcgagcctaaaggtcgcgtgcttctggttgatggccatcatctcgcgtatcgtaacttctttgccctgaaaggattaaccaccagcctgggcgagccggtacagggtgtctacggctttgcaaagtcgctcctgaaagctctgaaagaagacggtgatgtggtgattgttgtctttgatgcgaaagcgccaagttttcgccacgaagcgtacgaagcttacaaagccgggcgtgctccaacgccggaagactttcctcgccaattggcgcttatgaaggaattagtggatttgcttggcctcgaacgcttggaagttcccggtttcgaggcagacgacgtattagcgactctcgcaaagaaagccgaacgtgagggctatgaagtccagatcttgacagcagatcgcgatcttttccagcttttatctccgcgcatctcggtgttacacccggaagggcatcgtatcaccccggaatggctctgggagaaatatggtttgcgtcccgaacaatgggtggattttcgcgccttagcaggcgatccgagcgacaatattccgggagttaaaggtatcggcgagaagacggcgctcaagctccttaaagaatgggggtcgttggagaacttgcttaagaatttagatcaggtcaaaccagagtcagtgcgtgagaagattcttgctcacctcgaagacctcaaattaagccgcgaattgtcccgtgtacgcaccgatttgccgctcgaagttgatttcggtcgccgccgcgaacctgactgggagggtcttaaagcgtttttagagcgtcttgaatttggttcgctcttgcatgaattcggccttttagaaagcccgttactggccgaagaagcaccttggccaccgcccgagggcgcgtttttaggttaccgtttgagtcgcccggaaccgatgtgggccgaattactggctcttgcagcgtctgcccagggacgtgtgtatcgcgcggaagaccctcatggtgcgctccgcggcctcttcgaagtccgtggactccttgccaaagacttagctgttgttgcattgcgctggggtcttgatttacctccgactgatgatccaatgcttcttgcgtacctcttggacccgtcaaacacgacgcccgaaggcgtagcccgtcgttacggcggcgagtggaccgaagatgcagcgaaacgcgcgttattggccgaacgtttgcacgccaatttattaggacgtttgcaaggcgaggaacgtctcctctggctttacgaagaagtggagaaaccattgagtcgcgtgctcgcgcatatggaagctaccggtgtcaaattagacgtggcgtatttggagaatctcagccttgaagttgctgcccacatgcgccgcttggaggaagaagtattccgtttagcaggccgttcctttcgccttaactctcgcgatcagttagaacgtgtgttgttcgatgaacttggtctccctcctatcggcaagacagagaagaccggtaaacgtagcacttcagcggcggttttagaagctcttcgcgaagtccatcccattgtggacaagatcttgcagtaccgcgaactcgcgaaattgaaaggcacctatattgaccgtcttccggcattagtccacccgaaaacgggacgcctccatacccgcttcaaccaaacagccacggcgaccggtcgtttgtcctcctctgatccaaaccttcagaatattccagtacgtaccccattgggccagaagatccgccgtgcgtttgtagctgaggagggttggcgtttagtggccctcgattatcgtcaaattgaattacgtgtccttgcccatctttctggcgatgagaacctcatccgcgtgtttcaggaaggcaaagacattcacactcaaacggcaagctggatgtttggattatcagctgaagcgatcgatcctttgatgcgtcgtgcagcgaagaccatcaatttcggtgttctctacggtatgagtgcctttcgtttgtcgcaggaattaggcattccctatgaagaagctcaggcgttcattcagaaatactttcaaagctatcccaaagttaaagcatggatcgagaagactctccgtgaaggccgcacacgtggttacgtagagaccttatttggacgtcgccgctatgttcccgatttaaacgctcgcgtgaaaggcaagcgtgaagccgccgaacgcatggcgttcaacatgcctgtacagggcacggcagctgacctcatgaaacttgcaatggtgcgcctttttccacaattgcgtgaagttggtgcccgcatgctcttgcaggtccacgatgaactcttgttagaagcgccaaaagagcgtgcggaagaggtggcagccctcgcgaaagaagttatggaaggcgtgtggcccttagcggtgcctcttgaagtcgaagttggtattggcgaggattggctggctgccaaagga

SEQ ID NO: 4786 - protein, 841 aa, synthetic construct
  REGION 1..841: note = Variant of DNA polymerase I from Thermus sp. strain 2.9
MHHHHHHGGSGVLPVFEPKGRVLLVDGHHLAYRNFFALKGLTTSLGEPVQGVYGFAKSLLKALKEDGDVVIVVFDAKAPSFRHEAYEAYKAGRAPTPEDFPRQLALMKELVDLLGLERLEVPGFEADDVLATLAKKAEREGYEVQILTADRDLFQLLSPRISVLHPEGHRITPEWLWEKYGLRPEQWVDFRALAGDPSDNIPGVKGIGEKTALKLLKEWGSLENLLKNLDQVKPESVREKILAHLEDLKLSRELSRVRTDLPLEVDFGRRREPDWEGLKAFLERLEFGSLLHEFGLLESPLLAEEAPWPPPEGAFLGYRLSRPEPMWAELLALAASAQGRVYRAEDPHGALRGLFEVRGLLAKDLAVVALRWGLDLPPTDDPMLLAYLLDPSNTTPEGVARRYGGEWTEDAAKRALLAERLHANLLGRLQGEERLLWLYEEVEKPLSRVLAHMEATGVKLDVAYLENLSLEVAAHMRRLEEEVFRLAGRSFRLNSRDQLERVLFDELGLPPIGKTEKTGKRSTSAAVLEALREVHPIVDKILQYRELAKLKGTYIDRLPALVHPKTGRLHTRFNQTATATGRLSSSDPNLQNIPVRTPLGQKIRRAFVAEEGWRLVALDYRQIELRVLAHLSGDENLIRVFQEGKDIHTQTASWMFGLSAEAIDPLMRRAAKTINFGVLYGMSAFRLSQELGIPYEEAQAFIQKYFQSYPKVKAWIEKTLREGRTRGYVETLFGRRRYVPDLNARVKGKREAAERMAFNMPVQGTAADLMKLAMVRLFPQLREVGARMLLQVHDELLLEAPKERAEEVAALAKEVMEGVWPLAVPLEVEVGIGEDWLAAKG

SEQ ID NO: 4787 - DNA, 2523 bp, synthetic construct
  misc_feature 1..2523: note = Variant of DNA polymerase I from Thermus sp. strain 2.9
  source 1..2523: mol_type = other DNA
atgcaccatcatcatcatcatggcggtagcggcgtgttaccggtgttcgagcataaaggtcgcgtgcttctggttgatggccatcatctcgcgtatcgtaacttctttgccctgaaaggattaaccaccagcctgggcgagccggtacagggtgtctacggctttgcaaagtcgctcctgaaagctctgaaagaagacggtgatgtggtgattgttgtctttgatgcgaaagcgccaagttttcgccacgaagcgtacgaagcttacaaagccgggcgtgctccaacgccggaagactttcctcgccaattggcgcttatgaaggaattagtggatttgcttggcctcgaacgcttggaagttcccggtttcgaggcagacgacgtattagcgactctcgcaaagaaagccgaacgtgagggctatgaagtccagatcttgacagcagatcgcgatcttttccagcttttatctccgcgcatctcggtgttacacccggaagggcatcgtatcaccccggaatggctctgggagaaatatggtttgcgtcccgaacaatgggtggattttcgcgccttagcaggcgatccgagcgacaatattccgggagttaaaggtatcggcgagaagacggcgctcaagctccttaaagaatgggggtcgttggagaacttgcttaagaatttagatcaggtcaaaccagagtcagtgcgtgagaagattcttgctcacctcgaagacctcaaattaagccgcgaattgtcccgtgtacgcaccgatttgccgctcgaagttgatttcggtcgccgccgcgaacctgactgggagggtcttaaagcgtttttagagcgtcttgaatttggttcgctcctgcatgaattcggccttttagaaagcccgttagtggccgaagaagcaccttggccaccgcccgagggcgcgtttttaggttaccgtttgagtcgcccggaaccgatgtgggccgaattactggctcttgcagcgtctgcccagggacgtgtgtatcgcgcggaagaccctcatggtgcgctccgcggcctcttcgaagtccgtggactccttgccaaagacttagctgttgttgcattgcgcgaaggtcttgatttacctccgactgatgatccaatgcttcttgcgtacctcttggacccgtcaaacacgacgcccgaaggcgtagcccgtcgttacggcggcgagtggaccgaagatgcagcgaaacgcgcgttattggccgaacgtttgcacgaaaatttattaggacgtttgcaaggcgaggaacgtctcctctggctttacgaagaagtggagaaaccattgagtcgcgtgctcgcgcatatggaagctaccggtgtcaaattagacgtggcgtatttggagaatctcagccttgaagttgctgcccacatgcgccgcttggaggaagaagtattccgtttagcaggccgttcctttcgccttaactctcgcgatcagttagaacgtgtgttgttcgatgaacttggtctccctcctatcggcaagacagagaagaccggtaaacgtagcacttcagcagcggttttagacgctcttcgcgaagtccatcccattgtggacaagatcttgcagtaccgcgaactcgcgaaattgaaaggcacctatattgaccgtcttccggcattagtccacccgaaaacgggacgcctccatacccgcttcaaccaaacagccacggcgaccggtcgtttgtcctcctctgatccaaaccttcagaatattccagtacgtaccccattgggccagaagatccgccgtgcgtttgtagctgaggagggttggcgtttagtggccctcgattatcgtcaaattgaattacgtgtccttgcccatctttctggcgatgagaacctcatccgcgtgtttcaggaaggcaaagacattcacactcaaacggcaagctggatgtttggattatcagctgaagcgatcgatcctttgatgcgtcgtgcagcgaagaccatcaatttcggtgttctctacggtatgagtgcctttcgtttgtcgcaggaattaggcattccctatgaagaagctcaggcgttcattcagaaatactttcaaagctatcccaaagttaaagcatggatcgagaagactctccgtgaaggccgcacacgtggttacgtagagaccttatttggacgtcgccgctatgttcccgatttaaacgctcgcgtgaaaggcaagcgtgaagccgccgaacgcatggcgttcaacatgcctgtacagggcacggcagctgacctcatgaaacttgcaatggtgcgcctttttccacaattgcgtgaagttggtgcccgcatgctcttgcaggtccacgatgaactcttgttagaagcgccaaaagagcgtgcggaagaggtggcagccctcgcgaaagaagttatggaaggcgtgtggcccttagcggtgcctcttgaagtcgaagttggtattggcgaggattggctggctgccaaagga

SEQ ID NO: 4788 - protein, 841 aa, synthetic construct
  REGION 1..841: note = Variant of DNA polymerase I from Thermus sp. strain 2.9
MHHHHHHGGSGVLPVFEHKGRVLLVDGHHLAYRNFFALKGLTTSLGEPVQGVYGFAKSLLKALKEDGDVVIVVFDAKAPSFRHEAYEAYKAGRAPTPEDFPRQLALMKELVDLLGLERLEVPGFEADDVLATLAKKAEREGYEVQILTADRDLFQLLSPRISVLHPEGHRITPEWLWEKYGLRPEQWVDFRALAGDPSDNIPGVKGIGEKTALKLLKEWGSLENLLKNLDQVKPESVREKILAHLEDLKLSRELSRVRTDLPLEVDFGRRREPDWEGLKAFLERLEFGSLLHEFGLLESPLVAEEAPWPPPEGAFLGYRLSRPEPMWAELLALAASAQGRVYRAEDPHGALRGLFEVRGLLAKDLAVVALREGLDLPPTDDPMLLAYLLDPSNTTPEGVARRYGGEWTEDAAKRALLAERLHENLLGRLQGEERLLWLYEEVEKPLSRVLAHMEATGVKLDVAYLENLSLEVAAHMRRLEEEVFRLAGRSFRLNSRDQLERVLFDELGLPPIGKTEKTGKRSTSAAVLDALREVHPIVDKILQYRELAKLKGTYIDRLPALVHPKTGRLHTRFNQTATATGRLSSSDPNLQNIPVRTPLGQKIRRAFVAEEGWRLVALDYRQIELRVLAHLSGDENLIRVFQEGKDIHTQTASWMFGLSAEAIDPLMRRAAKTINFGVLYGMSAFRLSQELGIPYEEAQAFIQKYFQSYPKVKAWIEKTLREGRTRGYVETLFGRRRYVPDLNARVKGKREAAERMAFNMPVQGTAADLMKLAMVRLFPQLREVGARMLLQVHDELLLEAPKERAEEVAALAKEVMEGVWPLAVPLEVEVGIGEDWLAAKG

SEQ ID NO: 4789 - DNA, 2523 bp, synthetic construct
  misc_feature 1..2523: note = Variant of DNA polymerase I from Thermus sp. strain 2.9
  source 1..2523: mol_type = other DNA
atgcaccatcatcatcatcatggcggtagcggcgtgttaccggtgttcgagcctaaaggtcgcgtgcttctggttgatggccatcatctcgcgtatcgtaacttctttgccctgaaaggattaaccaccagcctgggcgagccggtacagggtgtctacggctttgcaaagtcgctcctgaaagctctgaaagaagacggtgatgtggtgattgttgtctttgatgcgaaagcgccaagttttcgccacgaagcgtacgaagcttacaaagccgggcgtgctccaacgccggaagactttcctcgccaattggcgcttatgaaggaattagtggatttgcttggcctcgaacgcttggaagttcccggtttcgaggcagacgacgtattagcgactctcgcaaagaaagccgaacgtgagggctatgaagtccagatcttgacagcagatcgcgatcttttccagcttttatctccgcgcatctcggtgttacacccggaagggcatcgtatcaccccggaatggctctgggagaaatatggtttgcgtcccgaacaatgggtggattttcgcgccttagcaggcgatccgagcgacaatattccgggagttaaaggtatcggcgagaagacggcgctcaagctccttaaagaatgggggtcgttggagaacttgcttaagaatttagatcaggtcaaaccagagtcagtgcgtgagaagattcttgctcacctcgaagacctcaaattaagccgcgaattgtcccgtgtacgcaccgatttgccgctcgaagttgatttcggtcgccgccgcgaacctgactgggagggtcttaaagcgtttttagagcgtcttgaatttggttcgctcttgcatgaattcggccttttagaaagcccgttactggccgaagaagcaccttggccaccgcccgagggcgcgtttttaggttaccgtttgagtcgcccggaaccgatgtgggccgaattactggctcttgcagcgtctgcccagggacgtgtgtatcgcgcggaagaccctcatggtgcgctccgcggcctcttcgaagtccgtggactccttgccaaagacttagctgttgttgcattgcgcgaaggtcttgatttacctccgactgatgatccaatgcttcttgcgtacctcttggacccgtcaaacacgacgcccgaaggcgtagcccgtcgttacggcggcgagtggaccgaagatgcagcgaaacgcgcgttattggccgaacgtttgcacgccaatttattaggacgtttgcaaggcgaggaacgtctcctctggctttacgaagaagtggagaaaccattgagtcgcgtgctcgcgcatatggaagctaccggtgtcaaattagacgtggcgtatttggagaatctcagccttgaagttgctgcccacatgcgccgcttggaggaagaagtattccgtttagcaggccgttcctttcgccttaactctcgcgatcagttagaacgtgtgttgttcgatgaacttggtctccctcctatcggcaagacagagaagaccggtaaacgtagcacttcagcggcggttttagaagctcttcgcgaagtccatcccattgtggacaagatcttgcagtaccgcgaactcgcgaaattgaaaggcacctatattgaccgtcttccggcattagtccacccgaaaacgggacgcctccatacccgcttcaaccaaacagccacggcgaccggtcgtttgtcctcctctgatccaaaccttcagaatattccagtacgtaccccattgggccagaagatccgccgtgcgtttgtagctgaggagggttggcgtttagtggccctcgattatcgtcaaattgaattacgtgtccttgcccatctttctggcgatgagaacctcatccgcgtgtttcaggaaggcaaagacattcacactcaaacggcaagctggatgtttggattatcagctgaagcgatcgatcctttgatgcgtcgtgcagcgaagaccatcaatttcggtgttctctacggtatgagtgcctttcgtttgtcgcagcgtttaggcattccctatgaagaagctcaggcgttcattcagaaatactttcaaagctatcccaaagttaaagcatggatcgagaagactctccgtgaaggccgcacacgtggttacgtagagaccttatttggacgtcgccgctatgttcccgatttaaacgctcgcgtgaaaggcaagcgtgaagccgccgaacgcatggcgttcaacatgcctgtacagggcacggcagctgacctcatgaaacttgcaatggtgcgcctttttccacaattgcgtgaagttggtgcccgcatgctcttgcaggtccacgatgaactcttgttagaagcgccaaaagagcgtgcggaagaggtggcagccctcgcgaaagaagttatggaaggcgtgtggcccttagcggtgcctcttgaagtcgaagttggtattggcgaggattggctggctgccaaagga

SEQ ID NO: 4790 - protein, 841 aa, synthetic construct
  REGION 1..841: note = Variant of DNA polymerase I from Thermus sp. strain 2.9
MHHHHHHGGSGVLPVFEPKGRVLLVDGHHLAYRNFFALKGLTTSLGEPVQGVYGFAKSLLKALKEDGDVVIVVFDAKAPSFRHEAYEAYKAGRAPTPEDFPRQLALMKELVDLLGLERLEVPGFEADDVLATLAKKAEREGYEVQILTADRDLFQLLSPRISVLHPEGHRITPEWLWEKYGLRPEQWVDFRALAGDPSDNIPGVKGIGEKTALKLLKEWGSLENLLKNLDQVKPESVREKILAHLEDLKLSRELSRVRTDLPLEVDFGRRREPDWEGLKAFLERLEFGSLLHEFGLLESPLLAEEAPWPPPEGAFLGYRLSRPEPMWAELLALAASAQGRVYRAEDPHGALRGLFEVRGLLAKDLAVVALREGLDLPPTDDPMLLAYLLDPSNTTPEGVARRYGGEWTEDAAKRALLAERLHANLLGRLQGEERLLWLYEEVEKPLSRVLAHMEATGVKLDVAYLENLSLEVAAHMRRLEEEVFRLAGRSFRLNSRDQLERVLFDELGLPPIGKTEKTGKRSTSAAVLEALREVHPIVDKILQYRELAKLKGTYIDRLPALVHPKTGRLHTRFNQTATATGRLSSSDPNLQNIPVRTPLGQKIRRAFVAEEGWRLVALDYRQIELRVLAHLSGDENLIRVFQEGKDIHTQTASWMFGLSAEAIDPLMRRAAKTINFGVLYGMSAFRLSQRLGIPYEEAQAFIQKYFQSYPKVKAWIEKTLREGRTRGYVETLFGRRRYVPDLNARVKGKREAAERMAFNMPVQGTAADLMKLAMVRLFPQLREVGARMLLQVHDELLLEAPKERAEEVAALAKEVMEGVWPLAVPLEVEVGIGEDWLAAKG

SEQ ID NO: 4791 - DNA, 2523 bp, synthetic construct
  misc_feature 1..2523: note = Variant of DNA polymerase I from Thermus sp. strain 2.9
  source 1..2523: mol_type = other DNA
atgcaccatcatcatcatcatggcggtagcggcgtgttaccggtgttcgagcctaaaggtcgcgtgcttctggttgatggccatcatctcgcgtatcgtaacttctttgccctgaaaggattaaccaccagcctgggcgagccggtacagggtgtctacggctttgcaaagtcgctcctgaaagctctgaaagaagacggtgatgtggtgattgttgtctttgatgcgaaagcgccaagttttcgccacgaagcgtacgaagcttacaaagccgggcgtgctccaacgccggaagactttcctcgccaattggcgcttatgaaggaattagtggatttgcttggcctcgaacgcttggaagttcccggtttcgaggcagacgacgtattagcgactctcgcaaagaaagccgaacgtgagggctatgaagtccagatcttgacagcagatcgcgatcttttccagcttttatctccgcgcatctcggtgttacacccggaagggcatcgtatcaccccggaatggctctgggagaaatatggtttgcgtcccgaacaatgggtggattttcgcgccttagcaggcgatccgagcgacaatattccgggagttaaaggtatcggcgagaagacggcgctcaagctccttaaagaatgggggtcgttggagaacttgcttaagaatttagatcaggtcaaaccagagtcagtgcgtgagaagattcttgctcacctcgaagacctcaaattaagccgcgaattgtcccgtgtacgcaccgatttgccgctcgaagttgatttcggtcgccgccgcgaacctgactgggagggtcttaaagcgtttttagagcgtcttgaatttggttcgctcttgcatgaattcggccttttagaaagcccgttactggccgaagaagcaccttggccaccgcccgagggcgcgtttttaggttaccgtttgagtcgcccggaaccgatgtgggccgaattactggctcttgcagcgtctgcccagggacgtgtgtatcgcgcggaagaccctcatggtgcgctccgcggcctcttcgaagtccgtggactccttgccaaagacttagctgttgttgcattgcgcgaaggtcttgatttacctccgactgatgatccaatgcttcttgcgtacctcttggacccgtcaaacacgacgcccgaaggcgtagcccgtcgttacggcggcgagtggaccgaagatgcagcgaaacgcgcgttattggccgaacgtttgcacgccaatttattaggacgtttgcaaggcgaggaacgtctcctctggctttacgaagaagtggagaaaccattgagtcgcgtgctcgcgcatatggaagctaccggtgtcaaattagacgtggcgtatttggagaatctcagccttgaagttgctgcccacatgcgccgcttggaggaagaagtattccgtttagcaggccgttcctttcgccttaactctcgcgatcagttagaacgtgtgttgttcgatgaacttggtctccctcctatcggcaagacagagaagaccggtaaacgtagcactaaggcggcggttttagaagctcttcgcgaagtccatcccattgtggacaagatcttgcagtaccgcgaactcgcgaaattgaaaggcacctatattgaccgtcttccggcattagtccacccgaaaacgggacgcctccatacccgcttcaaccaaacagccacggcgaccggtcgtttgtcctcctctgatccaaaccttcagaatattccagtacgtaccccattgggccagaagatccgccgtgcgtttgtagctgaggagggttggcgtttagtggccctcgattatcgtcaaattgaattacgtgtccttgcccatctttctggcgatgagaacctcatccgcgtgtttcaggaaggcaaagacattcacactcaaacggcaagctggatgtttggattatcagctgaagcgatcgatcctttgatgcgtcgtgcagcgaagaccatcaatttcggtgttctctacggtatgagtgcctttcgtttgtcgcaggaattaggcattccctatgaagaagctcaggcgttcattcagaaatactttcaaagctatcccaaagttaaagcatggatcgagaagactctccgtgaaggccgcacacgtggttacgtagagaccttatttggacgtcgccgctatgttcccgatttaaacgctcgcgtgaaaggcaagcgtgaagccgccgaacgcatggcgttcaacatgcctgtacagggcacggcagctgacctcatgaaacttgcaatggtgcgcctttttccacaattgcgtgaagttggtgcccgcatgctcttgcaggtccacgatgaactcttgttagaagcgccaaaagagcgtgcggaagaggtggcagccctcgcgaaagaagttatggaaggcgtgtggcccttagcggtgcctcttgaagtcgaagttggtattggcgaggattggctggctgccaaagga

SEQ ID NO: 4792 - protein, 841 aa, synthetic construct
  REGION 1..841: note = Variant of DNA polymerase I from Thermus sp. strain 2.9
MHHHHHHGGSGVLPVFEPKGRVLLVDGHHLAYRNFFALKGLTTSLGEPVQGVYGFAKSLLKALKEDGDVVIVVFDAKAPSFRHEAYEAYKAGRAPTPEDFPRQLALMKELVDLLGLERLEVPGFEADDVLATLAKKAEREGYEVQILTADRDLFQLLSPRISVLHPEGHRITPEWLWEKYGLRPEQWVDFRALAGDPSDNIPGVKGIGEKTALKLLKEWGSLENLLKNLDQVKPESVREKILAHLEDLKLSRELSRVRTDLPLEVDFGRRREPDWEGLKAFLERLEFGSLLHEFGLLESPLLAEEAPWPPPEGAFLGYRLSRPEPMWAELLALAASAQGRVYRAEDPHGALRGLFEVRGLLAKDLAVVALREGLDLPPTDDPMLLAYLLDPSNTTPEGVARRYGGEWTEDAAKRALLAERLHANLLGRLQGEERLLWLYEEVEKPLSRVLAHMEATGVKLDVAYLENLSLEVAAHMRRLEEEVFRLAGRSFRLNSRDQLERVLFDELGLPPIGKTEKTGKRSTKAAVLEALREVHPIVDKILQYRELAKLKGTYIDRLPALVHPKTGRLHTRFNQTATATGRLSSSDPNLQNIPVRTPLGQKIRRAFVAEEGWRLVALDYRQIELRVLAHLSGDENLIRVFQEGKDIHTQTASWMFGLSAEAIDPLMRRAAKTINFGVLYGMSAFRLSQELGIPYEEAQAFIQKYFQSYPKVKAWIEKTLREGRTRGYVETLFGRRRYVPDLNARVKGKREAAERMAFNMPVQGTAADLMKLAMVRLFPQLREVGARMLLQVHDELLLEAPKERAEEVAALAKEVMEGVWPLAVPLEVEVGIGEDWLAAKG

SEQ ID NO: 4793 - DNA, 2523 bp, synthetic construct
  misc_feature 1..2523: note = Variant of DNA polymerase I from Thermus sp. strain 2.9
  source 1..2523: mol_type = other DNA
atgcaccatcatcatcatcatggcggtagcggcgtgttaccggtgttcgagcctaaaggtcgcgtgcttctggttgatggccatcatctcgcgtatcgtaacttctttgccctgaaaggattaaccaccagcctgggcgagccggtacagggtgtctacggctttgcaaagtcgctcctgaaagctctgaaagaagacggtgatgtggtgattgttgtctttgatgcgaaagcgccaagttttcgccacgaagcgtacgaagcttacaaagccgggcgtgctccaacgccggaagactttcctcgccaattggcgcttatgaaggaattagtggatttgcttggcctcgaacgcttggaagttcccggtttcgaggcagacgacgtattagcgactctcgcaaagaaagccgaacgtgagggctatgaagtccagatcttgacagcagatcgcgatcttttccagcttttatctccgcgcatctcggtgttacacccggaagggcatcgtatcaccccggaatggctctgggagaaatatggtttgcgtcccgaacaatgggtggattttcgcgccttagcaggcgatccgagcgacaatattccgggagttaaaggtatcggcgagaagacggcgctcaagctccttaaagaatgggggtcgttggagaacttgcttaagaatttagatcaggtcaaaccagagtcagtgcgtgagaagattcttgctcacctcgaagacctcaaattaagccgcgaattgtcccgtgtacgcaccgatttgccgctcgaagttgatttcggtcgccgccgcgaacctgactgggagggtcttaaagcgtttttagagcgtcttgaatttggttcgctcttgcatgaattcggccttttagaaagcccgttactggccgaagaagcaccttggccaccgcccgagggcgcgtttttaggttaccgtttgagtcgcccggaaccgatgtgggccgaattactggctcttgcagcgtctgcccagggacgtgtgtatcgcgcggaagaccctcatggtgcgctccgcggcctcttcgaagtccgtggactccttgccaaagacttagctgttgttgcattgcgcgaaggtcttgatttacctccgactgatgatccaatgcttcttgcgtacctcttggacccgtcaaacacgacgcccgaaggcgtagcccgtcgttacggcggcgagtggaccgaagatgcagcgaaacgcgcgttattggccgaacgtttgcacgccaatttattaggacgtttgcaaggcgaggaacgtctcctctggctttacgaagaagtggagaaaccattgagtcgcgtgctcgcgcatatggaagctaccggtgtcaaattagacgtggcgtatttggagaatctcagccttgaagttgctgcccacatgcgccgcttggaggaagaagtattccgtttagcaggccgttcctttcgccttaactctcgcgatcagttagaacgtgtgttgttcgatgaacttggtctccctcctatcggcaagacagagaagaccggtaaacgtagcacttcagcggcggttttagaagctcttcgcgaagtccatcccattgtggacaagatcttgcagtaccgccgtctcgcgaaattgaaaggcacctatattgaccgtcttccggcattagtccacccgaaaacgggacgcctccatacccgcttcaaccaaacagccacggcgaccggtcgtttgtcctcctctgatccaaaccttcagaatattccagtacgtaccccattgggccagaagatccgccgtgcgtttgtagctgaggagggttggcgtttagtggccctcgattatcgtcaaattgaattacgtgtccttgcccatctttctggcgatgagaacctcatccgcgtgtttcaggaaggcaaagacattcacactcaaacggcaagctggatgtttggattatcagctgaagcgatcgatcctttgatgcgtcgtgcagcgaagaccatcaatttcggtgttctctacggtatgagtgcctttcgtttgtcgcaggaattaggcattccctatgaagaagctcaggcgttcattcagaaatactttcaaagctatcccaaagttaaagcatggatcgagaagactctccgtgaaggccgcacacgtggttacgtagagaccttatttggacgtcgccgctatgttcccgatttaaacgctcgcgtgaaaggcaagcgtgaagccgccgaacgcatggcgttcaacatgcctgtacagggcacggcagctgacctcatgaaacttgcaatggtgcgcctttttccacaattgcgtgaagttggtgcccgcatgctcttgcaggtccacgatgaactcttgttagaagcgccaaaagagcgtgcggaagaggtggcagccctcgcgaaagaagttatggaaggcgtgtggcccttagcggtgcctcttgaagtcgaagttggtattggcgaggattggctggctgccaaagga

SEQ ID NO: 4794 - protein, 841 aa, synthetic construct
  REGION 1..841: note = Variant of DNA polymerase I from Thermus sp. strain 2.9
MHHHHHHGGSGVLPVFEPKGRVLLVDGHHLAYRNFFALKGLTTSLGEPVQGVYGFAKSLLKALKEDGDVVIVVFDAKAPSFRHEAYEAYKAGRAPTPEDFPRQLALMKELVDLLGLERLEVPGFEADDVLATLAKKAEREGYEVQILTADRDLFQLLSPRISVLHPEGHRITPEWLWEKYGLRPEQWVDFRALAGDPSDNIPGVKGIGEKTALKLLKEWGSLENLLKNLDQVKPESVREKILAHLEDLKLSRELSRVRTDLPLEVDFGRRREPDWEGLKAFLERLEFGSLLHEFGLLESPLLAEEAPWPPPEGAFLGYRLSRPEPMWAELLALAASAQGRVYRAEDPHGALRGLFEVRGLLAKDLAVVALREGLDLPPTDDPMLLAYLLDPSNTTPEGVARRYGGEWTEDAAKRALLAERLHANLLGRLQGEERLLWLYEEVEKPLSRVLAHMEATGVKLDVAYLENLSLEVAAHMRRLEEEVFRLAGRSFRLNSRDQLERVLFDELGLPPIGKTEKTGKRSTSAAVLEALREVHPIVDKILQYRRLAKLKGTYIDRLPALVHPKTGRLHTRFNQTATATGRLSSSDPNLQNIPVRTPLGQKIRRAFVAEEGWRLVALDYRQIELRVLAHLSGDENLIRVFQEGKDIHTQTASWMFGLSAEAIDPLMRRAAKTINFGVLYGMSAFRLSQELGIPYEEAQAFIQKYFQSYPKVKAWIEKTLREGRTRGYVETLFGRRRYVPDLNARVKGKREAAERMAFNMPVQGTAADLMKLAMVRLFPQLREVGARMLLQVHDELLLEAPKERAEEVAALAKEVMEGVWPLAVPLEVEVGIGEDWLAAKG

SEQ ID NO: 4795 - DNA, 2523 bp, synthetic construct
  misc_feature 1..2523: note = Variant of DNA polymerase I from Thermus sp. strain 2.9
  source 1..2523: mol_type = other DNA
atgcaccatcatcatcatcatggcggtagcggcgtgttaccggtgttcgagcctaaaggtcgcgtgcttctggttgatggccatcatctcgcgtatcgtaacttctttgccctgaaaggattaaccaccagcctgggcgagccggtacagggtgtctacggctttgcaaagtcgctcctgaaagctctgaaagaagacggtgatgtggtgattgttgtctttgatgcgaaagcgccaagttttcgccacgaagcgtacgaagcttacaaagccgggcgtgctccaacgccggaagactttcctcgccaattggcgcttatgaaggaattagtggatttgcttggcctcgaacgcttggaagttcccggtttcgaggcagacgacgtattagcgactctcgcaaagaaagccgaacgtgagggctatgaagtccagatcttgacagcagatcgcgatcttttccagcttttatctccgcgcatctcggtgttacacccggaagggcatcgtatcaccccggaatggctctgggagaaatatggtttgcgtcccgaacaatgggtggattttcgcgccttagcaggcgatccgagcgacaatattccgggagttaaaggtatcggcgagaagacggcgctcaagctccttaaagaatgggggtcgttggagaacttgcttaagaatttagatcaggtcaaaccagagtcagtgcgtgagaagattcttgctcacctcgaagacctcgagttaagccgcgaattgtcccgtgtacgcaccgatttgccgctcgaagttgatttcggtcgccgccgcgaacctgactgggagggtcttaaagcgtttttagagcgtcttgaatttggttcgctcttgcatgaattcggccttttagaaagcccgttactggccgaagaagcaccttggccaccgcccgagggcgcgtttttaggttaccgtttgacccgcccggaaccgatgtgggccgaattactggctcttgcagcgtctgcccagggacgtgtgtatcgcgcggaagaccctcatggtgcgctccgcggcctcttcgaagtccgtggactccttgccaaagacttagctgttgttgcattgcgcgaaggtcttgatttacctccgactgatgatccaatgcttcttgcgtacctcttggacccgtcaaacacgacgcccgaaggcgtagcccgtcgttacggcggcgagtggaccgaagatgcagcgaaacgcgcgttattggccgaacgtttgcacgcgaatttactgggacgtttgcaaggcgaggaacgtctcctctggctttacgaagaagtggagaaaccattgagtcgcgtgctcgcgcatatggaagctaccggtgtcaaattagacgtggcgtatttggagaatctcagccttgaagttgctgcccacatgcgccgcttggaggaagaagtattccgtttagcaggccgttcctttcgccttaactctcgcgatcagttagaacgtgtgttgttcgatgaacttggtctccctcctatcggcaagacagagaagaccggtaaacgtagcacttcagcggcggttttagaagctcttcgcgaagtccatcccattgtggacaagatcttgcagtaccgcgaactcgcgaaattgaaaggcacctatattgaccgtcttccggcattagtccacccgaaaacgggacgcctccatacccgcttcaaccaaacagccacggcgaccggtcgtttgtcctcctctgatccaaaccttcagaatattccagtacgtacccctttgggccagaagatccgccgtgcgtttgtagctgaggagggttggcgtttagtggccctcgattatcgtcaaattgaattacgtgtccttgcccatctttctggcgatgagaacctcatccgcgtgtttcaagaaggcaaagacattcacactcaaacggcaagctggatgtttggattatcagctgaagcgatcgatcctttgatgcgtcgtgcagcgaagaagatcaatttcggtgttctctacggtatgagtgcctttcgtttgtcgcaggaattaggcattccctatgaagaagctcaggcgttcattcagaaatactttcaaagctatcccaaagttaaagcatggatcgagaagactctccgtgaaggccgcacccgtggttacgtagagaccttatttggacgtcgccgctatgttcccgatttaaacgcccgcgtgaaaggcaagcgtgaagccgccgaacgcatggcgttcaacatgcctgtacagggcacggcagctgacctcatgaaacttgcaatggtgcgcctttttccacaattgcgtgaagttggtgcccgcatgctcttgcaggtccatgatgaactcttgttcgaagcgccaaaagagcgtgcggaagaggtggcagccctcgcgaaagaagttatggaaggcgtgtggcccttagcggtgcctcttgaagtcgaagttggtattggcgaggattggctggctgccaaagga

SEQ ID NO: 4796 - protein, 841 aa, synthetic construct
  REGION 1..841: note = Variant of DNA polymerase I from Thermus sp. strain 2.9
MHHHHHHGGSGVLPVFEPKGRVLLVDGHHLAYRNFFALKGLTTSLGEPVQGVYGFAKSLLKALKEDGDVVIVVFDAKAPSFRHEAYEAYKAGRAPTPEDFPRQLALMKELVDLLGLERLEVPGFEADDVLATLAKKAEREGYEVQILTADRDLFQLLSPRISVLHPEGHRITPEWLWEKYGLRPEQWVDFRALAGDPSDNIPGVKGIGEKTALKLLKEWGSLENLLKNLDQVKPESVREKILAHLEDLELSRELSRVRTDLPLEVDFGRRREPDWEGLKAFLERLEFGSLLHEFGLLESPLLAEEAPWPPPEGAFLGYRLTRPEPMWAELLALAASAQGRVYRAEDPHGALRGLFEVRGLLAKDLAVVALREGLDLPPTDDPMLLAYLLDPSNTTPEGVARRYGGEWTEDAAKRALLAERLHANLLGRLQGEERLLWLYEEVEKPLSRVLAHMEATGVKLDVAYLENLSLEVAAHMRRLEEEVFRLAGRSFRLNSRDQLERVLFDELGLPPIGKTEKTGKRSTSAAVLEALREVHPIVDKILQYRELAKLKGTYIDRLPALVHPKTGRLHTRFNQTATATGRLSSSDPNLQNIPVRTPLGQKIRRAFVAEEGWRLVALDYRQIELRVLAHLSGDENLIRVFQEGKDIHTQTASWMFGLSAEAIDPLMRRAAKKINFGVLYGMSAFRLSQELGIPYEEAQAFIQKYFQSYPKVKAWIEKTLREGRTRGYVETLFGRRRYVPDLNARVKGKREAAERMAFNMPVQGTAADLMKLAMVRLFPQLREVGARMLLQVHDELLFEAPKERAEEVAALAKEVMEGVWPLAVPLEVEVGIGEDWLAAKG

SEQ ID NO: 4797 - DNA, 2523 bp, synthetic construct
  misc_feature 1..2523: note = Variant of DNA polymerase I from Thermus sp. strain 2.9
  source 1..2523: mol_type = other DNA
atgcaccatcatcatcatcatggcggtagcggcgtgttaccggtgttcgagcctaaaggtcgcgtgcttctggttgatggccatcatctcgcgtatcgtaacttctttgccctgaaaggattaaccaccagcctgggcgagccggtacagggtgtctacggctttgcaaagtcgctcctgaaagctctgaaagaagacggtgatgtggtgattgttgtctttgatgcgaaagcgccaagttttcgccacgaagcgtacgaagcttacaaagccgggcgtgctccaacgccggaagactttcctcgccaattggcgcttatgaaggaattagtggatttgcttggcctcgaacgcttggaagttcccggtttcgaggcagacgacgtattagcgactctcgcaaagaaagccgaacgtgagggctatgaagtccagatcttgacagcagatcgcgatcttttccagcttttatctccgcgcatctcggtgttacacccggaagggcatcgtatcaccccggaatggctctgggagaaatatggtttgcgtcccgaacaatgggtggattttcgcgccttagcaggcgatccgagcgacaatattccgggagttaaaggtatcggcgagaagacggcgctcaagctccttaaagaatgggggtcgttggagaacttgcttaagaatttagatcaggtcaaaccagagtcagtgcgtgagaagattcttgctcacctcgaagacctcaaattaagccgcgaattgtcccgtgtacgcaccgatttgccgctcgaagttgatttcggtcgccgccgcgaacctgactgggagggtcttaaagcgtttttagagcgtcttgaatttggttcgctcttgcatgaattcggccttttagaaagcccgttactggccgaagaagcaccttggccaccgcccgagggcgcgtttttaggttaccgtttgagtcgcccggaaccgatgtgggccgaaacgctggctcttgcagcgtctgcccagggacgtgtgtatcgcgcggaagaccctcatggtgcgctccgcggcctcttcgaagtccgtggactccttgccaaagacttagctgttgttgcattgcgcgaaggtcttgatttacctccgactgatgatccaatgcttcttgcgtacctcttggacccgtcaaacacgacgcccgaaggcgtagcccgtcgttacggcggcgagtggaccgaagatgcagcgaaacgcgcgttattggccgaacgtttgcacgccaatttattaggacgtttgcaaggcgaggaacgtctcctctggctttacgaagaagtggagaaaccattgagtcgcgtgctcgcgcatatggaagctaccggtgtcaaattagacgtggcgtatttggagaatctcagccttgaagttgctgcccacatgcgccgcttggaggaagaagtattccgtttagcaggccgttcctttcgccttaactctcgcgatcagttagaacgtgtgttgttcgatgaacttggtctccctcctatcggcaagacagagaagaccggtaaacgtagcacttcagcggcggttttagaagctcttcgcgaagtccatcccattgtggacaagatcttgcagtaccgcgaactcgcgaaattgaaaggcacctatattgaccgtcttccggcattagtccacccgaaaacgggacgcctccatacccgcttcaaccaaacagccacggcgaccggtcgtttgtcctcctctgatccaaaccttcagaatattccagtacgtaccccattgggccagaagatccgccgtgcgtttgtagctgaggagggttggcgtttagtggccctcgattatcgtcaaattgaattacgtgtccttgcccatctttctggcgatgagaacctcatccgcgtgtttcaggaaggcaaagacattcacactcaaacggcaagctggatgtttggattatcagctgaagcgatcgatcctttgatgcgtcgtgcagcgaagaccatcaatttcggtgttctctacggtatgagtgcctttcgtttgtcgcaggaattaggcattccctatgaagaagctcaggcgttcattcagaaatactttcaaagctatcccaaagttaaagcatggatcgagaagactctccgtgaaggccgcacacgtggttacgtagagaccttatttggacgtcgccgctatgttcccgatttaaacgctcgcgtgaaaggcaagcgtgaagccgccgaacgcatggcgttcaacatgcctgtacagggcacggcagctgacctcatgaaacttgcaatggtgcgcctttttccacaattgcgtgaagttggtgcccgcatgctcttgcaggtccacgatgaactcttgttagaagcgccaaaagagcgtgcggaagaggtggcagccctcgcgaaagaagttatggaaggcgtgtggcccttagcggtgcctcttgaagtcgaagttggtattggcgaggattggctggctgccaaagga

SEQ ID NO: 4798 - protein, 841 aa, synthetic construct
  REGION 1..841: note = Variant of DNA polymerase I from Thermus sp. strain 2.9
MHHHHHHGGSGVLPVFEPKGRVLLVDGHHLAYRNFFALKGLTTSLGEPVQGVYGFAKSLLKALKEDGDVVIVVFDAKAPSFRHEAYEAYKAGRAPTPEDFPRQLALMKELVDLLGLERLEVPGFEADDVLATLAKKAEREGYEVQILTADRDLFQLLSPRISVLHPEGHRITPEWLWEKYGLRPEQWVDFRALAGDPSDNIPGVKGIGEKTALKLLKEWGSLENLLKNLDQVKPESVREKILAHLEDLKLSRELSRVRTDLPLEVDFGRRREPDWEGLKAFLERLEFGSLLHEFGLLESPLLAEEAPWPPPEGAFLGYRLSRPEPMWAETLALAASAQGRVYRAEDPHGALRGLFEVRGLLAKDLAVVALREGLDLPPTDDPMLLAYLLDPSNTTPEGVARRYGGEWTEDAAKRALLAERLHANLLGRLQGEERLLWLYEEVEKPLSRVLAHMEATGVKLDVAYLENLSLEVAAHMRRLEEEVFRLAGRSFRLNSRDQLERVLFDELGLPPIGKTEKTGKRSTSAAVLEALREVHPIVDKILQYRELAKLKGTYIDRLPALVHPKTGRLHTRFNQTATATGRLSSSDPNLQNIPVRTPLGQKIRRAFVAEEGWRLVALDYRQIELRVLAHLSGDENLIRVFQEGKDIHTQTASWMFGLSAEAIDPLMRRAAKTINFGVLYGMSAFRLSQELGIPYEEAQAFIQKYFQSYPKVKAWIEKTLREGRTRGYVETLFGRRRYVPDLNARVKGKREAAERMAFNMPVQGTAADLMKLAMVRLFPQLREVGARMLLQVHDELLLEAPKERAEEVAALAKEVMEGVWPLAVPLEVEVGIGEDWLAAKG

SEQ ID NO: 4799 - DNA, 2523 bp, synthetic construct
  misc_feature 1..2523: note = Variant of DNA polymerase I from Thermus sp. strain 2.9
  source 1..2523: mol_type = other DNA
atgcaccatcatcatcatcatggcggtagcggcgtgttaccggtgttcgagcataaaggtcgcgtgcttctggttgatggccatcatctcgcgtatcgtaacttctttgccctgaaaggattaaccaccagcctgggcgagccggtacagggtgtctacggctttgcaaagtcgctcctgaaagctctgaaagaagacggtgatgtggtgattgttgtctttgatgcgaaagcgccaagttttcgccacgaagcgtacgaagcttacaaagccgggcgtgctccaacgccggaagactttcctcgccaattggcgcttatgaaggaattagtggatttgcttggcctcgaacgcttggaagttcccggtttcgaggcagacgacgtattagcgactctcgcaaagaaagccgaacgtgagggctatgaagtccagatcttgacagcagatcgcgatcttttccagcttttatctccgcgcatctcggtgttacacccggaagggcatcgtatcaccccggaatggctctgggagaaatatggtttgcgtcccgaacaatgggtggattttcgcgccttagcaggcgatccgagcgacaatattccgggagttaaaggtatcggcgagaagacggcgctcaagctccttaaagaatgggggtcgttggagaacttgcttaagaatttagatcaggtcaaaccagagtcagtgcgtgagaagattcttgctcacctcgaagacctcaaattaagccgcgaattgtcccgtgtacgcaccgatttgccgctcgaagttgatttcggtcgccgccgcgaacctgactgggagggtcttaaagcgtttttagagcgtcttgaatttggttcgctcctgcatgaattcggccttttagaaagcccgttagtggccgaagaagcaccttggccaccgcccgagggcgcgtttttaggttaccgtttgagtcgcccggaaccgatgtgggccgaattactggctcttgcagcgtctgcccagggacgtgtgtatcgcgcggaagaccctcatggtgcgctccgcggcctcttcgaagtccgtggactccttgccaaagacttagctgttgttgcattgcgcgaaggtcttgatttacctccgactgatgatccaatgcttcttgcgtacctcttggacccgtcaaacacgacgcccgaaggcgtagcccgtcgttacggcggcgagtggaccgaagatgcagcgaaacgcgcgttattggccgaacgtttgcacgcaaatttattaggacgtttgcaaggcgaggaacgtctcctctggctttacgaagaagtggagaaaccattgagtcgcgtgctcgcgcatatggaagctaccggtgtcaaattagacgtggcgtatttggagaatctcagccttgaagttgctgcccacatgcgccgcttggaggaagaagtattccgtttagcaggccgttcctttcgccttaactctcgcgatcagttagaacgtgtgttgttcgatgaacttggtctccctcctatcggcaagacagagaagaccggtaaacgtagcacttcacgcgcggttttagacgctcttcgcgaagtccatcccattgtggacaagatcttgcagtaccgcgaaatggcgaaattgaaaggcacctatattgaccgtcttccggcattagtccacccgaaaacgggacgcctccatacccgcttcaaccaaacagccacggcgaccggtcgtttgtcctcctctgatccaaaccttcagaatattccagtacgtaccccattgggccagaagatccgccgtgcgtttgtagctgaggagggttggcgtttagtggccctcgattatcgtcaaattgaattacgtgtccttgcccatctttctggcgatgagaacctcatccgcgtgtttcaggaaggcaaagacattcacactcaaacggcaagctggatgtttggattatcagctgaagcgatcgatcctttgatgcgtcgtgcagcgaagaccatcaatttcggtgttctctacggtatgagtgcctttcgtttgtcgcaggaattaggcattccctatgaagaagctcaggcgttcattcagaaatactttcaaagctatcccaaagttaaagcatggatcgagaagactctccgtgaaggccgcacacgtggttacgtagagaccttatttggacgtcgccgctatgttcccgatttaaacgctcgcgtgaaaggcaagcgtgaagccgccgaacgcatggcgttcaacatgcctgtacagggcacggcagctgacctcatgaaacttgcaatggtgcgcctttttccacaattgcgtgaagttggtgcccgcatgctcttgcaggtccacgatgaactcttgttagaagcgccaaaagagcgtgcggaagaggtggcagccctcgcgaaagaagttatggaaggcgtgtggcccttagcggtgcctcttgaagtcgaagttggtattggcgaggattggctggctgccaaagga

SEQ ID NO: 4800 - protein, 841 aa, synthetic construct
  REGION 1..841: note = Variant of DNA polymerase I from Thermus sp. strain 2.9
MHHHHHHGGSGVLPVFEHKGRVLLVDGHHLAYRNFFALKGLTTSLGEPVQGVYGFAKSLLKALKEDGDVVIVVFDAKAPSFRHEAYEAYKAGRAPTPEDFPRQLALMKELVDLLGLERLEVPGFEADDVLATLAKKAEREGYEVQILTADRDLFQLLSPRISVLHPEGHRITPEWLWEKYGLRPEQWVDFRALAGDPSDNIPGVKGIGEKTALKLLKEWGSLENLLKNLDQVKPESVREKILAHLEDLKLSRELSRVRTDLPLEVDFGRRREPDWEGLKAFLERLEFGSLLHEFGLLESPLVAEEAPWPPPEGAFLGYRLSRPEPMWAELLALAASAQGRVYRAEDPHGALRGLFEVRGLLAKDLAVVALREGLDLPPTDDPMLLAYLLDPSNTTPEGVARRYGGEWTEDAAKRALLAERLHANLLGRLQGEERLLWLYEEVEKPLSRVLAHMEATGVKLDVAYLENLSLEVAAHMRRLEEEVFRLAGRSFRLNSRDQLERVLFDELGLPPIGKTEKTGKRSTSRAVLDALREVHPIVDKILQYREMAKLKGTYIDRLPALVHPKTGRLHTRFNQTATATGRLSSSDPNLQNIPVRTPLGQKIRRAFVAEEGWRLVALDYRQIELRVLAHLSGDENLIRVFQEGKDIHTQTASWMFGLSAEAIDPLMRRAAKTINFGVLYGMSAFRLSQELGIPYEEAQAFIQKYFQSYPKVKAWIEKTLREGRTRGYVETLFGRRRYVPDLNARVKGKREAAERMAFNMPVQGTAADLMKLAMVRLFPQLREVGARMLLQVHDELLLEAPKERAEEVAALAKEVMEGVWPLAVPLEVEVGIGEDWLAAKG

SEQ ID NO: 4801 - DNA, 2523 bp, synthetic construct
  misc_feature 1..2523: note = Variant of DNA polymerase I from Thermus sp. strain 2.9
  source 1..2523: mol_type = other DNA
atgcaccatcatcatcatcatggcggtagcggcgtgttaccggtgttcgagcctaaaggtcgcgtgcttctggttgatggccatcatctcgcgtatcgtaacttctttgccctgaaaggattaaccaccagcctgggcgagccggtacagggtgtctacggctttgcaaagtcgctcctgaaagctctgaaagaagacggtgatgtggtgattgttgtctttgatgcgaaagcgccaagttttcgccacgaagcgtacgaagcttacaaagccgggcgtgctccaacgccggaagactttcctcgccaattggcgcttatgaaggaattagtggatttgcttggcctcgaacgcttggaagttcccggtttcgaggcagacgacgtattagcgactctcgcaaagaaagccgaacgtgagggctatgaagtccagatcttgacagcagatcgcgatcttttccagcttttatctccgcgcatctcggtgttacacccggaagggcatcgtatcaccccggaatggctctgggagaaatatggtttgcgtcccgaacaatgggtggattttcgcgccttagcaggcgatccgagcgacaatattccgggagttaaaggtatcggcgagaagacggcgctcaagctccttaaagaatgggggtcgttggagaacttgcttaagaatttagatcaggtcaaaccagagtcagtgcgtgagaagattcttgctcacctcgaagacctcaaattaagccgcgaattgtcccgtgtacgcaccgatttgccgctcgaagttgatttcggtcgccgccgcgaacctgactgggagggtcttaaagcgtttttagagcgtcttgaatttggttcgctcttgcatgaattcggccttttagaaagcccgttactggccgaagaagcaccttggccaccgcccgagggcgcgtttttaggttaccgtttgagtcgcccggaaccgatgtgggccgaattactggctcttgcagcgtctgcccagggacgtgtgtatcgcgcggaagaccctcatggtgcgctccgcggcctcttcgaagtccgtggactccttgccaaagacttagctgttgttgcattgcgcgaaggtcttgatttacctccgactgatgatccaatgcttcttgcgtacctcttggacccgtcaaacacgacgcccgaaggcgtagcccgtcgttacggcggcgagtggaccgaagatgcagcgaaacgcgcgttattggccgaacgtttgcacgccaatttattaggacgtttgcaaggcgaggaacgtctcctctggctttacgaagaagtggagaaaccattgagtcgcgtgctcgcgcatatggaagctaccggtgtcaaattagacgtggcgtatttggagaatctcagccttgaagttgctgcccacatgcgccgcttggaggaagaagtattccgtttagcaggccgttcctttcgccttaactctcgcgatcagttagaacgtgtgttgttcgatgaacttggtctccctcctatcggcaagacagagaagaccggtaaacgtagcacttcagcggcggttttagaagctcttcgcgaagtccatcccattgtggacaagatcttgcagtaccgcgaactcgcgaaattgaaaggcacctatattgaccgtcttccggcattagtccacccgaaaacgggacgcctccatacccgcttcaaccaaacagccacggcgaccggtcgtttgtcctcctctgatccaaaccttcagaatattccagtacgttctccattgggccagaagatccgccgtgcgtttgtagctgaggagggttggcgtttagtggccctcgattatcgtcaaattgaattacgtgtccttgcccatctttctggcgatgagaacctcatccgcgtgtttcaggaaggcaaagacattcacactcaaacggcaagctggatgtttggattatcagctgaagcgatcgatcctttgatgcgtcgtgcagcgaagaccatcaatttcggtgttctctacggtatgagtgcctttcgtttgtcgcaggaattaggcattccctatgaagaagctcaggcgttcattcagaaatactttcaaagctatcccaaagttaaagcatggatcgagaagactctccgtgaaggccgcacacgtggttacgtagagaccttatttggacgtcgccgctatgttcccgatttaaacgctcgcgtgaaaggcaagcgtgaagccgccgaacgcatggcgttcaacatgcctgtacagggcacggcagctgacctcatgaaacttgcaatggtgcgcctttttccacaattgcgtgaagttggtgcccgcatgctcttgcaggtccacgatgaactcttgttagaagcgccaaaagagcgtgcggaagaggtggcagccctcgcgaaagaagttatggaaggcgtgtggcccttagcggtgcctcttgaagtcgaagttggtattggcgaggattggctggctgccaaagga

SEQ ID NO: 4802 - protein, 841 aa, synthetic construct
  REGION 1..841: note = Variant of DNA polymerase I from Thermus sp. strain 2.9
MHHHHHHGGSGVLPVFEPKGRVLLVDGHHLAYRNFFALKGLTTSLGEPVQGVYGFAKSLLKALKEDGDVVIVVFDAKAPSFRHEAYEAYKAGRAPTPEDFPRQLALMKELVDLLGLERLEVPGFEADDVLATLAKKAEREGYEVQILTADRDLFQLLSPRISVLHPEGHRITPEWLWEKYGLRPEQWVDFRALAGDPSDNIPGVKGIGEKTALKLLKEWGSLENLLKNLDQVKPESVREKILAHLEDLKLSRELSRVRTDLPLEVDFGRRREPDWEGLKAFLERLEFGSLLHEFGLLESPLLAEEAPWPPPEGAFLGYRLSRPEPMWAELLALAASAQGRVYRAEDPHGALRGLFEVRGLLAKDLAVVALREGLDLPPTDDPMLLAYLLDPSNTTPEGVARRYGGEWTEDAAKRALLAERLHANLLGRLQGEERLLWLYEEVEKPLSRVLAHMEATGVKLDVAYLENLSLEVAAHMRRLEEEVFRLAGRSFRLNSRDQLERVLFDELGLPPIGKTEKTGKRSTSAAVLEALREVHPIVDKILQYRELAKLKGTYIDRLPALVHPKTGRLHTRFNQTATATGRLSSSDPNLQNIPVRSPLGQKIRRAFVAEEGWRLVALDYRQIELRVLAHLSGDENLIRVFQEGKDIHTQTASWMFGLSAEAIDPLMRRAAKTINFGVLYGMSAFRLSQELGIPYEEAQAFIQKYFQSYPKVKAWIEKTLREGRTRGYVETLFGRRRYVPDLNARVKGKREAAERMAFNMPVQGTAADLMKLAMVRLFPQLREVGARMLLQVHDELLLEAPKERAEEVAALAKEVMEGVWPLAVPLEVEVGIGEDWLAAKG

SEQ ID NO: 4803 - DNA, 2523 bp, synthetic construct
  misc_feature 1..2523: note = Variant of DNA polymerase I from Thermus sp. strain 2.9
  source 1..2523: mol_type = other DNA
atgcaccatcatcatcatcatggcggtagcggcgtgttaccggtgttcgagcctaaaggtcgcgtgcttctggttgatggccatcatctcgcgtatcgtaacttctttgccctgaaaggattaaccaccagcctgggcgagccggtacagggtgtctacggctttgcaaagtcgctcctgaaagctctgaaagaagacggtgatgtggtgattgttgtctttgatgcgaaagcgccaagttttcgccacgaagcgtacgaagcttacaaagccgggcgtgctccaacgccggaagactttcctcgccaattggcgcttatgaaggaattagtggatttgcttggcctcgaacgcttggaagttcccggtttcgaggcagacgacgtattagcgactctcgcaaagaaagccgaacgtgagggctatgaagtccagatcttgacagcagatcgcgatcttttccagcttttatctccgcgcatctcggtgttacacccggaagggcatcgtatcaccccggaatggctctgggagaaatatggtttgcgtcccgaacaatgggtggattttcgcgccttagcaggcgatccgagcgacaatattccgggagttaaaggtatcggcgagaagacggcgctcaagctccttaaagaatgggggtcgttggagaacttgcttaagaatttagatcaggtcaaaccagagtcagtgcgtgagaagattcttgctcacctcgaagacctcaaattaagccgcgaattgtcccgtgtacgcaccgatttgccgctcgaagttgatttcggtcgccgccgcgaacctgactgggagggtcttaaagcgtttttagagcgtcttgaatttggttcgctcttgcatgaattcggccttttagaaagcccgttactggccgaagaagcaccttggccaccgcccgagggcgcgtttttaggttaccgtttgagtcgcccggaaccgatgtgggccgaattactggctcttgcagcgtctgcccagggacgtgtgtatcgcgcggaagaccctcatggtgcgctccgcggcctcttcgaagtccgtggactccttgccaaagacttagctgttgttgcattgcgcgaaggtcttgatttacctccgactgatgatccacggcttcttgcgtacctcttggacccgtcaaacacgacgcccgaaggcgtagcccgtcgttacggcggcgagtggaccgaagatgcagcgaaacgcgcgttattggccgaacgtttgcacgccaatttattaggacgtttgcaaggcgaggaacgtctcctctggctttacgaagaagtggagaaaccattgagtcgcgtgctcgcgcatatggaagctaccggtgtcaaattagacgtggcgtatttggagaatctcagccttgaagttgctgcccacatgcgccgcttggaggaagaagtattccgtttagcaggccgttcctttcgccttaactctcgcgatcagttagaacgtgtgttgttcgatgaacttggtctccctcctatcggcaagacagagaagaccggtaaacgtagcacttcagcggcggttttagaagctcttcgcgaagtccatcccattgtggacaagatcttgcagtaccgcgaactcgcgaaattgaaaggcacctatattgaccgtcttccggcattagtccacccgaaaacgggacgcctccatacccgcttcaaccaaacagccacggcgaccggtcgtttgtcctcctctgatccaaaccttcagaatattccagtacgtaccccattgggccagaagatccgccgtgcgtttgtagctgaggagggttggcgtttagtggccctcgattatcgtcaaattgaattacgtgtccttgcccatctttctggcgatgagaacctcatccgcgtgtttcaggaaggcaaagacattcacactcaaacggcaagctggatgtttggattatcagctgaagcgatcgatcctttgatgcgtcgtgcagcgaagaccatcaatttcggtgttctctacggtatgagtgcctttcgtttgtcgcaggaattaggcattccctatgaagaagctcaggcgttcattcagaaatactttcaaagctatcccaaagttaaagcatggatcgagaagactctccgtgaaggccgcacacgtggttacgtagagaccttatttggacgtcgccgctatgttcccgatttaaacgctcgcgtgaaaggcaagcgtgaagccgccgaacgcatggcgttcaacatgcctgtacagggcacggcagctgacctcatgaaacttgcaatggtgcgcctttttccacaattgcgtgaagttggtgcccgcatgctcttgcaggtccacgatgaactcttgttagaagcgccaaaagagcgtgcggaagaggtggcagccctcgcgaaagaagttatggaaggcgtgtggcccttagcggtgcctcttgaagtcgaagttggtattggcgaggattggctggctgccaaagga

SEQ ID NO: 4804 - protein, 841 aa, synthetic construct
  REGION 1..841: note = Variant of DNA polymerase I from Thermus sp. strain 2.9
MHHHHHHGGSGVLPVFEPKGRVLLVDGHHLAYRNFFALKGLTTSLGEPVQGVYGFAKSLLKALKEDGDVVIVVFDAKAPSFRHEAYEAYKAGRAPTPEDFPRQLALMKELVDLLGLERLEVPGFEADDVLATLAKKAEREGYEVQILTADRDLFQLLSPRISVLHPEGHRITPEWLWEKYGLRPEQWVDFRALAGDPSDNIPGVKGIGEKTALKLLKEWGSLENLLKNLDQVKPESVREKILAHLEDLKLSRELSRVRTDLPLEVDFGRRREPDWEGLKAFLERLEFGSLLHEFGLLESPLLAEEAPWPPPEGAFLGYRLSRPEPMWAELLALAASAQGRVYRAEDPHGALRGLFEVRGLLAKDLAVVALREGLDLPPTDDPRLLAYLLDPSNTTPEGVARRYGGEWTEDAAKRALLAERLHANLLGRLQGEERLLWLYEEVEKPLSRVLAHMEATGVKLDVAYLENLSLEVAAHMRRLEEEVFRLAGRSFRLNSRDQLERVLFDELGLPPIGKTEKTGKRSTSAAVLEALREVHPIVDKILQYRELAKLKGTYIDRLPALVHPKTGRLHTRFNQTATATGRLSSSDPNLQNIPVRTPLGQKIRRAFVAEEGWRLVALDYRQIELRVLAHLSGDENLIRVFQEGKDIHTQTASWMFGLSAEAIDPLMRRAAKTINFGVLYGMSAFRLSQELGIPYEEAQAFIQKYFQSYPKVKAWIEKTLREGRTRGYVETLFGRRRYVPDLNARVKGKREAAERMAFNMPVQGTAADLMKLAMVRLFPQLREVGARMLLQVHDELLLEAPKERAEEVAALAKEVMEGVWPLAVPLEVEVGIGEDWLAAKG

SEQ ID NO: 4805 - DNA, 2523 bp, synthetic construct
  misc_feature 1..2523: note = Variant of DNA polymerase I from Thermus sp. strain 2.9
  source 1..2523: mol_type = other DNA
atgcaccatcatcatcatcatggcggtagcggcgtgttaccggtgttcgagcctaaaggtcgcgtgcttctggttgatggccatcatctcgcgtatcgtaacttctttgccctgaaaggattaaccaccagcctgggcgagccggtacagggtgtctacggctttgcaaagtcgctcctgaaagctctgaaagaagacggtgatgtggtgattgttgtctttgatgcgaaagcgccaagttttcgccacgaagcgtacgaagcttacaaagccgggcgtgctccaacgccggaagactttcctcgccaattggcgcttatgaaggaattagtggatttgcttggcctcgaacgcttggaagttcccggtttcgaggcagacgacgtattagcgactctcgcaaagaaagccgaacgtgagggctatgaagtccagatcttgacagcagatcgcgatcttttccagcttttatctccgcgcatctcggtgttacacccggaagggcatcgtatcaccccggaatggctctgggagaaatatggtttgcgtcccgaacaatgggtggattttcgcgccttagcaggcgatccgagcgacaatattccgggagttaaaggtatcggcgagaagacggcgctcaagctccttaaagaatgggggtcgttggagaacttgcttaagaatttagatcaggtcaaaccagagtcagtgcgtgagaagattcttgctcacctcgaagacctcaaattaagccgcgaattgtcccgtgtacgcaccgatttgccgctcgaagttgatttcggtcgccgccgcgaacctgactgggagggtcttaaagcgtttttagagcgtcttgaatttggttcgctcttgcatgaattcggccttttagaaagcccgttactggccgaagaagcaccttggccaccgcccgagggcgcgtttttaggttaccgtttgagtcgcccggaaccgatgtgggccgaattactggctcttgcagcgtctgcccagggacgtgtgtatcgcgcggaagaccctcatggtgcgctccgcggcctcttcgaagtccgtggactccttgccaaagacttagctgttgttgcattgcgcgaaggtcttgatttacctccgactgatgatccaatgcttcttgcgtacctcttggacccgtcaaacacgacgcccgaaggcgtagcccgtcgttacggcggcgagtggaccgaagatgcagcgaaacgcgcgttattggccgaacgtttgcacgccaatttattaggacgtttgcaaggcgaggaacgtctcctctggctttacgaagaagtggagaaaccattgagtcgcgtgctcgcgcatatggaagctaccggtgtcaaattagacgtggcgtatttggagaatctcagccttgaagttgctgcccacatgcgccgcttggaggaagaagtattccgtttagcaggccgttcctttaagcttaactctcgcgatcagttagaacgtgtgttgttcgatgaacttggtctccctcctatcggcaagacagagaagaccggtaaacgtagcacttcagcggcggttttagaagctcttcgcgaagtccatcccattgtggacaagatcttgcagtaccgcgaactcgcgaaattgaaaggcacctatattgaccgtcttccggcattagtccacccgaaaacgggacgcctccatacccgcttcaaccaaacagccacggcgaccggtcgtttgtcctcctctgatccaaaccttcagaatattccagtacgtaccccattgggccagaagatccgccgtgcgtttgtagctgaggagggttggcgtttagtggccctcgattatcgtcaaattgaattacgtgtccttgcccatctttctggcgatgagaacctcatccgcgtgtttcaggaaggcaaagacattcacactcaaacggcaagctggatgtttggattatcagctgaagcgatcgatcctttgatgcgtcgtgcagcgaagaccatcaatttcggtgttctctacggtatgagtgcctttcgtttgtcgcaggaattaggcattccctatgaagaagctcaggcgttcattcagaaatactttcaaagctatcccaaagttaaagcatggatcgagaagactctccgtgaaggccgcacacgtggttacgtagagaccttatttggacgtcgccgctatgttcccgatttaaacgctcgcgtgaaaggcaagcgtgaagccgccgaacgcatggcgttcaacatgcctgtacagggcacggcagctgacctcatgaaacttgcaatggtgcgcctttttccacaattgcgtgaagttggtgcccgcatgctcttgcaggtccacgatgaactcttgttagaagcgccaaaagagcgtgcggaagaggtggcagccctcgcgaaagaagttatggaaggcgtgtggcccttagcggtgcctcttgaagtcgaagttggtattggcgaggattggctggctgccaaagga

SEQ ID NO: 4806 - protein, 841 aa, synthetic construct
  REGION 1..841: note = Variant of DNA polymerase I from Thermus sp. strain 2.9
MHHHHHHGGSGVLPVFEPKGRVLLVDGHHLAYRNFFALKGLTTSLGEPVQGVYGFAKSLLKALKEDGDVVIVVFDAKAPSFRHEAYEAYKAGRAPTPEDFPRQLALMKELVDLLGLERLEVPGFEADDVLATLAKKAEREGYEVQILTADRDLFQLLSPRISVLHPEGHRITPEWLWEKYGLRPEQWVDFRALAGDPSDNIPGVKGIGEKTALKLLKEWGSLENLLKNLDQVKPESVREKILAHLEDLKLSRELSRVRTDLPLEVDFGRRREPDWEGLKAFLERLEFGSLLHEFGLLESPLLAEEAPWPPPEGAFLGYRLSRPEPMWAELLALAASAQGRVYRAEDPHGALRGLFEVRGLLAKDLAVVALREGLDLPPTDDPMLLAYLLDPSNTTPEGVARRYGGEWTEDAAKRALLAERLHANLLGRLQGEERLLWLYEEVEKPLSRVLAHMEATGVKLDVAYLENLSLEVAAHMRRLEEEVFRLAGRSFKLNSRDQLERVLFDELGLPPIGKTEKTGKRSTSAAVLEALREVHPIVDKILQYRELAKLKGTYIDRLPALVHPKTGRLHTRFNQTATATGRLSSSDPNLQNIPVRTPLGQKIRRAFVAEEGWRLVALDYRQIELRVLAHLSGDENLIRVFQEGKDIHTQTASWMFGLSAEAIDPLMRRAAKTINFGVLYGMSAFRLSQELGIPYEEAQAFIQKYFQSYPKVKAWIEKTLREGRTRGYVETLFGRRRYVPDLNARVKGKREAAERMAFNMPVQGTAADLMKLAMVRLFPQLREVGARMLLQVHDELLLEAPKERAEEVAALAKEVMEGVWPLAVPLEVEVGIGEDWLAAKG

SEQ ID NO: 4807 - DNA, 2523 bp, synthetic construct
  misc_feature 1..2523: note = Variant of DNA polymerase I from Thermus sp. strain 2.9
  source 1..2523: mol_type = other DNA
atgcaccatcatcatcatcatggcggtagcggcgtgttaccggtgttcgagcctaaaggtcgcgtgcttctggttgatggccatcatctcgcgtatcgtaacttctttgccctgaaaggattaaccaccagcctgggcgagccggtacagggtgtctacggctttgcaaagtcgctcctgaaagctctgaaagaagacggtgatgtggtgattgttgtctttgatgcgaaagcgccaagttttcgccacgaagcgtacgaagcttacaaagccgggcgtgctccaacgccggaagactttcctcgccaattggcgcttatgaaggaattagtggatttgcttggcctcgaacgcttggaagttcccggtttcgaggcagacgacgtattagcgactctcgcaaagaaagccgaacgtgagggctatgaagtccagatcttgacagcagatcgcgatcttttccagcttttatctccgcgcatctcggtgttacacccggaagggcatcgtatcaccccggaatggctctgggagaaatatggtttgcgtcccgaacaatgggtggattttcgcgccttagcaggcgatccgagcgacaatattccgggagttaaaggtatcggcgagaagacggcgctcaagctccttaaagaatgggggtcgttggagaacttgcttaagaatttagatcaggtcaaaccagagtcagtgcgtgagaagattcttgctcacctcgaagacctcaaattaagccgcgaattgtcccgtgtacgcaccgatttgccgctcgaagttgatttcggtcgccgccgcgaacctgactgggagggtcttaaagcgtttttagagcgtcttgaatttggttcgctcttgcatgaattcggccttttagaaagcccgttactggccgaagaagcaccttggccaccgcccgagggcgcgtttttaggttaccgtttgagtcgcccggaaccgatgtgggccgaattactggctcttgcagcgtctgcccagggacgtgtgtatcgcgcggaagaccctcatggtgcgctccgcggcctcttcgaagtccgtggactccttgccaaagacttagctgttgttgcattgcgcgaaggtcttgatttacctccgactgatgatccaatgcttcttgcgtacctcttggacccgtcaaacacgacgcccgaaggcgtagcccgtcgttacggcggcgagtggaccgaagatgcagcgaaacgcgcgttattggccgaacgtttgcacgccaatttattaggacgtttgcaaggcgaggaacgtctcctctggctttacgaagaagtggagaaaccattgagtcgcgtgctcgcgcatatggaagctaccggtgtcaaattagacgtggcgtatttggagaatctcagccttgaagttgctgcccacatgcgccgcttggaggaagaagtattccgtttagcaggccgttcctttcgccttaactctcgcgatcagttagaacgtgtgttgttcgatgaacttggtctccctcctatcggcaagacagagaagaccggtaaacgtagcacttcagcggcggttttagaagctcttcgcgaagtccatcccattgtggacaagatcttgcagtaccgcgaactcgcgaaattgaaaggcacctatattgaccgtcttccggcattagtccacccgaaaacgggacgcctccatacccgcttcaaccaaacagccacggcgaccggtcgtttgtcctcctctgatccaaaccttcagaatattccagtacgtaccccattgggccagaagatccgccgtgcgtttgtagctgaggagggttggcgtttagtggccctcgattatcgtcaaattgaattacgtgtccttgcccatctttctggcgatgagaacctcatccgcgtgtttcaggaaggcaaagacattcacactcaaacggcaagctggatgtttggattatcagctgaagcgatcgatcctttgatgcgtcgtgcagcgaagaccatcaatttcggtgttctctacggtatgagtgcctttcgtttgtcgcaggaattaggcattccctatgaagaagctcaggcgttcattcagaaatactttcaaagctatcccaaagttaaagcatggatcgagaagactctccgtgaaggccgcacacgtggttacgtagagaccttatttggacgtcgccgctatgttcccgatttaaacgctcgcgtgaaaggcaagcgtgaagccgccgaacgcatggcgttcaacatgcctgtacagggcacggcagctgacctcatgaaacttgcaatggtgcgcctttttccacaattgcgtgaagttggtgcccgcatgctcttgcaggtccacgatgaactcttgttagaagcgccaaaagagcgtactgaagaggtggcagccctcgcgaaagaagttatggaaggcgtgtggcccttagcggtgcctcttgaagtcgaagttggtattggcgaggattggctggctgccaaagga

SEQ ID NO: 4808 - protein, 841 aa, synthetic construct
  REGION 1..841: note = Variant of DNA polymerase I from Thermus sp. strain 2.9
MHHHHHHGGSGVLPVFEPKGRVLLVDGHHLAYRNFFALKGLTTSLGEPVQGVYGFAKSLLKALKEDGDVVIVVFDAKAPSFRHEAYEAYKAGRAPTPEDFPRQLALMKELVDLLGLERLEVPGFEADDVLATLAKKAEREGYEVQILTADRDLFQLLSPRISVLHPEGHRITPEWLWEKYGLRPEQWVDFRALAGDPSDNIPGVKGIGEKTALKLLKEWGSLENLLKNLDQVKPESVREKILAHLEDLKLSRELSRVRTDLPLEVDFGRRREPDWEGLKAFLERLEFGSLLHEFGLLESPLLAEEAPWPPPEGAFLGYRLSRPEPMWAELLALAASAQGRVYRAEDPHGALRGLFEVRGLLAKDLAVVALREGLDLPPTDDPMLLAYLLDPSNTTPEGVARRYGGEWTEDAAKRALLAERLHANLLGRLQGEERLLWLYEEVEKPLSRVLAHMEATGVKLDVAYLENLSLEVAAHMRRLEEEVFRLAGRSFRLNSRDQLERVLFDELGLPPIGKTEKTGKRSTSAAVLEALREVHPIVDKILQYRELAKLKGTYIDRLPALVHPKTGRLHTRFNQTATATGRLSSSDPNLQNIPVRTPLGQKIRRAFVAEEGWRLVALDYRQIELRVLAHLSGDENLIRVFQEGKDIHTQTASWMFGLSAEAIDPLMRRAAKTINFGVLYGMSAFRLSQELGIPYEEAQAFIQKYFQSYPKVKAWIEKTLREGRTRGYVETLFGRRRYVPDLNARVKGKREAAERMAFNMPVQGTAADLMKLAMVRLFPQLREVGARMLLQVHDELLLEAPKERTEEVAALAKEVMEGVWPLAVPLEVEVGIGEDWLAAKG

SEQ ID NO: 4809 - DNA, 2523 bp, synthetic construct
  misc_feature 1..2523: note = Variant of DNA polymerase I from Thermus sp. strain 2.9
  source 1..2523: mol_type = other DNA
atgcaccatcatcatcatcatggcggtagcggcgtgttaccggtgttcgagcataaaggtcgcgtgcttctggttgatggccatcatctcgcgtatcgtaacttctttgccctgaaaggattaaccaccagcctgggcgagccggtacagggtgtctacggctttgcaaagtcgctcctgaaagctctgaaagaagacggtgatgtggtgattgttgtctttgatgcgaaagcgccaagttttcgccacgaagcgtacgaagcttacaaagccgggcgtgctccaacgccggaagactttcctcgccaattggcgcttatgaaggaattagtggatttgcttggcctcgaacgcttggaagttcccggtttcgaggcagacgacgtattagcgactctcgcaaagaaagccgaacgtgagggctatgaagtccagatcttgacagcagatcgcgatcttttccagcttttatctccgcgcatctcggtgttacacccggaagggcatcgtatcaccccggaatggctctgggagaaatatggtttgcgtcccgaacaatgggtggattttcgcgccttagcaggcgatccgagcgacaatattccgggagttaaaggtatcggcgagaagacggcgctcaagctccttaaagaatgggggtcgttggagaacttgcttaagaatttagatcaggtcaaaccagagtcagtgcgtgagaagattcttgctcacctcgaagacctcaaattaagccgcgaattgtcccgtgtacgcaccgatttgccgctcgaagttgatttcggtcgccgccgcgaacctgactgggagggtcttaaagcgtttttagagcgtcttgaatttggttcgctcttgcatgaattcggccttttagaaaacccgttactggccgaagaagcaccttggccaccgcccgagggcgcgtttttaggttaccgtttgagtcgcccggaaccgatgtgggccgaattactggctcttgcagcgtctgcccagggacgtgtgtatcgcgcggaagaccctcatggtgcgctccgcggcctcttcgaagtccgtggactccttgccaaagacttagctgttgttgcattgcgcgaaggtcttgatttacctccgactgatgatccaatgcttcttgcgtacctcttggacccgtcaaacacgacgcccgaaggcgtagcccgtcgttacggcggcgagtggaccgaagatgcagcgaaacgcgcgttattggccgaacgtttgcacgccaatttattaggacgtttgcaaggcgaggaacgtctcctctggctttacgaagaagtggagaaaccattgagtcgtgtgctcggtcatatggaagctaccggtgtcaaattagacgtggcgtatttggagaatctcagccttgaagttgctgcccacatgcgccgcttggaggaagaagtattccgtttagcaggccgttcctttcgccttaactctcgcgatcagttagaacgtgtgttgttcgatgaacttggtctccctcctatcggcaagacagagaagaccggtaaacgtagcacttcacgtgcggttttagatgctcttcgcgaagtccatcccattgtggacaagatcttgcagtaccgcgaactcgcgaaattgaaaggcacctatattgaccgtcttccggcattagtccacccgaaaacgggacgcctccatacccgcttcaaccaaacagccacggcgaccggtcgtttgtcctcctctgatccaaaccttcagaatattccagtacgtaccccattgggccagaagatccgccgtgcgtttgtagctgaggagggttggcgtttagtggccctcgattatcgtcaaattgaattacgtgtccttgcccatctttctggcgatgagaacctcatccgcgtgtttcaggaaggcaaagacattcacactcaaacggcaagctggatgtttggattatcagctgaagcgatcgatcctttgatgcgtcgtgcagcgaagacgatcaatttcggtgttctctacggtatgagtgcctttcgtttgtcgcaggagttaggcattcccaaagaagaagctcaggcgttcattcagaaatactttcaaagctatcccaaagttaaagcatggatcgagaagactctccgtgaaggccgcacacgtggttacgtagagaccttatttggacgtcgccgctatgttcccgatttaaacgctcgcgtgaaaggcaagcgtgaagccgccgaacgcatggcgttcaacatgcctgtacagggcacggcagctgacctcatgaaacttgcaatggtgcgcctttttccacaattgcgtgaagttggtgcccgcatgctcttgcaggtccacgatgaactcttgttagaagcgccaaaagagcgtgcggaagaggtggcagccctcgcgaaagaagttatggaaggcgtgtggcccttagcggtgcctcttgaagtcgaagttggtattggcgaggattggctggctgccaaagga

SEQ ID NO: 4810 - protein, 841 aa, synthetic construct
  REGION 1..841: note = Variant of DNA polymerase I from Thermus sp. strain 2.9
MHHHHHHGGSGVLPVFEHKGRVLLVDGHHLAYRNFFALKGLTTSLGEPVQGVYGFAKSLLKALKEDGDVVIVVFDAKAPSFRHEAYEAYKAGRAPTPEDFPRQLALMKELVDLLGLERLEVPGFEADDVLATLAKKAEREGYEVQILTADRDLFQLLSPRISVLHPEGHRITPEWLWEKYGLRPEQWVDFRALAGDPSDNIPGVKGIGEKTALKLLKEWGSLENLLKNLDQVKPESVREKILAHLEDLKLSRELSRVRTDLPLEVDFGRRREPDWEGLKAFLERLEFGSLLHEFGLLENPLLAEEAPWPPPEGAFLGYRLSRPEPMWAELLALAASAQGRVYRAEDPHGALRGLFEVRGLLAKDLAVVALREGLDLPPTDDPMLLAYLLDPSNTTPEGVARRYGGEWTEDAAKRALLAERLHANLLGRLQGEERLLWLYEEVEKPLSRVLGHMEATGVKLDVAYLENLSLEVAAHMRRLEEEVFRLAGRSFRLNSRDQLERVLFDELGLPPIGKTEKTGKRSTSRAVLDALREVHPIVDKILQYRELAKLKGTYIDRLPALVHPKTGRLHTRFNQTATATGRLSSSDPNLQNIPVRTPLGQKIRRAFVAEEGWRLVALDYRQIELRVLAHLSGDENLIRVFQEGKDIHTQTASWMFGLSAEAIDPLMRRAAKTINFGVLYGMSAFRLSQELGIPKEEAQAFIQKYFQSYPKVKAWIEKTLREGRTRGYVETLFGRRRYVPDLNARVKGKREAAERMAFNMPVQGTAADLMKLAMVRLFPQLREVGARMLLQVHDELLLEAPKERAEEVAALAKEVMEGVWPLAVPLEVEVGIGEDWLAAKG

SEQ ID NO: 4811 - DNA, 2523 bp, synthetic construct
  misc_feature 1..2523: note = Variant of DNA polymerase I from Thermus sp. strain 2.9
  source 1..2523: mol_type = other DNA
atgcaccatcatcatcatcatggcggtagcggcgtgttaccggtgttcgagcctaaaggtcgcgtgcttctggttgatggccatcatctcgcgtatcgtaacttctttgccctgaaaggattaaccaccagcctgggcgagccggtacagggtgtctacggctttgcaaagtcgctcctgaaagctctgaaagaagacggtgatgtggtgattgttgtctttgatgcgaaagcgccaagttttcgccacgaagcgtacgaagcttacaaagccgggcgtgctccaacgccggaagactttcctcgccaattggcgcttatgaaggaattagtggatttgcttggcctcgaacgcttggaagttcccggtttcgaggcagacgacgtattagcgactctcgcaaagaaagccgaacgtgagggctatgaagtccagatcttgacagcagatcgcgatcttttccagcttttatctccgcgcatctcggtgttacacccggaagggcatcgtatcaccccggaatggctctgggagaaatatggtttgcgtcccgaacaatgggtggattttcgcgccttagcaggcgatccgagcgacaatattccgggagttaaaggtatcggcgagaagacggcgctcaagctccttaaagaatgggggtcgttggagaacttgcttaagaatttagatcaggtcaaaccagagtcagtgcgtgagaagattcttgctcacctcgaagacctcaaattaagccgcgaattgtcccgtgtacgcaccgatttgccgctcgaagttgatttcggtcgccgccgcgaacctgactgggagggtcttaaagcgtttttagagcgtcttgaatttggttcgctcttgcatgaattcggccttttagaaagcccgttactggccgaagaagcaccttggccaccgcccgagggcgcgtttttaggttaccgtttgagtcgcccggaaccgatgtgggccgaattactggctcttgcagcgtctgcccagggacgtgtgtatcgcgcggaagaccctcatggtgcgctccgcggcctcttcgaagtccgtggactccttgccaaagacttagctgttgttgcattgcgcgaaggtcttgatttacctccgactgatgatccaatgcttcttgcgtacctcttggacccgtcaaacacgacgcccgaaggcgtagcccgtcgttacggcggcgagtggaccgaagatgcagcgaaacgcgcgttattggccgaacgtttgcacgccaatttattaggacgtttgcaaggcgaggaacgtctcctctggctttacgaagaagtggagaaaccattgagtcgcgtgctcgcgcatatggaagctaccggtgtcaaattagacgtggcgtatttggagaatctcagccttgaagttgctgcccacatgcgccgcttggaggaagaagtattccgtttagcaggccgttcctttcgccttaactctcgcgatcagttagaacgtgtgttgttcgatgaacttggtctccctcctatcggcaagacagagaagaccggtaaacgtagcacttcagcggcggttttagaagctcttcgcgaagtccatcccattgtggacaagatcttgcagtaccgcgaactcgcgaaattgaaaggcacctatattgaccgtcttccggcattagtccacccgaaaacgggacgcctccatacccgcttcaaccaaacagccacggcgaccggtcgtttgtcctcctctgatccaaaccttcagaatattccagtacgtaccccattgggccagaagatccgccgtgcgtttgtagctgaggagggttggcgtttagtggccctcgattatcgtcaaattgaattacgtgtccttgcccatctttctggcgatgagaacctcatccgcgtgtttcaggaaggcaaagacattcacactcaaacggcaagctggatgtttggattatcagctgaagcgatcgatcctttgatgcgtcgtgcagcgaagaccatcaatttcggtgttctctacggtatgagtgcctttcgtttgtcgcaggaattaggcattccctatgaagaagctcaggcgttcattcagaaatactttcaaagctatcccaaagttaaagcatggatcgagaagactctccgtgaaggccgcacacgtggttacgtacgtaccttatttggacgtcgccgctatgttcccgatttaaacgctcgcgtgaaaggcaagcgtgaagccgccgaacgcatggcgttcaacatgcctgtacagggcacggcagctgacctcatgaaacttgcaatggtgcgcctttttccacaattgcgtgaagttggtgcccgcatgctcttgcaggtccacgatgaactcttgttagaagcgccaaaagagcgtgcggaagaggtggcagccctcgcgaaagaagttatggaaggcgtgtggcccttagcggtgcctcttgaagtcgaagttggtattggcgaggattggctggctgccaaagga

SEQ ID NO: 4812 - protein, 841 aa, synthetic construct
  REGION 1..841: note = Variant of DNA polymerase I from Thermus sp. strain 2.9
MHHHHHHGGSGVLPVFEPKGRVLLVDGHHLAYRNFFALKGLTTSLGEPVQGVYGFAKSLLKALKEDGDVVIVVFDAKAPSFRHEAYEAYKAGRAPTPEDFPRQLALMKELVDLLGLERLEVPGFEADDVLATLAKKAEREGYEVQILTADRDLFQLLSPRISVLHPEGHRITPEWLWEKYGLRPEQWVDFRALAGDPSDNIPGVKGIGEKTALKLLKEWGSLENLLKNLDQVKPESVREKILAHLEDLKLSRELSRVRTDLPLEVDFGRRREPDWEGLKAFLERLEFGSLLHEFGLLESPLLAEEAPWPPPEGAFLGYRLSRPEPMWAELLALAASAQGRVYRAEDPHGALRGLFEVRGLLAKDLAVVALREGLDLPPTDDPMLLAYLLDPSNTTPEGVARRYGGEWTEDAAKRALLAERLHANLLGRLQGEERLLWLYEEVEKPLSRVLAHMEATGVKLDVAYLENLSLEVAAHMRRLEEEVFRLAGRSFRLNSRDQLERVLFDELGLPPIGKTEKTGKRSTSAAVLEALREVHPIVDKILQYRELAKLKGTYIDRLPALVHPKTGRLHTRFNQTATATGRLSSSDPNLQNIPVRTPLGQKIRRAFVAEEGWRLVALDYRQIELRVLAHLSGDENLIRVFQEGKDIHTQTASWMFGLSAEAIDPLMRRAAKTINFGVLYGMSAFRLSQELGIPYEEAQAFIQKYFQSYPKVKAWIEKTLREGRTRGYVRTLFGRRRYVPDLNARVKGKREAAERMAFNMPVQGTAADLMKLAMVRLFPQLREVGARMLLQVHDELLLEAPKERAEEVAALAKEVMEGVWPLAVPLEVEVGIGEDWLAAKG

SEQ ID NO: 4813 - DNA, 2523 bp, synthetic construct
  misc_feature 1..2523: note = Variant of DNA polymerase I from Thermus sp. strain 2.9
  source 1..2523: mol_type = other DNA
atgcaccatcatcatcatcatggcggtagcggcgtgttaccggtgttcgagcctaaaggtcgcgtgcttctggttgatggccatcatctcgcgtatcgtaacttctttgccctgaaaggattaaccaccagcctgggcgagccggtacagggtgtctacggctttgcaaagtcgctcctgaaagctctgaaagaagacggtgatgtggtgattgttgtctttgatgcgaaagcgccaagttttcgccacgaagcgtacgaagcttacaaagccgggcgtgctccaacgccggaagactttcctcgccaattggcgcttatgaaggaattagtggatttgcttggcctcgaacgcttggaagttcccggtttcgaggcagacgacgtattagcgactctcgcaaagaaagccgaacgtgagggctatgaagtccagatcttgacagcagatcgcgatcttttccagcttttatctccgcgcatctcggtgttacacccggaagggcatcgtatcaccccggaatggctctgggagaaatatggtttgcgtcccgaacaatgggtggattttcgcgccttagcaggcgatccgagcgacaatattccgggagttaaaggtatcggcgagaagacggcgctcaagctccttaaagaatgggggtcgttggagaacttgcttaagaatttagatcaggtcaaaccagagtcagtgcgtgagaagattcttgctcacctcgaagacctcaaattaagccgcgaattgtcccgtgtacgcaccgatttgccgctcgaagttgatttcggtcgccgccgcgaacctgactgggagggtcttaaagcgtttttagagcgtcttgaatttggttcgctcttgcatgaattcggccttttagaaagcccgttactggccgaagaagcaccttggccaccgcccgagggcgcgtttttaggttaccgtttgagtcgcccggaaccgatgtgggccgaattactggctcttgcagcgtctgcccagggacgtgtgtatcgcgcggaagaccctcatggtgcgctccgcggcctcttcgaagtccgtggactccttgccaaagacttagctgttgttgcattgcgcgaaggtcttgatttacctccgactgatgatccaatgcttcttgcgtacctcttggacccgtcaaacacgacgcccgaaggcgtagcccgtcgttacggcggcgagtggaccgaagatgcagcgaaacgcgcgttattggccgaacgtttgcacgccaatttattaggacgtttgcaaggcgaggaacgtctcctctggctttacgaagaagtggagaaaccattgagtcgcgtgctcgcgcatatggaagctaccggtgtcaaattagacgtggcgaagttggagaatctcagccttgaagttgctgcccacatgcgccgcttggaggaagaagtattccgtttagcaggccgttcctttcgccttaactctcgcgatcagttagaacgtgtgttgttcgatgaacttggtctccctcctatcggcaagacagagaagaccggtaaacgtagcacttcagcggcggttttagaagctcttcgcgaagtccatcccattgtggacaagatcttgcagtaccgcgaactcgcgaaattgaaaggcacctatattgaccgtcttccggcattagtccacccgaaaacgggacgcctccatacccgcttcaaccaaacagccacggcgaccggtcgtttgtcctcctctgatccaaaccttcagaatattccagtacgtaccccattgggccagaagatccgccgtgcgtttgtagctgaggagggttggcgtttagtggccctcgattatcgtcaaattgaattacgtgtccttgcccatctttctggcgatgagaacctcatccgcgtgtttcaggaaggcaaagacattcacactcaaacggcaagctggatgtttggattatcagctgaagcgatcgatcctttgatgcgtcgtgcagcgaagaccatcaatttcggtgttctctacggtatgagtgcctttcgtttgtcgcaggaattaggcattccctatgaagaagctcaggcgttcattcagaaatactttcaaagctatcccaaagttaaagcatggatcgagaagactctccgtgaaggccgcacacgtggttacgtagagaccttatttggacgtcgccgctatgttcccgatttaaacgctcgcgtgaaaggcaagcgtgaagccgccgaacgcatggcgttcaacatgcctgtacagggcacggcagctgacctcatgaaacttgcaatggtgcgcctttttccacaattgcgtgaagttggtgcccgcatgctcttgcaggtccacgatgaactcttgttagaagcgccaaaagagcgtgcggaagaggtggcagccctcgcgaaagaagttatggaaggcgtgtggcccttagcggtgcctcttgaagtcgaagttggtattggcgaggattggctggctgccaaagga

SEQ ID NO: 4814 - protein, 841 aa, synthetic construct
  REGION 1..841: note = Variant of DNA polymerase I from Thermus sp. strain 2.9
MHHHHHHGGSGVLPVFEPKGRVLLVDGHHLAYRNFFALKGLTTSLGEPVQGVYGFAKSLLKALKEDGDVVIVVFDAKAPSFRHEAYEAYKAGRAPTPEDFPRQLALMKELVDLLGLERLEVPGFEADDVLATLAKKAEREGYEVQILTADRDLFQLLSPRISVLHPEGHRITPEWLWEKYGLRPEQWVDFRALAGDPSDNIPGVKGIGEKTALKLLKEWGSLENLLKNLDQVKPESVREKILAHLEDLKLSRELSRVRTDLPLEVDFGRRREPDWEGLKAFLERLEFGSLLHEFGLLESPLLAEEAPWPPPEGAFLGYRLSRPEPMWAELLALAASAQGRVYRAEDPHGALRGLFEVRGLLAKDLAVVALREGLDLPPTDDPMLLAYLLDPSNTTPEGVARRYGGEWTEDAAKRALLAERLHANLLGRLQGEERLLWLYEEVEKPLSRVLAHMEATGVKLDVAKLENLSLEVAAHMRRLEEEVFRLAGRSFRLNSRDQLERVLFDELGLPPIGKTEKTGKRSTSAAVLEALREVHPIVDKILQYRELAKLKGTYIDRLPALVHPKTGRLHTRFNQTATATGRLSSSDPNLQNIPVRTPLGQKIRRAFVAEEGWRLVALDYRQIELRVLAHLSGDENLIRVFQEGKDIHTQTASWMFGLSAEAIDPLMRRAAKTINFGVLYGMSAFRLSQELGIPYEEAQAFIQKYFQSYPKVKAWIEKTLREGRTRGYVETLFGRRRYVPDLNARVKGKREAAERMAFNMPVQGTAADLMKLAMVRLFPQLREVGARMLLQVHDELLLEAPKERAEEVAALAKEVMEGVWPLAVPLEVEVGIGEDWLAAKG

SEQ ID NO: 4815 - DNA, 2523 bp, synthetic construct
  misc_feature 1..2523: note = Variant of DNA polymerase I from Thermus sp. strain 2.9
  source 1..2523: mol_type = other DNA
atgcaccatcatcatcatcatggcggtagcggcgtgttaccggtgttcgagcctaaaggtcgcgtgcttctggttgatggccatcatctcgcgtatcgtaacttctttgccctgaaaggattaaccaccagcctgggcgagccggtacagggtgtctacggctttgcaaagtcgctcctgaaagctctgaaagaagacggtgatgtggtgattgttgtctttgatgcgaaagcgccaagttttcgccacgaagcgtacgaagcttacaaagccgggcgtgctccaacgccggaagactttcctcgccaattggcgcttatgaaggaattagtggatttgcttggcctcgaacgcttggaagttcccggtttcgaggcagacgacgtattagcgactctcgcaaagaaagccgaacgtgagggctatgaagtccagatcttgacagcagatcgcgatcttttccagcttttatctccgcgcatctcggtgttacacccggaagggcatcgtatcaccccggaatggctctgggagaaatatggtttgcgtcccgaacaatgggtggattttcgcgccttagcaggcgatccgagcgacaatattccgggagttaaaggtatcggcgagaagacggcgctcaagctccttaaagaatgggggtcgttggagaacttgcttaagaatttagatcaggtcaaaccagagtcagtgcgtgagaagattcttgctcacctcgaagacctcaaattaagccgcgaattgtcccgtgtacgcaccgatttgccgctcgaagttgatttcggtcgccgccgcgaacctgactgggagggtcttaaagcgtttttagagcgtcttgaatttggttcgctcttgcatgaattcggccttttagaaagcccgttactggccgaagaagcaccttggccaccgcccgagggcgcgtttttaggttaccgtttgagtcgcccggaaccgatgtgggccgaattactggctcttgcagcgtctgcccagggacgtgtgtatcgcgcggaagaccctcatggtgcgctccgcggcctcttcgaagtccgtggactccttgccaaagacttagctgttgttgcattgcgcgaaggtcttgatttacctccgactgatgatccaatgcttcttgcgtacctcttggacccgtcaaacacgacgcccgaaggcgtagcccgtcgttacggcggcgagtggaccgaagatgcagcgaaacgcgcgttattggccgaacgtttgcacgccaatttattaggacgtttgcaaggcgaggaacgtctcctctggctttacgaagaagtggagaaaccattgagtcgcgtgctcgcgcatatggaagctaccggtgtcaaattagacgtggcgtatttggagaatctcagccttgaagttgctgcccacatgcgccgcttggaggaagaagtattccgtttagcaggccgttcctttcgccttaactctcgcgatcagttagaacgtgtgttgttcgatgaacttggtctccctcctatcggcaagacagagaagaccggtaaacgtagcacttcagcggcggttttagaagctcttcgcgaagtccatcccattgtggacaagatcttgcagtaccgcgaactcgcgaaattgaaaggcacctatattgaccgtcttccggcattagtccacccgaaaacgggacgcctccatacccgcttcaaccaaacagccacggcgaccggtcgtttgtcctcctctgatccaaaccttcagaatattccagtacgtaccccattgggccagaagatccgccgtgcgtttgtagctgaggagggttggcgtttagtggccctcgattatcgtcaaattgaattacgtgtcactgcccatctttctggcgatgagaacctcatccgcgtgtttcaggaaggcaaagacattcacactcaaacggcaagctggatgtttggattatcagctgaagcgatcgatcctttgatgcgtcgtgcagcgaagaccatcaatttcggtgttctctacggtatgagtgcctttcgtttgtcgcaggaattaggcattccctatgaagaagctcaggcgttcattcagaaatactttcaaagctatcccaaagttaaagcatggatcgagaagactctccgtgaaggccgcacacgtggttacgtagagaccttatttggacgtcgccgctatgttcccgatttaaacgctcgcgtgaaaggcaagcgtgaagccgccgaacgcatggcgttcaacatgcctgtacagggcacggcagctgacctcatgaaacttgcaatggtgcgcctttttccacaattgcgtgaagttggtgcccgcatgctcttgcaggtccacgatgaactcttgttagaagcgccaaaagagcgtgcggaagaggtggcagccctcgcgaaagaagttatggaaggcgtgtggcccttagcggtgcctcttgaagtcgaagttggtattggcgaggattggctggctgccaaagga

SEQ ID NO: 4816 - protein, 841 aa, synthetic construct
  REGION 1..841: note = Variant of DNA polymerase I from Thermus sp. strain 2.9
MHHHHHHGGSGVLPVFEPKGRVLLVDGHHLAYRNFFALKGLTTSLGEPVQGVYGFAKSLLKALKEDGDVVIVVFDAKAPSFRHEAYEAYKAGRAPTPEDFPRQLALMKELVDLLGLERLEVPGFEADDVLATLAKKAEREGYEVQILTADRDLFQLLSPRISVLHPEGHRITPEWLWEKYGLRPEQWVDFRALAGDPSDNIPGVKGIGEKTALKLLKEWGSLENLLKNLDQVKPESVREKILAHLEDLKLSRELSRVRTDLPLEVDFGRRREPDWEGLKAFLERLEFGSLLHEFGLLESPLLAEEAPWPPPEGAFLGYRLSRPEPMWAELLALAASAQGRVYRAEDPHGALRGLFEVRGLLAKDLAVVALREGLDLPPTDDPMLLAYLLDPSNTTPEGVARRYGGEWTEDAAKRALLAERLHANLLGRLQGEERLLWLYEEVEKPLSRVLAHMEATGVKLDVAYLENLSLEVAAHMRRLEEEVFRLAGRSFRLNSRDQLERVLFDELGLPPIGKTEKTGKRSTSAAVLEALREVHPIVDKILQYRELAKLKGTYIDRLPALVHPKTGRLHTRFNQTATATGRLSSSDPNLQNIPVRTPLGQKIRRAFVAEEGWRLVALDYRQIELRVTAHLSGDENLIRVFQEGKDIHTQTASWMFGLSAEAIDPLMRRAAKTINFGVLYGMSAFRLSQELGIPYEEAQAFIQKYFQSYPKVKAWIEKTLREGRTRGYVETLFGRRRYVPDLNARVKGKREAAERMAFNMPVQGTAADLMKLAMVRLFPQLREVGARMLLQVHDELLLEAPKERAEEVAALAKEVMEGVWPLAVPLEVEVGIGEDWLAAKG

SEQ ID NO: 4817 - DNA, 2523 bp, synthetic construct
  misc_feature 1..2523: note = Variant of DNA polymerase I from Thermus sp. strain 2.9
  source 1..2523: mol_type = other DNA
atgcaccatcatcatcatcatggcggtagcggcgtgttaccggtgttcgagcctaaaggtcgcgtgcttctggttgatggccatcatctcgcgtatcgtaacttctttgccctgaaaggattaaccaccagcctgggcgagccggtacagggtgtctacggctttgcaaagtcgctcctgaaagctctgaaagaagacggtgatgtggtgattgttgtctttgatgcgaaagcgccaagttttcgccacgaagcgtacgaagcttacaaagccgggcgtgctccaacgccggaagactttcctcgccaattggcgcttatgaaggaattagtggatttgcttggcctcgaacgcttggaagttcccggtttcgaggcagacgacgtattagcgactctcgcaaagaaagccgaacgtgagggctatgaagtccagatcttgacagcagatcgcgatcttttccagcttttatctccgcgcatctcggtgttacacccggaagggcatcgtatcaccccggaatggctctgggagaaatatggtttgcgtcccgaacaatgggtggattttcgcgccttagcaggcgatccgagcgacaatattccgggagttaaaggtatcggcgagaagacggcgctcaagctccttaaagaatgggggtcgttggagaacttgcttaagaatttagatcaggtcaaaccagagtcagtgcgtgagaagattcttgctcacctcgaagacctcaaattaagccgcgaattgtcccgtgtacgcaccgatttgccgctcgaagttgatttcggtcgccgccgcgaacctgactgggagggtcttaaagcgtttttagagcgtcttgaatttggttcgctcttgcatgaattcggccttttagaaagcccgttactggccgaagaagcaccttggccaccgcccgagggcgcgtttttaggttaccgtttgagtcgcccggaaccgatgtgggccgaattactggctcttgcagcgtctgcccagggacgtgtgtatcgcgcggaagaccctcatggtgcgctccgcggcctcttcgaagtccgtggactccttgccaaagacttagctgttgttgcattgcgcgaaggtcttgatttacctccgactgatgatccaatgcttcttgcgtacctcttggacccgtcaaacacgacgcccgaaggcgtagcccgtcgttacggcggcgagtggaccgaagatgcagcgaaacgcgcgttattggccgaacgtttgcacgccaatttattaggacgtttgcaaggcgaggaacgtctcctctggctttacgaagaagtggagaaaccattgagtcgcgtgctcgcgcatatggaagctaccggtgtcaaattagacgtggcgtatttggagaatctcagccttgaagttgctgcccacatgcgccgcttggaggaagaagtattccgtttagcaggccgttcctttcgccttaactctcgcgatcagttagaacgtgtgttgttcgatgaacttggtctccctcctatcggcaagacagagaagaccggtaaacgtagcacttcagcggcggttttagaagctcttcgcgaagtccatcccattgtggacaagatcttgcagtaccgcgaactcgcgaaattgaaaggcacctatattgaccgtcttccggcattagtccacccgaaaacgggacgcctccatacccgcttcaaccaaacagccacggcgaccggtcgtttgtcctcctctgatccaaaccttcagaatattccagtacgtaccccattgggccagaagatccgccgtgcgtttgtagctgaggagggttggcgtttagtggccctcgattatcgtcaaattgaattacgtgtccttgcccatctttctggcgatgagaacctcatccgcgtgtttcaggaaggcaaagacattcacactcaaacggcaagctggatgtttggattatcagctgaagcgatcgatcctttgatgcgtcgtgcagcgaagaccatcaatttcggtgttctctacggtatgagtgcctttcgtttgtcgcaggaattaggcattccctatgaagaagctcaggcgttcattcagaaatactttcaaagctatcccaaagttaaagcatggatcgagaagactctccgtgaaggccgcacacgtggttacgtagagaccttatttggacgtcgccgctatgttcccgatttaaacgctcgcgtgaaaggcaagcgtgaagccttggaacgcatggcgttcaacatgcctgtacagggcacggcagctgacctcatgaaacttgcaatggtgcgcctttttccacaattgcgtgaagttggtgcccgcatgctcttgcaggtccacgatgaactcttgttagaagcgccaaaagagcgtgcggaagaggtggcagccctcgcgaaagaagttatggaaggcgtgtggcccttagcggtgcctcttgaagtcgaagttggtattggcgaggattggctggctgccaaagga

SEQ ID NO: 4818 - protein, 841 aa, synthetic construct
  REGION 1..841: note = Variant of DNA polymerase I from Thermus sp. strain 2.9
MHHHHHHGGSGVLPVFEPKGRVLLVDGHHLAYRNFFALKGLTTSLGEPVQGVYGFAKSLLKALKEDGDVVIVVFDAKAPSFRHEAYEAYKAGRAPTPEDFPRQLALMKELVDLLGLERLEVPGFEADDVLATLAKKAEREGYEVQILTADRDLFQLLSPRISVLHPEGHRITPEWLWEKYGLRPEQWVDFRALAGDPSDNIPGVKGIGEKTALKLLKEWGSLENLLKNLDQVKPESVREKILAHLEDLKLSRELSRVRTDLPLEVDFGRRREPDWEGLKAFLERLEFGSLLHEFGLLESPLLAEEAPWPPPEGAFLGYRLSRPEPMWAELLALAASAQGRVYRAEDPHGALRGLFEVRGLLAKDLAVVALREGLDLPPTDDPMLLAYLLDPSNTTPEGVARRYGGEWTEDAAKRALLAERLHANLLGRLQGEERLLWLYEEVEKPLSRVLAHMEATGVKLDVAYLENLSLEVAAHMRRLEEEVFRLAGRSFRLNSRDQLERVLFDELGLPPIGKTEKTGKRSTSAAVLEALREVHPIVDKILQYRELAKLKGTYIDRLPALVHPKTGRLHTRFNQTATATGRLSSSDPNLQNIPVRTPLGQKIRRAFVAEEGWRLVALDYRQIELRVLAHLSGDENLIRVFQEGKDIHTQTASWMFGLSAEAIDPLMRRAAKTINFGVLYGMSAFRLSQELGIPYEEAQAFIQKYFQSYPKVKAWIEKTLREGRTRGYVETLFGRRRYVPDLNARVKGKREALERMAFNMPVQGTAADLMKLAMVRLFPQLREVGARMLLQVHDELLLEAPKERAEEVAALAKEVMEGVWPLAVPLEVEVGIGEDWLAAKG

SEQ ID NO: 4819 - DNA, 2523 bp, synthetic construct
  misc_feature 1..2523: note = Variant of DNA polymerase I from Thermus sp. strain 2.9
  source 1..2523: mol_type = other DNA
atgcaccatcatcatcatcatggcggtagcggcgtgttaccggtgttcgagcctaaaggtcgcgtgcttctggttgatggccatcatctcgcgtatcgtaacttctttgccctgaaaggattaaccaccagcctgggcgagccggtacagggtgtctacggctttgcaaagtcgctcctgaaagctctgaaagaagacggtgatgtggtgattgttgtctttgatgcgaaagcgccaagttttcgccacgaagcgtacgaagcttacaaagccgggcgtgctccaacgccggaagactttcctcgccaattggcgcttatgaaggaattagtggatttgcttggcctcgaacgcttggaagttcccggtttcgaggcagacgacgtattagcgactctcgcaaagaaagccgaacgtgagggctatgaagtccagatcttgacagcagatcgcgatcttttccagcttttatctccgcgcatctcggtgttacacccggaagggcatcgtatcaccccggaatggctctgggagaaatatggtttgcgtcccgaacaatgggtggattttcgcgccttagcaggcgatccgagcgacaatattccgggagttaaaggtatcggcgagaagacggcgctcaagctccttaaagaatgggggtcgttggagaacttgcttaagaatttagatcaggtcaaaccagagtcagtgcgtgagaagattcttgctcacctcgaagacctcaaattaagccgcgaattgtcccgtgtacgcaccgatttgccgctcgaagttgatttcggtcgccgccgcgaacctgactgggagggtcttaaagcgtttttagagcgtcttgaatttggttcgctcttgcatgaattcggccttttagaaagcccgttactggccgaagaagcaccttggccaccgcccgagggcgcgtttttaggttaccgtttgagtcgcccggaaccgatgtgggccgaattactggctcttgcagcgtctgcccagggacgtgtgtatcgcgcggaagaccctcatggtgcgctccgcggcctcttcgaagtccgtggactccttgccaaagacttagctgttgttgcattgcgcgaaggtcttgatttacctccgactgatgatccaatgcttcttgcgtacctcttggacccgtcaaacacgacgcccgaaggcgtagcccgtcgttacggcggcgagtggaccgaagatgcagcgaaacgcgcgttattggccgaacgtttgcacgccaatttattaggacgtttgcaagatgaggaacgtctcctctggctttacgaagaagtggagaaaccattgagtcgcgtgctcgcgcatatggaagctaccggtgtcaaattagacgtggcgtatttggagaatctcagccttgaagttgctgcccacatgcgccgcttggaggaagaagtattccgtttagcaggccgttcctttcgccttaactctcgcgatcagttagaacgtgtgttgttcgatgaacttggtctccctcctatcggcaagacagagaagaccggtaaacgtagcacttcagcggcggttttagaagctcttcgcgaagtccatcccattgtggacaagatcttgcagtaccgcgaactcgcgaaattgaaaggcacctatattgaccgtcttccggcattagtccacccgaaaacgggacgcctccatacccgcttcaaccaaacagccacggcgaccggtcgtttgtcctcctctgatccaaaccttcagaatattccagtacgtaccccattgggccagaagatccgccgtgcgtttgtagctgaggagggttggcgtttagtggccctcgattatcgtcaaattgaattacgtgtccttgcccatctttctggcgatgagaacctcatccgcgtgtttcaggaaggcaaagacattcacactcaaacggcaagctggatgtttggattatcagctgaagcgatcgatcctttgatgcgtcgtgcagcgaagaccatcaatttcggtgttctctacggtatgagtgcctttcgtttgtcgcaggaattaggcattccctatgaagaagctcaggcgttcattcagaaatactttcaaagctatcccaaagttaaagcatggatcgagaagactctccgtgaaggccgcacacgtggttacgtagagaccttatttggacgtcgccgctatgttcccgatttaaacgctcgcgtgaaaggcaagcgtgaagccgccgaacgcatggcgttcaacatgcctgtacagggcacggcagctgacctcatgaaacttgcaatggtgcgcctttttccacaattgcgtgaagttggtgcccgcatgctcttgcaggtccacgatgaactcttgttagaagcgccaaaagagcgtgcggaagaggtggcagccctcgcgaaagaagttatggaaggcgtgtggcccttagcggtgcctcttgaagtcgaagttggtattggcgaggattggctggctgccaaagga

SEQ ID NO: 4820 - protein, 841 aa, synthetic construct
  REGION 1..841: note = Variant of DNA polymerase I from Thermus sp. strain 2.9
MHHHHHHGGSGVLPVFEPKGRVLLVDGHHLAYRNFFALKGLTTSLGEPVQGVYGFAKSLLKALKEDGDVVIVVFDAKAPSFRHEAYEAYKAGRAPTPEDFPRQLALMKELVDLLGLERLEVPGFEADDVLATLAKKAEREGYEVQILTADRDLFQLLSPRISVLHPEGHRITPEWLWEKYGLRPEQWVDFRALAGDPSDNIPGVKGIGEKTALKLLKEWGSLENLLKNLDQVKPESVREKILAHLEDLKLSRELSRVRTDLPLEVDFGRRREPDWEGLKAFLERLEFGSLLHEFGLLESPLLAEEAPWPPPEGAFLGYRLSRPEPMWAELLALAASAQGRVYRAEDPHGALRGLFEVRGLLAKDLAVVALREGLDLPPTDDPMLLAYLLDPSNTTPEGVARRYGGEWTEDAAKRALLAERLHANLLGRLQDEERLLWLYEEVEKPLSRVLAHMEATGVKLDVAYLENLSLEVAAHMRRLEEEVFRLAGRSFRLNSRDQLERVLFDELGLPPIGKTEKTGKRSTSAAVLEALREVHPIVDKILQYRELAKLKGTYIDRLPALVHPKTGRLHTRFNQTATATGRLSSSDPNLQNIPVRTPLGQKIRRAFVAEEGWRLVALDYRQIELRVLAHLSGDENLIRVFQEGKDIHTQTASWMFGLSAEAIDPLMRRAAKTINFGVLYGMSAFRLSQELGIPYEEAQAFIQKYFQSYPKVKAWIEKTLREGRTRGYVETLFGRRRYVPDLNARVKGKREAAERMAFNMPVQGTAADLMKLAMVRLFPQLREVGARMLLQVHDELLLEAPKERAEEVAALAKEVMEGVWPLAVPLEVEVGIGEDWLAAKG

SEQ ID NO: 4821 - DNA, 2523 bp, synthetic construct
  misc_feature 1..2523: note = Variant of DNA polymerase I from Thermus sp. strain 2.9
  source 1..2523: mol_type = other DNA
atgcaccatcatcatcatcatggcggtagcggcgtgttaccggtgttcgagcctaaaggtcgcgtgcttctggttgatggccatcatctcgcgtatcgtaacttctttgccctgaaaggattaaccaccagcctgggcgagccggtacagggtgtctacggctttgcaaagtcgctcctgaaagctctgaaagaagacggtgatgtggtgattgttgtctttgatgcgaaagcgccaagttttcgccacgaagcgtacgaagcttacaaagccgggcgtgctccaacgccggaagactttcctcgccaattggcgcttatgaaggaattagtggatttgcttggcctcgaacgcttggaagttcccggtttcgaggcagacgacgtattagcgactctcgcaaagaaagccgaacgtgagggctatgaagtccagatcttgacagcagatcgcgatcttttccagcttttatctccgcgcatctcggtgttacacccggaagggcatcgtatcaccccggaatggctctgggagaaatatggtttgcgtcccgaacaatgggtggattttcgcgccttagcaggcgatccgagcgacaatattccgggagttaaaggtatcggcgagaagacggcgctcaagctccttaaagaatgggggtcgttggagaacttgcttaagaatttagatcaggtcaaaccagagtcagtgcgtgagaagattcttgctcacctcgaagacctcaaattaagccgcgaattgtcccgtgtacgcaccgatttgccgctcgaagttgatttcggtcgccgccgcgaacctgactgggagggtcttaaagcgtttttagagcgtcttgaatttggttcgctcttgcatgaattcggccttttagaaagcccgttactggccgaagaagcaccttggccaccgcccgagggcgcgtttttaggttaccgtttgagtcgcccggaaccgatgtgggccgaattactggctcttgcagcgtctgcccagggacgtgtgtatcgcgcggaagaccctcatggtgcgctccgcggcctcttcgaagtccgtggactccttgccaaagacttagctgttgttgcattgcgcgaaggtcttgatttacctccgactgatgatccaatgcttcttgcgtacctcttggacccgtcaaacacgacgcccgaaggcgtagcccgtcgttacggcggcgagtggaccgaagatgcagcgaaacgcgcgttattggccgaacgtttgcacgccaatttattaggacgtttgcaaggcgaggaacgtctcctctggctttacgaagaagtggagaaaccattgagtcgcgtgctcgcgcatatggaagctaccggtgtcaaattagacgtggcgtatttggagaatctcagccttgaagttgctgcccacatgcgccgcttggaggaagaagtattccgtttagcaggccgttcctttcgccttaactctcgcgatcagttagaacgtgtgttgttcgatgaacttggtctccctcctatcggcaagacagagaagaccggtaaacgtagcacttcagcggcggttttagaagctcttcgcgaagtccatcccattgtggacaagatcttgcagtaccgcgaactcgcgaaattgaaaggcacctatattgaccgtcttccggcattagtccacccgaaaacgggacgcctccatacccgcttcaaccaaacagccacggcgaccggtcgtttgtcctcctctgatccaaaccttcagaatattccagtacgtaccccattgggccagaagatccgccgtgcgtttgtagctgaggagggttggcgtttagtggccctcgattatcgtcaaattgaattacgtgtccttgcccatctttctggcgatgagaacctcatccgcgtgtttcaggaaggcaaagacattcacactcaaacggcaagctggatgtttggattatcagctgaagcgatcgatcctttgatgcgtcgtgcagcgaagaccatcaatttcgcggttctctacggtatgagtgcctttcgtttgtcgcaggaattaggcattccctatgaagaagctcaggcgttcattcagaaatactttcaaagctatcccaaagttaaagcatggatcgagaagactctccgtgaaggccgcacacgtggttacgtagagaccttatttggacgtcgccgctatgttcccgatttaaacgctcgcgtgaaaggcaagcgtgaagccgccgaacgcatggcgttcaacatgcctgtacagggcacggcagctgacctcatgaaacttgcaatggtgcgcctttttccacaattgcgtgaagttggtgcccgcatgctcttgcaggtccacgatgaactcttgttagaagcgccaaaagagcgtgcggaagaggtggcagccctcgcgaaagaagttatggaaggcgtgtggcccttagcggtgcctcttgaagtcgaagttggtattggcgaggattggctggctgccaaagga

SEQ ID NO: 4822 - protein, 841 aa, synthetic construct
  REGION 1..841: note = Variant of DNA polymerase I from Thermus sp. strain 2.9
MHHHHHHGGSGVLPVFEPKGRVLLVDGHHLAYRNFFALKGLTTSLGEPVQGVYGFAKSLLKALKEDGDVVIVVFDAKAPSFRHEAYEAYKAGRAPTPEDFPRQLALMKELVDLLGLERLEVPGFEADDVLATLAKKAEREGYEVQILTADRDLFQLLSPRISVLHPEGHRITPEWLWEKYGLRPEQWVDFRALAGDPSDNIPGVKGIGEKTALKLLKEWGSLENLLKNLDQVKPESVREKILAHLEDLKLSRELSRVRTDLPLEVDFGRRREPDWEGLKAFLERLEFGSLLHEFGLLESPLLAEEAPWPPPEGAFLGYRLSRPEPMWAELLALAASAQGRVYRAEDPHGALRGLFEVRGLLAKDLAVVALREGLDLPPTDDPMLLAYLLDPSNTTPEGVARRYGGEWTEDAAKRALLAERLHANLLGRLQGEERLLWLYEEVEKPLSRVLAHMEATGVKLDVAYLENLSLEVAAHMRRLEEEVFRLAGRSFRLNSRDQLERVLFDELGLPPIGKTEKTGKRSTSAAVLEALREVHPIVDKILQYRELAKLKGTYIDRLPALVHPKTGRLHTRFNQTATATGRLSSSDPNLQNIPVRTPLGQKIRRAFVAEEGWRLVALDYRQIELRVLAHLSGDENLIRVFQEGKDIHTQTASWMFGLSAEAIDPLMRRAAKTINFAVLYGMSAFRLSQELGIPYEEAQAFIQKYFQSYPKVKAWIEKTLREGRTRGYVETLFGRRRYVPDLNARVKGKREAAERMAFNMPVQGTAADLMKLAMVRLFPQLREVGARMLLQVHDELLLEAPKERAEEVAALAKEVMEGVWPLAVPLEVEVGIGEDWLAAKG

SEQ ID NO: 4823 - DNA, 2523 bp, synthetic construct
  misc_feature 1..2523: note = Variant of DNA polymerase I from Thermus sp. strain 2.9
  source 1..2523: mol_type = other DNA
atgcaccatcatcatcatcatggcggtagcggcgtgttaccggtgttcgagcctaaaggtcgcgtgcttctggttgatggccatcatctcgcgtatcgtaacttctttgccctgaaaggattaaccaccagcctgggcgagccggtacagggtgtctacggctttgcaaagtcgctcctgaaagctctgaaagaagacggtgatgtggtgattgttgtctttgatgcgaaagcgccaagttttcgccacgaagcgtacgaagcttacaaagccgggcgtgctccaacgccggaagactttcctcgccaattggcgcttatgaaggaattagtggatttgcttggcctcgaacgcttggaagttcccggtttcgaggcagacgacgtattagcgactctcgcaaagaaagccgaacgtgagggctatgaagtccagatcttgacagcagatcgcgatcttttccagcttttatctccgcgcatctcggtgttacacccggaagggcatcgtatcaccccggaatggctctgggagaaatatggtttgcgtcccgaacaatgggtggattttcgcgccttagcaggcgatccgagcgacaatattccgggagttaaaggtatcggcgagaagacggcgctcaagctccttaaagaatgggggtcgttggagaacttgcttaagaatttagatcaggtcaaaccagagtcagtgcgtgagaagattcttgctcacctcgaagacctcaaattaagccgcgaattgtcccgtgtacgcaccgatttgccgctcgaagttgatttcggtcgccgccgcgaacctgactgggagggtcttaaagcgtttttagagcgtcttgaatttggttcgctcttgcatgaattcggccttttagaaagcccgttactggccgaagaagcaccttggccaccgcccgagggcgcgtttttaggttaccgtttgagtcgcccggaaccgatgtgggccgaattactggctcttgcagcgtctgcccagggacgtgtgtatcgcgcggaagaccctcatggtgcgctccgcggcctcttcgaagtcctgggactccttgccaaagacttagctgttgttgcattgcgcgaaggtcttgatttacctccgactgatgatccaatgcttcttgcgtacctcttggacccgtcaaacacgacgcccgaaggcgtagcccgtcgttacggcggcgagtggaccgaagatgcagcgaaacgcgcgttattggccgaacgtttgcacgccaatttattaggacgtttgcaaggcgaggaacgtctcctctggctttacgaagaagtggagaaaccattgagtcgcgtgctcgcgcatatggaagctaccggtgtcaaattagacgtggcgtatttggagaatctcagccttgaagttgctgcccacatgcgccgcttggaggaagaagtattccgtttagcaggccgttcctttcgccttaactctcgcgatcagttagaacgtgtgttgttcgatgaacttggtctccctcctatcggcaagacagagaagaccggtaaacgtagcacttcagcggcggttttagaagctcttcgcgaagtccatcccattgtggacaagatcttgcagtaccgcgaactcgcgaaattgaaaggcacctatattgaccgtcttccggcattagtccacccgaaaacgggacgcctccatacccgcttcaaccaaacagccacggcgaccggtcgtttgtcctcctctgatccaaaccttcagaatattccagtacgtaccccattgggccagaagatccgccgtgcgtttgtagctgaggagggttggcgtttagtggccctcgattatcgtcaaattgaattacgtgtccttgcccatctttctggcgatgagaacctcatccgcgtgtttcaggaaggcaaagacattcacactcaaacggcaagctggatgtttggattatcagctgaagcgatcgatcctttgatgcgtcgtgcagcgaagaccatcaatttcggtgttctctacggtatgagtgcctttcgtttgtcgcaggaattaggcattccctatgaagaagctcaggcgttcattcagaaatactttcaaagctatcccaaagttaaagcatggatcgagaagactctccgtgaaggccgcacacgtggttacgtagagaccttatttggacgtcgccgctatgttcccgatttaaacgctcgcgtgaaaggcaagcgtgaagccgccgaacgcatggcgttcaacatgcctgtacagggcacggcagctgacctcatgaaacttgcaatggtgcgcctttttccacaattgcgtgaagttggtgcccgcatgctcttgcaggtccacgatgaactcttgttagaagcgccaaaagagcgtgcggaagaggtggcagccctcgcgaaagaagttatggaaggcgtgtggcccttagcggtgcctcttgaagtcgaagttggtattggcgaggattggctggctgccaaagga

SEQ ID NO: 4824 - protein, 841 aa, synthetic construct
  REGION 1..841: note = Variant of DNA polymerase I from Thermus sp. strain 2.9
MHHHHHHGGSGVLPVFEPKGRVLLVDGHHLAYRNFFALKGLTTSLGEPVQGVYGFAKSLLKALKEDGDVVIVVFDAKAPSFRHEAYEAYKAGRAPTPEDFPRQLALMKELVDLLGLERLEVPGFEADDVLATLAKKAEREGYEVQILTADRDLFQLLSPRISVLHPEGHRITPEWLWEKYGLRPEQWVDFRALAGDPSDNIPGVKGIGEKTALKLLKEWGSLENLLKNLDQVKPESVREKILAHLEDLKLSRELSRVRTDLPLEVDFGRRREPDWEGLKAFLERLEFGSLLHEFGLLESPLLAEEAPWPPPEGAFLGYRLSRPEPMWAELLALAASAQGRVYRAEDPHGALRGLFEVLGLLAKDLAVVALREGLDLPPTDDPMLLAYLLDPSNTTPEGVARRYGGEWTEDAAKRALLAERLHANLLGRLQGEERLLWLYEEVEKPLSRVLAHMEATGVKLDVAYLENLSLEVAAHMRRLEEEVFRLAGRSFRLNSRDQLERVLFDELGLPPIGKTEKTGKRSTSAAVLEALREVHPIVDKILQYRELAKLKGTYIDRLPALVHPKTGRLHTRFNQTATATGRLSSSDPNLQNIPVRTPLGQKIRRAFVAEEGWRLVALDYRQIELRVLAHLSGDENLIRVFQEGKDIHTQTASWMFGLSAEAIDPLMRRAAKTINFGVLYGMSAFRLSQELGIPYEEAQAFIQKYFQSYPKVKAWIEKTLREGRTRGYVETLFGRRRYVPDLNARVKGKREAAERMAFNMPVQGTAADLMKLAMVRLFPQLREVGARMLLQVHDELLLEAPKERAEEVAALAKEVMEGVWPLAVPLEVEVGIGEDWLAAKG

SEQ ID NO: 4825 - DNA, 2523 bp, synthetic construct
  misc_feature 1..2523: note = Variant of DNA polymerase I from Thermus sp. strain 2.9
  source 1..2523: mol_type = other DNA
atgcaccatcatcatcatcatggcggtagcggcgtgttaccggtgttcgagcctaaaggtcgcgtgcttctggttgatggccatcatctcgcgtatcgtaacttctttgccctgaaaggattaaccaccagcctgggcgagccggtacagggtgtctacggctttgcaaagtcgctcctgaaagctctgaaagaagacggtgatgtggtgattgttgtctttgatgcgaaagcgccaagttttcgccacgaagcgtacgaagcttacaaagccgggcgtgctccaacgccggaagactttcctcgccaattggcgcttatgaaggaattagtggatttgcttggcctcgaacgcttggaagttcccggtttcgaggcagacgacgtattagcgactctcgcaaagaaagccgaacgtgagggctatgaagtccagatcttgacagcagatcgcgatcttttccagcttttatctccgcgcatctcggtgttacacccggaagggcatcgtatcaccccggaatggctctgggagaaatatggtttgcgtcccgaacaatgggtggattttcgcgccttagcaggcgatccgagcgacaatattccgggagttaaaggtatcggcgagaagacggcgctcaagctccttaaagaatgggggtcgttggagaacttgcttaagaatttagatcaggtcaaaccagagtcagtgcgtgagaagattcttgctcacctcgaagacctcaaattaagccgcgaattgtcccgtgtacgcaccgatttgccgctcgaagttgatttcggtcgccgccgcgaacctgactgggagggtcttaaagcgtttttagagcgtcttgaatttggttcgctcttgcatgaattcggccttttagaaagcccgttactggccgaagaagcaccttggccaccgcccgagggcgcgtttttaggttaccgtttgagtcgcccggaaccgatgtgggccgaattactggctcttgcagcgtctgcccagggacgtgtgtatcgcgcggaagaccctcatggtgcgctccgcggcctcttcgaagtccgtggactccttgccaaagacttagctgttgttgcattgcgcgaaggtcttgatttacctccgactgatgatccaatgcttcttgcgtacctcttggacccgtcaaacacgacgcccgaaggcgtagcccgtcgttacggcggcgagtggaccgaagatgcagcgaaacgcgcgttattggccgaacgtttgcacgccaatttattaggacgtttgcaaggcgaggaacgtctcctctggctttacgaagaagtggagaaaccattgagtcgcgtgctcgcgcatatggaagctaccggtgtcaaattagacgtggcgtatttggagaatctcagccttgaagttgctgcccacatgcgccgcttggaggaagaagtattccgtttagcaggccgttcctttcgccttaactctcgcgatcagttagaacgtgtgttgttcgatgaacttggtctccctcctatcggcaagacagagaagaccggtaaacgtagcacttcagcggcggttttagaagctcttcgcgaagtccatcccattgtggacagtatcttgcagtaccgcgaactcgcgaaattgaaaggcacctatattgaccgtcttccggcattagtccacccgaaaacgggacgcctccatacccgcttcaaccaaacagccacggcgaccggtcgtttgtcctcctctgatccaaaccttcagaatattccagtacgtaccccattgggccagaagatccgccgtgcgtttgtagctgaggagggttggcgtttagtggccctcgattatcgtcaaattgaattacgtgtccttgcccatctttctggcgatgagaacctcatccgcgtgtttcaggaaggcaaagacattcacactcaaacggcaagctggatgtttggattatcagctgaagcgatcgatcctttgatgcgtcgtgcagcgaagaccatcaatttcggtgttctctacggtatgagtgcctttcgtttgtcgcaggaattaggcattccctatgaagaagctcaggcgttcattcagaaatactttcaaagctatcccaaagttaaagcatggatcgagaagactctccgtgaaggccgcacacgtggttacgtagagaccttatttggacgtcgccgctatgttcccgatttaaacgctcgcgtgaaaggcaagcgtgaagccgccgaacgcatggcgttcaacatgcctgtacagggcacggcagctgacctcatgaaacttgcaatggtgcgcctttttccacaattgcgtgaagttggtgcccgcatgctcttgcaggtccacgatgaactcttgttagaagcgccaaaagagcgtgcggaagaggtggcagccctcgcgaaagaagttatggaaggcgtgtggcccttagcggtgcctcttgaagtcgaagttggtattggcgaggattggctggctgccaaagga

SEQ ID NO: 4826 - protein, 841 aa, synthetic construct
  REGION 1..841: note = Variant of DNA polymerase I from Thermus sp. strain 2.9
MHHHHHHGGSGVLPVFEPKGRVLLVDGHHLAYRNFFALKGLTTSLGEPVQGVYGFAKSLLKALKEDGDVVIVVFDAKAPSFRHEAYEAYKAGRAPTPEDFPRQLALMKELVDLLGLERLEVPGFEADDVLATLAKKAEREGYEVQILTADRDLFQLLSPRISVLHPEGHRITPEWLWEKYGLRPEQWVDFRALAGDPSDNIPGVKGIGEKTALKLLKEWGSLENLLKNLDQVKPESVREKILAHLEDLKLSRELSRVRTDLPLEVDFGRRREPDWEGLKAFLERLEFGSLLHEFGLLESPLLAEEAPWPPPEGAFLGYRLSRPEPMWAELLALAASAQGRVYRAEDPHGALRGLFEVRGLLAKDLAVVALREGLDLPPTDDPMLLAYLLDPSNTTPEGVARRYGGEWTEDAAKRALLAERLHANLLGRLQGEERLLWLYEEVEKPLSRVLAHMEATGVKLDVAYLENLSLEVAAHMRRLEEEVFRLAGRSFRLNSRDQLERVLFDELGLPPIGKTEKTGKRSTSAAVLEALREVHPIVDSILQYRELAKLKGTYIDRLPALVHPKTGRLHTRFNQTATATGRLSSSDPNLQNIPVRTPLGQKIRRAFVAEEGWRLVALDYRQIELRVLAHLSGDENLIRVFQEGKDIHTQTASWMFGLSAEAIDPLMRRAAKTINFGVLYGMSAFRLSQELGIPYEEAQAFIQKYFQSYPKVKAWIEKTLREGRTRGYVETLFGRRRYVPDLNARVKGKREAAERMAFNMPVQGTAADLMKLAMVRLFPQLREVGARMLLQVHDELLLEAPKERAEEVAALAKEVMEGVWPLAVPLEVEVGIGEDWLAAKG

SEQ ID NO: 4827 - DNA, 2523 bp, synthetic construct
  misc_feature 1..2523: note = Variant of DNA polymerase I from Thermus sp. strain 2.9
  source 1..2523: mol_type = other DNA
atgcaccatcatcatcatcatggcggtagcggcgtgttaccggtgttcgagcctaaaggtcgcgtgcttctggttgatggccatcatctcgcgtatcgtaacttctttgccctgaaaggattaaccaccagcctgggcgagccggtacagggtgtctacggctttgcaaagtcgctcctgaaagctctgaaagaagacggtgatgtggtgattgttgtctttgatgcgaaagcgccaagttttcgccacgaagcgtacgaagcttacaaagccgggcgtgctccaacgccggaagactttcctcgccaattggcgcttatgaaggaattagtggatttgcttggcctcgaacgcttggaagttcccggtttcgaggcagacgacgtattagcgactctcgcaaagaaagccgaacgtgagggctatgaagtccagatcttgacagcagatcgcgatcttttccagcttttatctccgcgcatctcggtgttacacccggaagggcatcgtatcaccccggaatggctctgggagaaatatggtttgcgtcccgaacaatgggtggattttcgcgccttagcaggcgatccgagcgacaatattccgggagttaaaggtatcggcgagaagacggcgctcaagctccttaaagaatgggggtcgttggagaacttgcttaagaatttagatcaggtcaaaccagagtcagtgcgtgagaagattcttgctcacctcgaagacctcaaattaagccgcgaattgtcccgtgtacgcaccgatttgccgctcgaagttgatttcggtcgccgccgcgaacctgactgggagggtcttaaagcgtttttagagcgtcttgaatttggttcgctcttgcatgaattcggccttttagaaagcccgttactggccgaagaagcaccttggccaccgcccgagggcgcgtttttaggttaccgtttgagtcgcccggaaccgatgtgggccgaattactggctcttgcagcgtctgcccagggacgtgtgtatcgcgcggaagaccctcatggtgcgctccgcggcctcttcgaagtccgtggactccttgccaaagacttagctgttgttgcattgcgcgaaggtcttgattggcctccgactgatgatccaatgcttcttgcgtacctcttggacccgtcaaacacgacgcccgaaggcgtagcccgtcgttacggcggcgagtggaccgaagatgcagcgaaacgcgcgttattggccgaacgtttgcacgccaatttattaggacgtttgcaaggcgaggaacgtctcctctggctttacgaagaagtggagaaaccattgagtcgcgtgctcgcgcatatggaagctaccggtgtcaaattagacgtggcgtatttggagaatctcagccttgaagttgctgcccacatgcgccgcttggaggaagaagtattccgtttagcaggccgttcctttcgccttaactctcgcgatcagttagaacgtgtgttgttcgatgaacttggtctccctcctatcggcaagacagagaagaccggtaaacgtagcacttcagcggcggttttagaagctcttcgcgaagtccatcccattgtggacaagatcttgcagtaccgcgaactcgcgaaattgaaaggcacctatattgaccgtcttccggcattagtccacccgaaaacgggacgcctccatacccgcttcaaccaaacagccacggcgaccggtcgtttgtcctcctctgatccaaaccttcagaatattccagtacgtaccccattgggccagaagatccgccgtgcgtttgtagctgaggagggttggcgtttagtggccctcgattatcgtcaaattgaattacgtgtccttgcccatctttctggcgatgagaacctcatccgcgtgtttcaggaaggcaaagacattcacactcaaacggcaagctggatgtttggattatcagctgaagcgatcgatcctttgatgcgtcgtgcagcgaagaccatcaatttcggtgttctctacggtatgagtgcctttcgtttgtcgcaggaattaggcattccctatgaagaagctcaggcgttcattcagaaatactttcaaagctatcccaaagttaaagcatggatcgagaagactctccgtgaaggccgcacacgtggttacgtagagaccttatttggacgtcgccgctatgttcccgatttaaacgctcgcgtgaaaggcaagcgtgaagccgccgaacgcatggcgttcaacatgcctgtacagggcacggcagctgacctcatgaaacttgcaatggtgcgcctttttccacaattgcgtgaagttggtgcccgcatgctcttgcaggtccacgatgaactcttgttagaagcgccaaaagagcgtgcggaagaggtggcagccctcgcgaaagaagttatggaaggcgtgtggcccttagcggtgcctcttgaagtcgaagttggtattggcgaggattggctggctgccaaagga

SEQ ID NO: 4828 - protein, 841 aa, synthetic construct
  REGION 1..841: note = Variant of DNA polymerase I from Thermus sp. strain 2.9
MHHHHHHGGSGVLPVFEPKGRVLLVDGHHLAYRNFFALKGLTTSLGEPVQGVYGFAKSLLKALKEDGDVVIVVFDAKAPSFRHEAYEAYKAGRAPTPEDFPRQLALMKELVDLLGLERLEVPGFEADDVLATLAKKAEREGYEVQILTADRDLFQLLSPRISVLHPEGHRITPEWLWEKYGLRPEQWVDFRALAGDPSDNIPGVKGIGEKTALKLLKEWGSLENLLKNLDQVKPESVREKILAHLEDLKLSRELSRVRTDLPLEVDFGRRREPDWEGLKAFLERLEFGSLLHEFGLLESPLLAEEAPWPPPEGAFLGYRLSRPEPMWAELLALAASAQGRVYRAEDPHGALRGLFEVRGLLAKDLAVVALREGLDWPPTDDPMLLAYLLDPSNTTPEGVARRYGGEWTEDAAKRALLAERLHANLLGRLQGEERLLWLYEEVEKPLSRVLAHMEATGVKLDVAYLENLSLEVAAHMRRLEEEVFRLAGRSFRLNSRDQLERVLFDELGLPPIGKTEKTGKRSTSAAVLEALREVHPIVDKILQYRELAKLKGTYIDRLPALVHPKTGRLHTRFNQTATATGRLSSSDPNLQNIPVRTPLGQKIRRAFVAEEGWRLVALDYRQIELRVLAHLSGDENLIRVFQEGKDIHTQTASWMFGLSAEAIDPLMRRAAKTINFGVLYGMSAFRLSQELGIPYEEAQAFIQKYFQSYPKVKAWIEKTLREGRTRGYVETLFGRRRYVPDLNARVKGKREAAERMAFNMPVQGTAADLMKLAMVRLFPQLREVGARMLLQVHDELLLEAPKERAEEVAALAKEVMEGVWPLAVPLEVEVGIGEDWLAAKG

SEQ ID NO: 4829 - DNA, 2523 bp, synthetic construct
  misc_feature 1..2523: note = Variant of DNA polymerase I from Thermus sp. strain 2.9
  source 1..2523: mol_type = other DNA
atgcaccatcatcatcatcatggcggtagcggcgtgttaccggtgttcgagcataaaggtcgcgtgcttctggttgatggccatcatctcgcgtatcgtaacttctttgccctgaaaggattaaccaccagcctgggcgagccggtacagggtgtctacggctttgcaaagtcgctcctgaaagctctgaaagaagacggtgatgtggtgattgttgtctttgatgcgaaagcgccaagttttcgccacgaagcgtacgaagcttacaaagccgggcgtgctccaacgccggaagactttcctcgccaattggcgcttatgaaggaattagtggatttgcttggcctcgaacgcttggaagttcccggtttcgaggcagacgacgtattagcgactctcgcaaagaaagccgaacgtgagggctatgaagtccagatcttgacagcagatcgcgatcttttccagcttttatctccgcgcatctcggtgttacacccggaagggcatcgtatcaccccggaatggctctgggagaaatatggtttgcgtcccgaacaatgggtggattttcgcgccttagcaggcgatccgagcgacaatattccgggagttaaaggtatcggcgagaagacggcgctcaagctccttaaagaatgggggtcgttggagaacttgcttaagaatttagatcaggtcaaaccagagtcagtgcgtgagaagattcttgctcacctcgaagacctcaagttaagccgcgaattgtcccgtgtacgcaccgatttgccgctcgaagttgatttcggtcgccgccgcgaacctgactgggagggtcttaaagcgtttttagagcgtcttgaatttggttcgctcttgcatgaattcggccttttagaaagcccgttactggccgaagaagcaccttggccaccgcccgagggcgcgtttttaggttaccgtttgagtcgcccggaaccgatgtgggccgaattactggctcttgcagcgtctgcccagggacgtgtgtatcgcgcggaagaccctcatggtgcgctccgcggcctcttcgaagtccgtggactccttgccaaagacttagctgttgttgcattgcgcgaaggtcttgatttacctccgactgatgatccaatgcttcttgcgtacctcttggacccgtcaaacacgacgcccgaaggcgtagcccgtcgttacggcggcgagtggaccgaagatgcagcgaaacgcgcgttattggccgaacgtttgcacgccaatttattaggacgtttgcaaggcgagaagcgtctcctctggctttacgaagaagtggagaaaccattgagtcgcgtgctcgcgcatatggaagctaccggtgtcaaattagacgtggcgtatttggagaatctcagccttgaagttgctgcccacatgcgccgcttggaggaagaagtattccgtttagcaggccgttcctttcgccttaactctcgcgatcagttagaacgtgtgttgttcgatgaacttggtctccctcctatcggcaagacagagaagaccggtaaacgtagcacttcagcggcggttttagaagctcttcgcgaagtccatcccattgtggacaagatcttgcagtaccgcgaactcgcgaaattgaaaggcacctatattgaccgtcttccggcattagtccacccgaaaacgggacgcctccatacccgcttcaaccaaacagccacggcgaccggtcgtttgtcctcctctgatccaaaccttcagaatattccagtacgtaccccattgggccagaagatccgccgtgcgtttgtagctgaggagggttggcgtttagtggccctcgattatcgtcaaattgaattacgtgtccttgcccatctttctggcgatgagaacctcatccgcgtgtttcaggaaggcaaagacattcacactcaaacggcaagctggatgtttggattatcagctgaagcgatcgatcctttgatgcgtcgtgcagcgaagaccatcaatttcggtgttctctacggtatgagtgcctttcgtttgtcgcaggaattaggcattccctatgaagaagctcaggcgttcattcagaaatactttcaaagctatcccaaagttaaagcatggatcgagaagactctccgtgaaggccgcacacgtggttacgtagagaccttatttggacgtcgccgctatgttcccgatttaaacgctcgcgtgaaaggcaagcgtgaagccgccgaacgcatggcgttcaacatgcctgtacagggcacggcagctgacctcatgaaacttgcaatggtgcgcctttttccacaattgcgtgaagttggtgcccgcatgctcttgcaggtccacgatgaactcttgttagaagcgccaaaagagcgtgcggaagaggtggcagccctcgcgaaagaagttatggaaggcgtgtggcccttagcggtgcctcttgaagtcgaagttggtattggcgaggattggctggctgccaaagga

SEQ ID NO: 4830 - protein, 841 aa, synthetic construct
  REGION 1..841: note = Variant of DNA polymerase I from Thermus sp. strain 2.9
MHHHHHHGGSGVLPVFEHKGRVLLVDGHHLAYRNFFALKGLTTSLGEPVQGVYGFAKSLLKALKEDGDVVIVVFDAKAPSFRHEAYEAYKAGRAPTPEDFPRQLALMKELVDLLGLERLEVPGFEADDVLATLAKKAEREGYEVQILTADRDLFQLLSPRISVLHPEGHRITPEWLWEKYGLRPEQWVDFRALAGDPSDNIPGVKGIGEKTALKLLKEWGSLENLLKNLDQVKPESVREKILAHLEDLKLSRELSRVRTDLPLEVDFGRRREPDWEGLKAFLERLEFGSLLHEFGLLESPLLAEEAPWPPPEGAFLGYRLSRPEPMWAELLALAASAQGRVYRAEDPHGALRGLFEVRGLLAKDLAVVALREGLDLPPTDDPMLLAYLLDPSNTTPEGVARRYGGEWTEDAAKRALLAERLHANLLGRLQGEKRLLWLYEEVEKPLSRVLAHMEATGVKLDVAYLENLSLEVAAHMRRLEEEVFRLAGRSFRLNSRDQLERVLFDELGLPPIGKTEKTGKRSTSAAVLEALREVHPIVDKILQYRELAKLKGTYIDRLPALVHPKTGRLHTRFNQTATATGRLSSSDPNLQNIPVRTPLGQKIRRAFVAEEGWRLVALDYRQIELRVLAHLSGDENLIRVFQEGKDIHTQTASWMFGLSAEAIDPLMRRAAKTINFGVLYGMSAFRLSQELGIPYEEAQAFIQKYFQSYPKVKAWIEKTLREGRTRGYVETLFGRRRYVPDLNARVKGKREAAERMAFNMPVQGTAADLMKLAMVRLFPQLREVGARMLLQVHDELLLEAPKERAEEVAALAKEVMEGVWPLAVPLEVEVGIGEDWLAAKG

SEQ ID NO: 4831 - DNA, 2523 bp, synthetic construct
  misc_feature 1..2523: note = Variant of DNA polymerase I from Thermus sp. strain 2.9
  source 1..2523: mol_type = other DNA
atgcaccatcatcatcatcatggcggtagcggcgtgttaccggtgttcgagcataaaggtcgcgtgcttctggttgatggccatcatctcgcgtatcgtaacttctttgccctgaaaggattaaccaccagcctgggcgagccggtacagggtgtctacggctttgcaaagtcgctcctgaaagctctgaaagaagacggtgatgtggtgattgttgtctttgatgcgaaagcgccaagttttcgccacgaagcgtacgaagcttacaaagccgggcgtgctccaacgccggaagactttcctcgccaattggcgcttatgaaggaattagtggatttgcttggcctcgaacgcttggaagttcccggtttcgaggcagacgacgtattagcgactctcgcaaagaaagccgaacgtgagggctatgaagtccagatcttgacagcagatcgcgatcttttccagcttttatctccgcgcatctcggtgttacacccggaagggcatcgtatcaccccggaatggctctgggagaaatatggtttgcgtcccgaacaatgggtggattttcgcgccttagcaggcgatccgagcgacaatattccgggagttaaaggtatcggcgagaagacggcgctcaagctccttaaagaatgggggtcgttggagaacttgcttaagaatttagatcaggtcaaaccagagtcagtgcgtgagaagattcttgctcacctcgaagacctcaaattaagccgcgaattgtcccgtgtacgcaccgatttgccgctcgaagttgatttcggtcgccgccgcgaacctgactgggagggtcttaaagcgtttttagagcgtcttgaatttggttcgctcctgcatgaattcggccttttagaaagcccgttactggccgaagaagcaccttggccaccgcccgagggcgcgtttttaggttaccgtttgagtcgcccggaaccgatgtgggccgaattactggctcttgcagcgtctgcccagggacgtgtgtatcgcgcggaagaccctcatggtgcgctccgcggcctcttcgaagtccgtggactccttgccaaagacttagctgttgttgcattgcgcgaaggtcttgatttacctccgactgatgatccaatgcttcttgcgtacctcttggacccgtcaaacacgacgcccgaaggcgtagcccgtcgttacggcggcgagtggaccgaagatgcagcgaaacgcgcgttattggccgaacgtttgcacgccaatttattaggacgtttgcaaggcgagaagcgtctcctctggctttacgaagaagtggagaaaccattgagtcgcgtgctcgcgcatatggaagctaccggtgtcaaattagacgtggcgtatttggagaatctcagccttgaagttgctgcccacatgcgccgcttggaggaagaagtattccgtttagcaggccgttcctttcgccttaactctcgcgatcagttagaacgtgtgttgttcgatgaacttggtctccctcctatcggcaagacagagaagaccggtaaacgtagcacttcagcggcggttttagaagctcttcgcgaagtccatcccattgtggacaagatcttgcagtaccgcgaactcgcgaaattgaaaggcacctatattgaccgtcttccggcattagtccacccgaaaacgggacgcctccatacccgcttcaaccaaacagccacggcgaccggtcgtttgtcctcctctgatccaaaccttcagaatattccagtacgtaccccattgggccagaagatccgccgtgcgtttgtagctgaggagggttggcgtttagtggccctcgattatcgtcaaattgaattacgtgtccttgcccatctttctggcgatgagaacctcatccgcgtgtttcaggaaggcaaagacattcacactcaaacggcaagctggatgtttggattatcagctgaagcgatcgatcctttgatgcgtcgtgcagcgaagaagatcaatttcggtgttctctacggtatgagtgcctttcgtttgtcgcaggaattaggcattccctatgaagaagctcaggcgttcattcagaaatactttcaaagctatcccaaagttaaagcatggatcgagaagactctccgtgaaggccgccaccgtggttacgtagagaccttatttggacgtcgccgctatgttcccgatttaaacgctcgcgtgaaaggcaagcgtgaagccgccgaacgcatggcgttcaacatgcctgtacagggcacggcagctgacctcatgaaacttgcaatggtgcgcctttttccacaattgcgtgaagttggtgcccgcatgctcttgcaggtccacgatgaactcttgttagaagcgccaaaagagcgtgcggaagaggtggcagccctcgcgaaagaagttatggaaggcgtgtggcccttagcggtgcctcttgaagtcgaagttggtattggcgaggattggctggctgccaaagga

SEQ ID NO: 4832 - protein, 841 aa, synthetic construct
  REGION 1..841: note = Variant of DNA polymerase I from Thermus sp. strain 2.9
MHHHHHHGGSGVLPVFEHKGRVLLVDGHHLAYRNFFALKGLTTSLGEPVQGVYGFAKSLLKALKEDGDVVIVVFDAKAPSFRHEAYEAYKAGRAPTPEDFPRQLALMKELVDLLGLERLEVPGFEADDVLATLAKKAEREGYEVQILTADRDLFQLLSPRISVLHPEGHRITPEWLWEKYGLRPEQWVDFRALAGDPSDNIPGVKGIGEKTALKLLKEWGSLENLLKNLDQVKPESVREKILAHLEDLKLSRELSRVRTDLPLEVDFGRRREPDWEGLKAFLERLEFGSLLHEFGLLESPLLAEEAPWPPPEGAFLGYRLSRPEPMWAELLALAASAQGRVYRAEDPHGALRGLFEVRGLLAKDLAVVALREGLDLPPTDDPMLLAYLLDPSNTTPEGVARRYGGEWTEDAAKRALLAERLHANLLGRLQGEKRLLWLYEEVEKPLSRVLAHMEATGVKLDVAYLENLSLEVAAHMRRLEEEVFRLAGRSFRLNSRDQLERVLFDELGLPPIGKTEKTGKRSTSAAVLEALREVHPIVDKILQYRELAKLKGTYIDRLPALVHPKTGRLHTRFNQTATATGRLSSSDPNLQNIPVRTPLGQKIRRAFVAEEGWRLVALDYRQIELRVLAHLSGDENLIRVFQEGKDIHTQTASWMFGLSAEAIDPLMRRAAKKINFGVLYGMSAFRLSQELGIPYEEAQAFIQKYFQSYPKVKAWIEKTLREGRHRGYVETLFGRRRYVPDLNARVKGKREAAERMAFNMPVQGTAADLMKLAMVRLFPQLREVGARMLLQVHDELLLEAPKERAEEVAALAKEVMEGVWPLAVPLEVEVGIGEDWLAAKG

SEQ ID NO: 4833 - DNA, 2523 bp, synthetic construct
  misc_feature 1..2523: note = Variant of DNA polymerase I from Thermus sp. strain 2.9
  source 1..2523: mol_type = other DNA
atgcaccatcatcatcatcatggcggtagcggcgtgttaccggtgttcgagcctaaaggtcgcgtgcttctggttgatggccatcatctcgcgtatcgtaacttctttgccctgaaaggattaaccaccagcctgggcgagccggtacagggtgtctacggctttgcaaagtcgctcctgaaagctctgaaagaagacggtgatgtggtgattgttgtctttgatgcgaaagcgccaagttttcgccacgaagcgtacgaagcttacaaagccgggcgtgctccaacgccggaagactttcctcgccaattggcgcttatgaaggaattagtggatttgcttggcctcgaacgcttggaagttcccggtttcgaggcagacgacgtattagcgactctcgcaaagaaagccgaacgtgagggctatgaagtccagatcttgacagcagatcgcgatcttttccagcttttatctccgcgcatctcggtgttacacccggaagggcatcgtatcaccccggaatggctctgggagaaatatggtttgcgtcccgaacaatgggtggattttcgcgccttagcaggcgatccgagcgacaatattccgggagttaaaggtatcggcgagaagacggcgctcaagctccttaaagaatgggggtcgttggagaacttgcttaagaatttagatcaggtcaaaccagagtcagtgcgtgagaagattcttgctcacctcgaagacctcaaattaagccgcgaattgtcccgtgtacgcaccgatttgccgctcgaagttgatttcggtcgccgccgcgaacctgactgggagggtcttaaagcgtttttagagcgtcttgaatttggttcgctcttgcatgaattcggccttttagaaagcccgttactggccgaagaagcaccttggccaccgcccgagggcgcgtttttaggttaccgtttgagtcgcccggaaccgatgtgggccgaattactggctcttgcagcgtctgcccagggacgtgtgtatcgcgcggaagaccctcatggtgcgctccgcggcctcttcgaagtccgtggactccttgccaaagacttagctgttgttgcattgcgcgaaggtcttgatttacctccgactgatgatccaatgcttcttgcgtacctcttggacccgtcaaacacgacgcccgaaggcgtagcccgtcgttacggcggcgagtggaccgaagatgcagcgaaacgcgcgttattggccgaacgtttgcacgccaatttattaggacgtttgcaaggcgaggaacgtctcctctggctttacgaagaagtggagaaaccattgagtcgcgtgctcgcgcatatggaagctaccggtgtcaaattagacgtggcgtatttggagaatctcagccttgaagttgctgcccacatgcgccgcttggaggaagaagtattccgtttagcaggccgttcctttcgccttaactctcgcgatcagttagaacgtgtgttgttcgatgaacttggtctccctcctatcggcaagacagagaagaccggtaaacgtagcacttcagcggcggttttagaagctcttcgcgaagtccatcccattgtggacaagatcttgcagtaccgcgaactcgcgaaattgaaaggcacctatattgaccgtcttccggcattagtccacccgaaaggtggacgcctccatacccgcttcaaccaaacagccacggcgaccggtcgtttgtcctcctctgatccaaaccttcagaatattccagtacgtaccccattgggccagaagatccgccgtgcgtttgtagctgaggagggttggcgtttagtggccctcgattatcgtcaaattgaattacgtgtccttgcccatctttctggcgatgagaacctcatccgcgtgtttcaggaaggcaaagacattcacactcaaacggcaagctggatgtttggattatcagctgaagcgatcgatcctttgatgcgtcgtgcagcgaagaccatcaatttcggtgttctctacggtatgagtgcctttcgtttgtcgcaggaattaggcattccctatgaagaagctcaggcgttcattcagaaatactttcaaagctatcccaaagttaaagcatggatcgagaagactctccgtgaaggccgcacacgtggttacgtagagaccttatttggacgtcgccgctatgttcccgatttaaacgctcgcgtgaaaggcaagcgtgaagccgccgaacgcatggcgttcaacatgcctgtacagggcacggcagctgacctcatgaaacttgcaatggtgcgcctttttccacaattgcgtgaagttggtgcccgcatgctcttgcaggtccacgatgaactcttgttagaagcgccaaaagagcgtgcggaagaggtggcagccctcgcgaaagaagttatggaaggcgtgtggcccttagcggtgcctcttgaagtcgaagttggtattggcgaggattggctggctgccaaagga

SEQ ID NO: 4834 - protein, 841 aa, synthetic construct
  REGION 1..841: note = Variant of DNA polymerase I from Thermus sp. strain 2.9
MHHHHHHGGSGVLPVFEPKGRVLLVDGHHLAYRNFFALKGLTTSLGEPVQGVYGFAKSLLKALKEDGDVVIVVFDAKAPSFRHEAYEAYKAGRAPTPEDFPRQLALMKELVDLLGLERLEVPGFEADDVLATLAKKAEREGYEVQILTADRDLFQLLSPRISVLHPEGHRITPEWLWEKYGLRPEQWVDFRALAGDPSDNIPGVKGIGEKTALKLLKEWGSLENLLKNLDQVKPESVREKILAHLEDLKLSRELSRVRTDLPLEVDFGRRREPDWEGLKAFLERLEFGSLLHEFGLLESPLLAEEAPWPPPEGAFLGYRLSRPEPMWAELLALAASAQGRVYRAEDPHGALRGLFEVRGLLAKDLAVVALREGLDLPPTDDPMLLAYLLDPSNTTPEGVARRYGGEWTEDAAKRALLAERLHANLLGRLQGEERLLWLYEEVEKPLSRVLAHMEATGVKLDVAYLENLSLEVAAHMRRLEEEVFRLAGRSFRLNSRDQLERVLFDELGLPPIGKTEKTGKRSTSAAVLEALREVHPIVDKILQYRELAKLKGTYIDRLPALVHPKGGRLHTRFNQTATATGRLSSSDPNLQNIPVRTPLGQKIRRAFVAEEGWRLVALDYRQIELRVLAHLSGDENLIRVFQEGKDIHTQTASWMFGLSAEAIDPLMRRAAKTINFGVLYGMSAFRLSQELGIPYEEAQAFIQKYFQSYPKVKAWIEKTLREGRTRGYVETLFGRRRYVPDLNARVKGKREAAERMAFNMPVQGTAADLMKLAMVRLFPQLREVGARMLLQVHDELLLEAPKERAEEVAALAKEVMEGVWPLAVPLEVEVGIGEDWLAAKG

SEQ ID NO: 4835 - DNA, 2523 bp, synthetic construct
  misc_feature 1..2523: note = Variant of DNA polymerase I from Thermus sp. strain 2.9
  source 1..2523: mol_type = other DNA
atgcaccatcatcatcatcatggcggtagcggcgtgttaccggtgttcgagcctaaaggtcgcgtgcttctggttgatggccatcatctcgcgtatcgtaacttctttgccctgaaaggattaaccaccagcctgggcgagccggtacagggtgtctacggctttgcaaagtcgctcctgaaagctctgaaagaagacggtgatgtggtgattgttgtctttgatgcgaaagcgccaagttttcgccacgaagcgtacgaagcttacaaagccgggcgtgctccaacgccggaagactttcctcgccaattggcgcttatgaaggaattagtggatttgcttggcctcgaacgcttggaagttcccggtttcgaggcagacgacgtattagcgactctcgcaaagaaagccgaacgtgagggctatgaagtccagatcttgacagcagatcgcgatcttttccagcttttatctccgcgcatctcggtgttacacccggaagggcatcgtatcaccccggaatggctctgggagaaatatggtttgcgtcccgaacaatgggtggattttcgcgccttagcaggcgatccgagcgacaatattccgggagttaaaggtatcggcgagaagacggcgctcaagctccttaaagaatgggggtcgttggagaacttgcttaagaatttagatcaggtcaaaccagagtcagtgcgtgagaagattcttgctcacctcgaagacctcaaattaagccgcgaattgtcccgtgtacgcaccgatttgccgctcgaagttgatttcggtcgccgccgcgaacctgactgggagggtcttaaagcgtttttagagcgtcttgaatttggttcgctcttgcatgaattcggccttttagaaagcccgttactggccgaagaagcaccttggccaccgcccgagggcgcgtttttaggttaccgtttgagtcgcccggaaccgatgtgggccgaattactggctcttgcagcgtctgcccagggacgtgtgtatcgcgcggaagaccctcatggtgcgctccgcggcctcttcgaagtccgtggactccttgccaaagacttagctgttgttgcattgcgcgaaggtcttgatttacctccgactgatgatccaatgcttcttgcgtacctcttggacccgtcaaacacgacgcccgaaggcgtagcccgtcgttacggcggcgagtggaccgaagatgcagcgaaacgcgcgttattggccgaacgtttgcacgccaatttattaggacgtttgcaaggcgaggaacgtctcctctggctttacgaagaagtggagaaaccattgagtcgcgtgctcgcgcatatggaagctaccggtgtcaaattagacgtggcgtatttggagaatctcagccttgaagttgctgcccacatgcgccgcttggaggaagaagtattccgtttagcaggccgttcctttcgccttaactctcgcgatcagttagaacgtgtgttgttcgatgaacttggtctccctcctatcggcaagacagagaagaccggtaaacgtagcacttcagcggcggttttagaagctcttcgcgaagtccatcccattgtggacaagatcttgcagtaccgcgaactcgcgaaattgaaaggcacctatattgaccgtcttccggcattagtccacccgaaaacgggacgcctccatacccgcttcaaccaaacagccacggcgaccggtcgtttgtcctcctctgatccaaaccttcagaatattccagtacgtaccccattgggccagaagatccgccgtgcgtttgtagctgaggagggttggcgtttagtggccctcgattatcgtcaaattgaattacgtgtccttgcccatctttctggcgatgagaacctcatccgcgtgtttcaggaaggcaaagacattcacactcaaacggcaagctggatgtttggattatcagctgaagcgatcgatcctttgatgcgtcgtgcagcgaagaccatcaatttcggtgttctctacggtatgagtgcctttcgtttgtcgcaggaattaggcattccctatgaagaagctcaggcgttcattcagaaatactttcaaagctatcccaaagttaaagcatggatcgagaagactctccgtgaaggccgcacacgtggttacgtagtgaccttatttggacgtcgccgctatgttcccgatttaaacgctcgcgtgaaaggcaagcgtgaagccgccgaacgcatggcgttcaacatgcctgtacagggcacggcagctgacctcatgaaacttgcaatggtgcgcctttttccacaattgcgtgaagttggtgcccgcatgctcttgcaggtccacgatgaactcttgttagaagcgccaaaagagcgtgcggaagaggtggcagccctcgcgaaagaagttatggaaggcgtgtggcccttagcggtgcctcttgaagtcgaagttggtattggcgaggattggctggctgccaaagga

SEQ ID NO: 4836 - protein, 841 aa, synthetic construct
  REGION 1..841: note = Variant of DNA polymerase I from Thermus sp. strain 2.9
MHHHHHHGGSGVLPVFEPKGRVLLVDGHHLAYRNFFALKGLTTSLGEPVQGVYGFAKSLLKALKEDGDVVIVVFDAKAPSFRHEAYEAYKAGRAPTPEDFPRQLALMKELVDLLGLERLEVPGFEADDVLATLAKKAEREGYEVQILTADRDLFQLLSPRISVLHPEGHRITPEWLWEKYGLRPEQWVDFRALAGDPSDNIPGVKGIGEKTALKLLKEWGSLENLLKNLDQVKPESVREKILAHLEDLKLSRELSRVRTDLPLEVDFGRRREPDWEGLKAFLERLEFGSLLHEFGLLESPLLAEEAPWPPPEGAFLGYRLSRPEPMWAELLALAASAQGRVYRAEDPHGALRGLFEVRGLLAKDLAVVALREGLDLPPTDDPMLLAYLLDPSNTTPEGVARRYGGEWTEDAAKRALLAERLHANLLGRLQGEERLLWLYEEVEKPLSRVLAHMEATGVKLDVAYLENLSLEVAAHMRRLEEEVFRLAGRSFRLNSRDQLERVLFDELGLPPIGKTEKTGKRSTSAAVLEALREVHPIVDKILQYRELAKLKGTYIDRLPALVHPKTGRLHTRFNQTATATGRLSSSDPNLQNIPVRTPLGQKIRRAFVAEEGWRLVALDYRQIELRVLAHLSGDENLIRVFQEGKDIHTQTASWMFGLSAEAIDPLMRRAAKTINFGVLYGMSAFRLSQELGIPYEEAQAFIQKYFQSYPKVKAWIEKTLREGRTRGYVVTLFGRRRYVPDLNARVKGKREAAERMAFNMPVQGTAADLMKLAMVRLFPQLREVGARMLLQVHDELLLEAPKERAEEVAALAKEVMEGVWPLAVPLEVEVGIGEDWLAAKG

SEQ ID NO: 4837 - DNA, 2523 bp, synthetic construct
  misc_feature 1..2523: note = Variant of DNA polymerase I from Thermus sp. strain 2.9
  source 1..2523: mol_type = other DNA
atgcaccatcatcatcatcatggcggtagcggcgtgttaccggtgttcgagcctaaaggtcgcgtgcttctggttgatggccatcatctcgcgtatcgtaacttctttgccctgaaaggattaaccaccagcctgggcgagccggtacagggtgtctacggctttgcaaagtcgctcctgaaagctctgaaagaagacggtgatgtggtgattgttgtctttgatgcgaaagcgccaagttttcgccacgaagcgtacgaagcttacaaagccgggcgtgctccaacgccggaagactttcctcgccaattggcgcttatgaaggaattagtggatttgcttggcctcgaacgcttggaagttcccggtttcgaggcagacgacgtattagcgactctcgcaaagaaagccgaacgtgagggctatgaagtccagatcttgacagcagatcgcgatcttttccagcttttatctccgcgcatctcggtgttacacccggaagggcatcgtatcaccccggaatggctctgggagaaatatggtttgcgtcccgaacaatgggtggattttcgcgccttagcaggcgatccgagcgacaatattccgggagttaaaggtatcggcgagaagacggcgctcaagctccttaaagaatgggggtcgttggagaacttgcttaagaatttagatcaggtcaaaccagagtcagtgcgtgagaagattcttgctcacctcgaagacctcaaattaagccgcgaattgtcccgtgtacgcaccgatttgccgctcgaagttgatttcggtcgccgccgcgaacctgactgggagggtcttaaagcgtttttagagcgtcttgaatttggttcgctcttgcatgaattcggccttttagaaagcccgttactggccgaagaagcaccttggccaccgcccgagggcgcgtttttaggttaccgtttgagtcgcccggaaccgatgtgggccgaattactggctcttgcagcgtctgcccagggacgtgtgtatcgcgcggaagaccctcatggtgcgctccgcggcctcttcgaagtccgtggactccttgccaaagacttagctgttgttgcattgcgcgaaggtcttgatttacctccgactgatgatccaatgcttcttgcgtacctcttggacccgtcaaacacgacgcccgaaggcgtagcccgtcgttacggcggcgagtggaccgaagatgcagcgaaacgcgcgttattggccgaacgtttgcacgccaatttattaggacgtttgcaaggcgaggaacgtctcctctggctttacgaagaagtggagaaaccattgagtcgcgtgctcgcgcatatggaagctaccggtgtcaaattagacgtggcgtatttggagaatctcagccttgaagttgctgcccacatgcgccgcttggaggaagaagtattccgtttagcaggccgttcctttcgccttaactctcgcgatcagttagaacgtgtgttgttcgatgaacttggtctccctcctatcggcaagacagagaagaccggtaaacgtagcacttcagcggcggttttagaagctcttcgcgaagtccatcccattgtggacaagatcttgcagtaccgcgaactcgcgaaattgaaaggcacctatattgaccgtcttccggcattagtccacccgaaaacgggacgcctccatacccgcttcaaccaaacagccacggcgaccggtcgtttgtcctcctctgatccaaaccttcagaatattccagtacgtaccccattgggccagaagatccgccgtgcgtttgtagctgaggagggttggcgtttagtggccctcgatacgcgtcaaattgaattacgtgtccttgcccatctttctggcgatgagaacctcatccgcgtgtttcaggaaggcaaagacattcacactcaaacggcaagctggatgtttggattatcagctgaagcgatcgatcctttgatgcgtcgtgcagcgaagaccatcaatttcggtgttctctacggtatgagtgcctttcgtttgtcgcaggaattaggcattccctatgaagaagctcaggcgttcattcagaaatactttcaaagctatcccaaagttaaagcatggatcgagaagactctccgtgaaggccgcacacgtggttacgtagagaccttatttggacgtcgccgctatgttcccgatttaaacgctcgcgtgaaaggcaagcgtgaagccgccgaacgcatggcgttcaacatgcctgtacagggcacggcagctgacctcatgaaacttgcaatggtgcgcctttttccacaattgcgtgaagttggtgcccgcatgctcttgcaggtccacgatgaactcttgttagaagcgccaaaagagcgtgcggaagaggtggcagccctcgcgaaagaagttatggaaggcgtgtggcccttagcggtgcctcttgaagtcgaagttggtattggcgaggattggctggctgccaaagga

SEQ ID NO: 4838 - protein, 841 aa, synthetic construct
  REGION 1..841: note = Variant of DNA polymerase I from Thermus sp. strain 2.9
MHHHHHHGGSGVLPVFEPKGRVLLVDGHHLAYRNFFALKGLTTSLGEPVQGVYGFAKSLLKALKEDGDVVIVVFDAKAPSFRHEAYEAYKAGRAPTPEDFPRQLALMKELVDLLGLERLEVPGFEADDVLATLAKKAEREGYEVQILTADRDLFQLLSPRISVLHPEGHRITPEWLWEKYGLRPEQWVDFRALAGDPSDNIPGVKGIGEKTALKLLKEWGSLENLLKNLDQVKPESVREKILAHLEDLKLSRELSRVRTDLPLEVDFGRRREPDWEGLKAFLERLEFGSLLHEFGLLESPLLAEEAPWPPPEGAFLGYRLSRPEPMWAELLALAASAQGRVYRAEDPHGALRGLFEVRGLLAKDLAVVALREGLDLPPTDDPMLLAYLLDPSNTTPEGVARRYGGEWTEDAAKRALLAERLHANLLGRLQGEERLLWLYEEVEKPLSRVLAHMEATGVKLDVAYLENLSLEVAAHMRRLEEEVFRLAGRSFRLNSRDQLERVLFDELGLPPIGKTEKTGKRSTSAAVLEALREVHPIVDKILQYRELAKLKGTYIDRLPALVHPKTGRLHTRFNQTATATGRLSSSDPNLQNIPVRTPLGQKIRRAFVAEEGWRLVALDTRQIELRVLAHLSGDENLIRVFQEGKDIHTQTASWMFGLSAEAIDPLMRRAAKTINFGVLYGMSAFRLSQELGIPYEEAQAFIQKYFQSYPKVKAWIEKTLREGRTRGYVETLFGRRRYVPDLNARVKGKREAAERMAFNMPVQGTAADLMKLAMVRLFPQLREVGARMLLQVHDELLLEAPKERAEEVAALAKEVMEGVWPLAVPLEVEVGIGEDWLAAKG

SEQ ID NO: 4839 - DNA, 2523 bp, synthetic construct
  misc_feature 1..2523: note = Variant of DNA polymerase I from Thermus sp. strain 2.9
  source 1..2523: mol_type = other DNA
atgcaccatcatcatcatcatggcggtagcggcgtgttaccggtgttcgagcctaaaggtcgcgtgcttctggttgatggccatcatctcgcgtatcgtaacttctttgccctgaaaggattaaccaccagcctgggcgagccggtacagggtgtctacggctttgcaaagtcgctcctgaaagctctgaaagaagacggtgatgtggtgattgttgtctttgatgcgaaagcgccaagttttcgccacgaagcgtacgaagcttacaaagccgggcgtgctccaacgccggaagactttcctcgccaattggcgcttatgaaggaattagtggatttgcttggcctcgaacgcttggaagttcccggtttcgaggcagacgacgtattagcgactctcgcaaagaaagccgaacgtgagggctatgaagtccagatcttgacagcagatcgcgatcttttccagcttttatctccgcgcatctcggtgttacacccggaagggcatcgtatcaccccggaatggctctgggagaaatatggtttgcgtcccgaacaatgggtggattttcgcgccttagcaggcgatccgagcgacaatattccgggagttaaaggtatcggcgagaagacggcgctcaagctccttaaagaatgggggtcgttggagaacttgcttaagaatttagatcaggtcaaaccagagtcagtgcgtgagaagattcttgctcacctcgaagacctcaaattaagccgcgaattgtcccgtgtacgcaccgatttgccgctcgaagttgatttcggtcgccgccgcgaacctgactgggagggtcttaaagcgtttttagagcgtcttgaatttggttcgctcttgcatgaattcggccttttagaaagcccgttactggccgaagaagcaccttggccaccgcccgagggcgcgtttttaggttaccgtttgagtcgcccggaaccgatgtgggccgaattactggctcttgcagcgtctgcccagggacgtgtgtatcgcgcggaagaccctcatggtgcgctccgcggcctcttcgaagtccgtggactccttgccaaagacttagctgttgttgcattgcgcgaaggtcttgatttacctccgactgatgatccaatgcttcttgcgtacctcttggacccgtcaaacacgacgcccgaaggcgtagcccgtcgttacggcggcgagtggaccgaagatgcagcgaaacgcgcgttattggccgaacgtttgcacgccaatttattaggacgtttgcaaggcgaggaacgtctcctctggctttacgaagaagtggagaaaccattgagtcgcgtgctcgcgcatatggaagctaccggtgtcaaattagacgtggcgtatttggagaatctcagccttgaagttgctgcccacatgcgccgcttggaggaagaagtattccgtttagcaggccgttcctttcgccttaactctcgcgatcagttagaacgtgtgttgttcgatgaacttggtctccctcctatcggcaagacagagaagaccggtaaacgtagcacttcagcggcggttttagaagctcttcgcgaagtccatcccattgtggacaagatcttgcagtaccgcgaactcgcgaaattgaaaggcacctatattgaccgtcttccggcattagtccacccgaaaacgggacgcctccatacccgcttcaaccaaacagccacggcgaccggtcgtttgtcctcctctgatccaaaccttcagaatattccagtacgtaccccattgggccagaagatccgccgtgcgtttgtagctgaggagggttggcgtttagtggccctcgattatcgtcaaattgaattacgtgtccttgcccatctttctggcgatgagaacctcatccgcgtgtttcaggaaggcaaagacattcacactcaaacggcaagcgggatgtttggattatcagctgaagcgatcgatcctttgatgcgtcgtgcagcgaagaccatcaatttcggtgttctctacggtatgagtgcctttcgtttgtcgcaggaattaggcattccctatgaagaagctcaggcgttcattcagaaatactttcaaagctatcccaaagttaaagcatggatcgagaagactctccgtgaaggccgcacacgtggttacgtagagaccttatttggacgtcgccgctatgttcccgatttaaacgctcgcgtgaaaggcaagcgtgaagccgccgaacgcatggcgttcaacatgcctgtacagggcacggcagctgacctcatgaaacttgcaatggtgcgcctttttccacaattgcgtgaagttggtgcccgcatgctcttgcaggtccacgatgaactcttgttagaagcgccaaaagagcgtgcggaagaggtggcagccctcgcgaaagaagttatggaaggcgtgtggcccttagcggtgcctcttgaagtcgaagttggtattggcgaggattggctggctgccaaagga

SEQ ID NO: 4840 - protein, 841 aa, synthetic construct
  REGION 1..841: note = Variant of DNA polymerase I from Thermus sp. strain 2.9
MHHHHHHGGSGVLPVFEPKGRVLLVDGHHLAYRNFFALKGLTTSLGEPVQGVYGFAKSLLKALKEDGDVVIVVFDAKAPSFRHEAYEAYKAGRAPTPEDFPRQLALMKELVDLLGLERLEVPGFEADDVLATLAKKAEREGYEVQILTADRDLFQLLSPRISVLHPEGHRITPEWLWEKYGLRPEQWVDFRALAGDPSDNIPGVKGIGEKTALKLLKEWGSLENLLKNLDQVKPESVREKILAHLEDLKLSRELSRVRTDLPLEVDFGRRREPDWEGLKAFLERLEFGSLLHEFGLLESPLLAEEAPWPPPEGAFLGYRLSRPEPMWAELLALAASAQGRVYRAEDPHGALRGLFEVRGLLAKDLAVVALREGLDLPPTDDPMLLAYLLDPSNTTPEGVARRYGGEWTEDAAKRALLAERLHANLLGRLQGEERLLWLYEEVEKPLSRVLAHMEATGVKLDVAYLENLSLEVAAHMRRLEEEVFRLAGRSFRLNSRDQLERVLFDELGLPPIGKTEKTGKRSTSAAVLEALREVHPIVDKILQYRELAKLKGTYIDRLPALVHPKTGRLHTRFNQTATATGRLSSSDPNLQNIPVRTPLGQKIRRAFVAEEGWRLVALDYRQIELRVLAHLSGDENLIRVFQEGKDIHTQTASGMFGLSAEAIDPLMRRAAKTINFGVLYGMSAFRLSQELGIPYEEAQAFIQKYFQSYPKVKAWIEKTLREGRTRGYVETLFGRRRYVPDLNARVKGKREAAERMAFNMPVQGTAADLMKLAMVRLFPQLREVGARMLLQVHDELLLEAPKERAEEVAALAKEVMEGVWPLAVPLEVEVGIGEDWLAAKG

SEQ ID NO: 4841 - DNA, 2523 bp, synthetic construct
  misc_feature 1..2523: note = Variant of DNA polymerase I from Thermus sp. strain 2.9
  source 1..2523: mol_type = other DNA
atgcaccatcatcatcatcatggcggtagcggcgtgttaccggtgttcgagcctaaaggtcgcgtgcttctggttgatggccatcatctcgcgtatcgtaacttctttgccctgaaaggattaaccaccagcctgggcgagccggtacagggtgtctacggctttgcaaagtcgctcctgaaagctctgaaagaagacggtgatgtggtgattgttgtctttgatgcgaaagcgccaagttttcgccacgaagcgtacgaagcttacaaagccgggcgtgctccaacgccggaagactttcctcgccaattggcgcttatgaaggaattagtggatttgcttggcctcgaacgcttggaagttcccggtttcgaggcagacgacgtattagcgactctcgcaaagaaagccgaacgtgagggctatgaagtccagatcttgacagcagatcgcgatcttttccagcttttatctccgcgcatctcggtgttacacccggaagggcatcgtatcaccccggaatggctctgggagaaatatggtttgcgtcccgaacaatgggtggattttcgcgccttagcaggcgatccgagcgacaatattccgggagttaaaggtatcggcgagaagacggcgctcaagctccttaaagaatgggggtcgttggagaacttgcttaagaatttagatcaggtcaaaccagagtcagtgcgtgagaagattcttgctcacctcgaagacctcaaattaagccgcgaattgtcccgtgtacgcaccgatttgccgctcgaagttgatttcggtcgccgccgcgaacctgactgggagggtcttaaagcgtttttagagcgtcttgaatttggttcgctcttgcatgaattcggccttttagaaagcccgttactggccgaagaagcaccttggccaccgcccgagggcgcgtttttaggttaccgtttgagtcgcccggaaccgatgtgggccgaattactggctcttgcagcgtctgcccagggacgtgtgtatcgcgcggaagaccctcatggtgcgctccgcggcctcttcgaagtccgtggactccttgccaaagacttagctgttgttgcattgcgcgaaggtcttgatttacctccgactgatgatccaatgcttcttgcgtacctcttggacccgtcaaacacgacgcccgaaggcgtagcccgtcgttacggcggcgagtggaccgaagatgcagcgaaacgcgcgttattggccgaacgtttgcacgccaatttattaggacgtttgcaaggcgaggaacgtctcctctggctttacgaagaagtggagaaaccattgagtcgcgtgctcgcgcatatggaagctaccggtgtcaaattagacgtggcgtatttggagaatctcagccttgaagttgctgcccacatgcgccgcttggaggaagaagtattccgtttagcaggccgttcctttcgccttaactctcgcgatcagttagaacgtgtgttgttcgatgaacttggtctccctcctatcggcaagacagagaagaccggtaaacgtagcacttcagcggcggttttagaagctcttcgcgaagtccatcccattgtggacaagatcttgcagtaccgcgaactcgcgaaattgaaaggcacctatattgaccgtcttccggcattagtccacccgaaaacgggacgcctccatacccgcttcaaccaaacagccacggcgaccggtcgtttgtcctcctctgatccaaaccttcagaatattccagtacgtaccccattgggccagaagatccgccgtgcgtttgtagctgaggagggttggcgtttagtggccctcgattatcgtcaaattgaattacgtgtccttgcccatctttctggcgatgagaacctcatccgcgtgtttcaggaaggcaaagacattcacactcaaacggcaagctggatgtttggattatcagctgaagcgatcgatcctttgatgcgtcgtgcagcgaagaccatcaatttcggtgttctctacggtatgagtgcctttcgtttgtcgcaggaattaggcattccctatgaagaagctcaggcgttcattcagaaatactttcaaagctatcccaaagttaaagcatggatcgagaagactctccgtgaaggccgcacacgtggttacgtagagaccttatttggacgtcgccgctatgttcccgatttacgggctcgcgtgaaaggcaagcgtgaagccgccgaacgcatggcgttcaacatgcctgtacagggcacggcagctgacctcatgaaacttgcaatggtgcgcctttttccacaattgcgtgaagttggtgcccgcatgctcttgcaggtccacgatgaactcttgttagaagcgccaaaagagcgtgcggaagaggtggcagccctcgcgaaagaagttatggaaggcgtgtggcccttagcggtgcctcttgaagtcgaagttggtattggcgaggattggctggctgccaaagga

SEQ ID NO: 4842 - protein, 841 aa, synthetic construct
  REGION 1..841: note = Variant of DNA polymerase I from Thermus sp. strain 2.9
MHHHHHHGGSGVLPVFEPKGRVLLVDGHHLAYRNFFALKGLTTSLGEPVQGVYGFAKSLLKALKEDGDVVIVVFDAKAPSFRHEAYEAYKAGRAPTPEDFPRQLALMKELVDLLGLERLEVPGFEADDVLATLAKKAEREGYEVQILTADRDLFQLLSPRISVLHPEGHRITPEWLWEKYGLRPEQWVDFRALAGDPSDNIPGVKGIGEKTALKLLKEWGSLENLLKNLDQVKPESVREKILAHLEDLKLSRELSRVRTDLPLEVDFGRRREPDWEGLKAFLERLEFGSLLHEFGLLESPLLAEEAPWPPPEGAFLGYRLSRPEPMWAELLALAASAQGRVYRAEDPHGALRGLFEVRGLLAKDLAVVALREGLDLPPTDDPMLLAYLLDPSNTTPEGVARRYGGEWTEDAAKRALLAERLHANLLGRLQGEERLLWLYEEVEKPLSRVLAHMEATGVKLDVAYLENLSLEVAAHMRRLEEEVFRLAGRSFRLNSRDQLERVLFDELGLPPIGKTEKTGKRSTSAAVLEALREVHPIVDKILQYRELAKLKGTYIDRLPALVHPKTGRLHTRFNQTATATGRLSSSDPNLQNIPVRTPLGQKIRRAFVAEEGWRLVALDYRQIELRVLAHLSGDENLIRVFQEGKDIHTQTASWMFGLSAEAIDPLMRRAAKTINFGVLYGMSAFRLSQELGIPYEEAQAFIQKYFQSYPKVKAWIEKTLREGRTRGYVETLFGRRRYVPDLRARVKGKREAAERMAFNMPVQGTAADLMKLAMVRLFPQLREVGARMLLQVHDELLLEAPKERAEEVAALAKEVMEGVWPLAVPLEVEVGIGEDWLAAKG

SEQ ID NO: 4843 - DNA, 2523 bp, synthetic construct
  misc_feature 1..2523: note = Variant of DNA polymerase I from Thermus sp. strain 2.9
  source 1..2523: mol_type = other DNA
atgcaccatcatcatcatcatggcggtagcggcgtgttaccggtgttcgagcctaaaggtcgcgtgcttctggttgatggccatcatctcgcgtatcgtaacttctttgccctgaaaggattaaccaccagcctgggcgagccggtacagggtgtctacggctttgcaaagtcgctcctgaaagctctgaaagaagacggtgatgtggtgattgttgtctttgatgcgaaagcgccaagttttcgccacgaagcgtacgaagcttacaaagccgggcgtgctccaacgccggaagactttcctcgccaattggcgcttatgaaggaattagtggatttgcttggcctcgaacgcttggaagttcccggtttcgaggcagacgacgtattagcgactctcgcaaagaaagccgaacgtgagggctatgaagtccagatcttgacagcagatcgcgatcttttccagcttttatctccgcgcatctcggtgttacacccggaagggcatcgtatcaccccggaatggctctgggagaaatatggtttgcgtcccgaacaatgggtggattttcgcgccttagcaggcgatccgagcgacaatattccgggagttaaaggtatcggcgagaagacggcgctcaagctccttaaagaatgggggtcgttggagaacttgcttaagaatttagatcaggtcaaaccagagtcagtgcgtgagaagattcttgctcacctcgaagacctcaagttaagccgcgaattgtcccgtgtacgcaccgatttgccgctcgaagttgatttcggtcgccgccgcgaacctgactgggagggtcttaaagcgtttttagagcgtcttgaatttggttcgctccagcatgaattcggccttttagaaagcccgttactggccgaagaagcaccttggccaccgcccgagggcgcgtttttaggttaccgtttgagtcgcccggaaccgatgtgggccgaattactggctcttgcagcgtctgcccagggacgtgtgtatcgcgcggaagaccctcatggtgcgctccgcggcctcttcgaagtccgtggactccttgccaaagacttagctgttgttgcattgcgcgaaggtcttgatttacctccgactgatgatccaatgcttcttgcgtacctcttggacccgtcaaacacgacgcccgaaggcgtagcccgtcgttacggcggcgagtggaccgaagatgcagcgaaacgcgcgttattggccgaacgtttgcacgagaatttactgggacgtttgcaaggcgaggagcgtctcctctggctttacgaagaagtggagaaaccattgagtcgcgtgctcgcgcatatggaagctaccggtgtcaaattagacgtggcgtatttggagaatctcagccttgaagttgctgcccacatgcgccgcttggaggaagaagtattccgtttagcaggccgttcctttcgccttaactctcgcgatcagttagaacgtgtgttgttcgatgaacttggtctccctcctatcggcaagacagagaagaccggtaaacgtagcacttcagcggcggttttagatgctcttcgctgtgtccatcccattgtggacaagatcttgcagtaccgcgaactggcgaaattgaaaggcacctatattgaccgtcttccggcattagtccacccgaaaacgggacgcctccatacccgcttcaaccaaacagccacggcgaccggtcgtttgtcctcctctgatccaaaccttcagaatattccagtacgtaccaaattgggccagaagatccgccgtgcgtttgtagctgaggagggttggcgtttagtggccctcgattatcgtcaaattgaattacgtgtccttgcccatctttctggcgatgagaacctcatccgcgtgtttgaagaaggcaaagacattcacactcaaacggcaagctggatgtttggattatcagctgaagcgatcgatcctttgatgcgtcgtgcagcgaagacgatcaatttcggtgttctctacggtatgagtgcctttcgtttgtcgcaggaattaggcattccctatgaagaagctcaggcgttcattcagaaatactttcaaagctatcccaaagttaaagcatggatcgagaagactctccgtgaaggccgccaccgtggttacgtagagaccttatttggacgtcgccgctatgttcccgatttaaacgcccgcgtgaaaggcaagcgtgaagccgccgaacgcatggcgttcaacatgcctgtacagggcacggcagctgacctcatgaaacttgcaatggtgcgcctttttccacaattgcgtgaagttggtgcccgcatgctcttgcaggtccatgatgaactcttgttcgaagcgccaaaagagcgtgcggaagaggtggcagccctcgcgaaagaagttatggaaggcgtgtggcccttagcggtgcctcttgaagtcgaagttggtattggcgaggattggctggctgccaaagga

SEQ ID NO: 4844 - protein, 841 aa, synthetic construct
  REGION 1..841: note = Variant of DNA polymerase I from Thermus sp. strain 2.9
MHHHHHHGGSGVLPVFEPKGRVLLVDGHHLAYRNFFALKGLTTSLGEPVQGVYGFAKSLLKALKEDGDVVIVVFDAKAPSFRHEAYEAYKAGRAPTPEDFPRQLALMKELVDLLGLERLEVPGFEADDVLATLAKKAEREGYEVQILTADRDLFQLLSPRISVLHPEGHRITPEWLWEKYGLRPEQWVDFRALAGDPSDNIPGVKGIGEKTALKLLKEWGSLENLLKNLDQVKPESVREKILAHLEDLKLSRELSRVRTDLPLEVDFGRRREPDWEGLKAFLERLEFGSLQHEFGLLESPLLAEEAPWPPPEGAFLGYRLSRPEPMWAELLALAASAQGRVYRAEDPHGALRGLFEVRGLLAKDLAVVALREGLDLPPTDDPMLLAYLLDPSNTTPEGVARRYGGEWTEDAAKRALLAERLHENLLGRLQGEERLLWLYEEVEKPLSRVLAHMEATGVKLDVAYLENLSLEVAAHMRRLEEEVFRLAGRSFRLNSRDQLERVLFDELGLPPIGKTEKTGKRSTSAAVLDALRCVHPIVDKILQYRELAKLKGTYIDRLPALVHPKTGRLHTRFNQTATATGRLSSSDPNLQNIPVRTKLGQKIRRAFVAEEGWRLVALDYRQIELRVLAHLSGDENLIRVFEEGKDIHTQTASWMFGLSAEAIDPLMRRAAKTINFGVLYGMSAFRLSQELGIPYEEAQAFIQKYFQSYPKVKAWIEKTLREGRHRGYVETLFGRRRYVPDLNARVKGKREAAERMAFNMPVQGTAADLMKLAMVRLFPQLREVGARMLLQVHDELLFEAPKERAEEVAALAKEVMEGVWPLAVPLEVEVGIGEDWLAAKG

SEQ ID NO: 4845 - DNA, 2523 bp, synthetic construct
  misc_feature 1..2523: note = Variant of DNA polymerase I from Thermus sp. strain 2.9
  source 1..2523: mol_type = other DNA
atgcaccatcatcatcatcatggcggtagcggcgtgttaccggtgttcgagcctaaaggtcgcgtgcttctggttgatggccatcatctcgcgtatcgtaacttctttgccctgaaaggattaaccaccagcctgggcgagccggtacagggtgtctacggctttgcaaagtcgctcctgaaagctctgaaagaagacggtgatgtggtgattgttgtctttgatgcgaaagcgccaagttttcgccacgaagcgtacgaagcttacaaagccgggcgtgctccaacgccggaagactttcctcgccaattggcgcttatgaaggaattagtggatttgcttggcctcgaacgcttggaagttcccggtttcgaggcagacgacgtattagcgactctcgcaaagaaagccgaacgtgagggctatgaagtccagatcttgacagcagatcgcgatcttttccagcttttatctccgcgcatctcggtgttacacccggaagggcatcgtatcaccccggaatggctctgggagaaatatggtttgcgtcccgaacaatgggtggattttcgcgccttagcaggcgatccgagcgacaatattccgggagttaaaggtatcggcgagaagacggcgctcaagctccttaaagaatgggggtcgttggagaacttgcttaagaatttagatcaggtcaaaccagagtcagtgcgtgagaagattcttgctcacctcgaagacctcaaattaagccgcgaattgtcccgtgtacgcaccgatttgccgctcgaagttgatttcggtcgccgccgcgaacctgactgggagggtcttaaagcgtttttagagcgtcttgaatttggttcgctcttgcatgaattcggccttttagaaagcccgttactggccgaagaagcaccttggccaccgcccgagggcgcgtttttaggttaccgtttgagtcgcccggaaccgatgtgggccgaattactggctcttgcagcgtctgcccagggacgtgtgtatcgcgcggaagaccctcatggtgcgctccgcggcctcttcgaagtccgtggactccttgccaaagacttagctgttgttgcattgcgcgaaggtcttgatttacctccgactgatgatccaatgcttcttgcgtacctcttggacccgtcaaacacgacgcccgaaggcgtagcccgtcgttacggcggcgagtggaccgaagatgcagcgaaacgcgcgttattggccgaacgtttgcacgccaatttattaggacgtttgcaaggcgaggaacgtctcctctggctttacgaagaagtggagaaaccattgagtcgcgtgctcgcgcatatggaagctaccggtgtcaaattagacgtggcgtatttggagaatctcagccttgaagttgctgcccacatgcgccgcttggaggaagaagtattccgtttagcaggccgttcctttcgccttaactctcgcgatcagttagaacgtgtgttgttcgatgaacttggtctccctcctatcggcaagacagagaagaccggtaaacgtagcacttcagcggcggttttagaagctcttcgcgaagtccatcccattgtggacaagatcttgcagtaccgcgaactcgcgaaattgaaaggcacctatattgaccgtcttccggcattagtccacccgaaaacgggacgcctccatacccgcttcaaccaaacagccacggcgaccggtcgtttgtcctcctctgatccaaaccttcagaatattccagtacgtaccccattgggccagaagatccgccgtgcgtttgtagctgaggaggagtggcgtttagtggccctcgattatcgtcaaattgaattacgtgtccttgcccatctttctggcgatgagaacctcatccgcgtgtttcaggaaggcaaagacattcacactcaaacggcaagctggatgtttggattatcagctgaagcgatcgatcctttgatgcgtcgtgcagcgaagaccatcaatttcggtgttctctacggtatgagtgcctttcgtttgtcgcaggaattaggcattccctatgaagaagctcaggcgttcattcagaaatactttcaaagctatcccaaagttaaagcatggatcgagaagactctccgtgaaggccgcacacgtggttacgtagagaccttatttggacgtcgccgctatgttcccgatttaaacgctcgcgtgaaaggcaagcgtgaagccgccgaacgcatggcgttcaacatgcctgtacagggcacggcagctgacctcatgaaacttgcaatggtgcgcctttttccacaattgcgtgaagttggtgcccgcatgctcttgcaggtccacgatgaactcttgttagaagcgccaaaagagcgtgcggaagaggtggcagccctcgcgaaagaagttatggaaggcgtgtggcccttagcggtgcctcttgaagtcgaagttggtattggcgaggattggctggctgccaaagga

SEQ ID NO: 4846 - protein, 841 aa, synthetic construct
  REGION 1..841: note = Variant of DNA polymerase I from Thermus sp. strain 2.9
MHHHHHHGGSGVLPVFEPKGRVLLVDGHHLAYRNFFALKGLTTSLGEPVQGVYGFAKSLLKALKEDGDVVIVVFDAKAPSFRHEAYEAYKAGRAPTPEDFPRQLALMKELVDLLGLERLEVPGFEADDVLATLAKKAEREGYEVQILTADRDLFQLLSPRISVLHPEGHRITPEWLWEKYGLRPEQWVDFRALAGDPSDNIPGVKGIGEKTALKLLKEWGSLENLLKNLDQVKPESVREKILAHLEDLKLSRELSRVRTDLPLEVDFGRRREPDWEGLKAFLERLEFGSLLHEFGLLESPLLAEEAPWPPPEGAFLGYRLSRPEPMWAELLALAASAQGRVYRAEDPHGALRGLFEVRGLLAKDLAVVALREGLDLPPTDDPMLLAYLLDPSNTTPEGVARRYGGEWTEDAAKRALLAERLHANLLGRLQGEERLLWLYEEVEKPLSRVLAHMEATGVKLDVAYLENLSLEVAAHMRRLEEEVFRLAGRSFRLNSRDQLERVLFDELGLPPIGKTEKTGKRSTSAAVLEALREVHPIVDKILQYRELAKLKGTYIDRLPALVHPKTGRLHTRFNQTATATGRLSSSDPNLQNIPVRTPLGQKIRRAFVAEEEWRLVALDYRQIELRVLAHLSGDENLIRVFQEGKDIHTQTASWMFGLSAEAIDPLMRRAAKTINFGVLYGMSAFRLSQELGIPYEEAQAFIQKYFQSYPKVKAWIEKTLREGRTRGYVETLFGRRRYVPDLNARVKGKREAAERMAFNMPVQGTAADLMKLAMVRLFPQLREVGARMLLQVHDELLLEAPKERAEEVAALAKEVMEGVWPLAVPLEVEVGIGEDWLAAKG

SEQ ID NO: 4847 - DNA, 2523 bp, synthetic construct
  misc_feature 1..2523: note = Variant of DNA polymerase I from Thermus sp. strain 2.9
  source 1..2523: mol_type = other DNA
atgcaccatcatcatcatcatggcggtagcggcgtgttaccggtgttcgagcctaaaggtcgcgtgcttctggttgatggccatcatctcgcgtatcgtaacttctttgccctgaaaggattaaccaccagcctgggcgagccggtacagggtgtctacggctttgcaaagtcgctcctgaaagctctgaaagaagacggtgatgtggtgattgttgtctttgatgcgaaagcgccaagttttcgccacgaagcgtacgaagcttacaaagccgggcgtgctccaacgccggaagactttcctcgccaattggcgcttatgaaggaattagtggatttgcttggcctcgaacgcttggaagttcccggtttcgaggcagacgacgtattagcgactctcgcaaagaaagccgaacgtgagggctatgaagtccagatcttgacagcagatcgcgatcttttccagcttttatctccgcgcatctcggtgttacacccggaagggcatcgtatcaccccggaatggctctgggagaaatatggtttgcgtcccgaacaatgggtggattttcgcgccttagcaggcgatccgagcgacaatattccgggagttaaaggtatcggcgagaagacggcgctcaagctccttaaagaatgggggtcgttggagaacttgcttaagaatttagatcaggtcaaaccagagtcagtgcgtgagaagattcttgctcacctcgaagacctcaaattaagccgcgaattgtcccgtgtacgcaccgatttgccgctcgaagttgatttcggtcgccgccgcgaacctgactgggagggtcttaaagcgtttttagagcgtcttgaatttggttcgctcttgcatgaattcggccttttagaaagcccgttactggccgaagaagcaccttggccaccgcccgagggcgcgtttttaggttaccgtttgagtcgcccggaaccgatgtgggccgaattactggctcttgcagcgtctgcccagggacgtgtgtatcgcgcggaagaccctcatggtgcgctccgcggcctcttcgaagtccgtggactccttgccaaagacttagctgttgttgcattgcgcgaaggtcttgatttacctccgactgatgatccaatgcttcttgcgtacctcttggacccgtcaaacacgacgcccgaaggcgtagcccgtcgttacggcggcgagtggaccgaagatgcagcgaaacgcgcgttattggccgaacgtttgcacgccaatttattaggacgtttgcaaggcgaggaacgtctcctctggctttacgaagaagtggagaaaccattgagtcgcgtgctcgcgcatatggaagctaccggtgtcaaattagacgtggcgtatttggagaatctcagccttgaagttgctgcccacatgcgccgcttggaggaagaagtattccgtttagcaggccgttcctttcgccttaactctcgcgatcagttagaacgtgtgttgttcgatgaacttggtctccctcctatcggcaagacagagaagaccggtaaacgtagcacttcagcggcggttttagaagctcttcgcgaagtccatcccattgtggacaagatcttgcagtaccgcgaactcgcgaaaattaaaggcacctatattgaccgtcttccggcattagtccacccgaaaacgggacgcctccatacccgcttcaaccaaacagccacggcgaccggtcgtttgtcctcctctgatccaaaccttcagaatattccagtacgtaccccattgggccagaagatccgccgtgcgtttgtagctgaggagggttggcgtttagtggccctcgattatcgtcaaattgaattacgtgtccttgcccatctttctggcgatgagaacctcatccgcgtgtttcaggaaggcaaagacattcacactcaaacggcaagctggatgtttggattatcagctgaagcgatcgatcctttgatgcgtcgtgcagcgaagaccatcaatttcggtgttctctacggtatgagtgcctttcgtttgtcgcaggaattaggcattccctatgaagaagctcaggcgttcattcagaaatactttcaaagctatcccaaagttaaagcatggatcgagaagactctccgtgaaggccgcacacgtggttacgtagagaccttatttggacgtcgccgctatgttcccgatttaaacgctcgcgtgaaaggcaagcgtgaagccgccgaacgcatggcgttcaacatgcctgtacagggcacggcagctgacctcatgaaacttgcaatggtgcgcctttttccacaattgcgtgaagttggtgcccgcatgctcttgcaggtccacgatgaactcttgttagaagcgccaaaagagcgtgcggaagaggtggcagccctcgcgaaagaagttatggaaggcgtgtggcccttagcggtgcctcttgaagtcgaagttggtattggcgaggattggctggctgccaaagga

SEQ ID NO: 4848 - protein, 841 aa, synthetic construct
  REGION 1..841: note = Variant of DNA polymerase I from Thermus sp. strain 2.9
MHHHHHHGGSGVLPVFEPKGRVLLVDGHHLAYRNFFALKGLTTSLGEPVQGVYGFAKSLLKALKEDGDVVIVVFDAKAPSFRHEAYEAYKAGRAPTPEDFPRQLALMKELVDLLGLERLEVPGFEADDVLATLAKKAEREGYEVQILTADRDLFQLLSPRISVLHPEGHRITPEWLWEKYGLRPEQWVDFRALAGDPSDNIPGVKGIGEKTALKLLKEWGSLENLLKNLDQVKPESVREKILAHLEDLKLSRELSRVRTDLPLEVDFGRRREPDWEGLKAFLERLEFGSLLHEFGLLESPLLAEEAPWPPPEGAFLGYRLSRPEPMWAELLALAASAQGRVYRAEDPHGALRGLFEVRGLLAKDLAVVALREGLDLPPTDDPMLLAYLLDPSNTTPEGVARRYGGEWTEDAAKRALLAERLHANLLGRLQGEERLLWLYEEVEKPLSRVLAHMEATGVKLDVAYLENLSLEVAAHMRRLEEEVFRLAGRSFRLNSRDQLERVLFDELGLPPIGKTEKTGKRSTSAAVLEALREVHPIVDKILQYRELAKIKGTYIDRLPALVHPKTGRLHTRFNQTATATGRLSSSDPNLQNIPVRTPLGQKIRRAFVAEEGWRLVALDYRQIELRVLAHLSGDENLIRVFQEGKDIHTQTASWMFGLSAEAIDPLMRRAAKTINFGVLYGMSAFRLSQELGIPYEEAQAFIQKYFQSYPKVKAWIEKTLREGRTRGYVETLFGRRRYVPDLNARVKGKREAAERMAFNMPVQGTAADLMKLAMVRLFPQLREVGARMLLQVHDELLLEAPKERAEEVAALAKEVMEGVWPLAVPLEVEVGIGEDWLAAKG

SEQ ID NO: 4849 - DNA, 2523 bp, synthetic construct
  misc_feature 1..2523: note = Variant of DNA polymerase I from Thermus sp. strain 2.9
  source 1..2523: mol_type = other DNA
atgcaccatcatcatcatcatggcggtagcggcgtgttaccggtgttcgagcctaaaggtcgcgtgcttctggttgatggccatcatctcgcgtatcgtaacttctttgccctgaaaggattaaccaccagcctgggcgagccggtacagggtgtctacggctttgcaaagtcgctcctgaaagctctgaaagaagacggtgatgtggtgattgttgtctttgatgcgaaagcgccaagttttcgccacgaagcgtacgaagcttacaaagccgggcgtgctccaacgccggaagactttcctcgccaattggcgcttatgaaggaattagtggatttgcttggcctcgaacgcttggaagttcccggtttcgaggcagacgacgtattagcgactctcgcaaagaaagccgaacgtgagggctatgaagtccagatcttgacagcagatcgcgatcttttccagcttttatctccgcgcatctcggtgttacacccggaagggcatcgtatcaccccggaatggctctgggagaaatatggtttgcgtcccgaacaatgggtggattttcgcgccttagcaggcgatccgagcgacaatattccgggagttaaaggtatcggcgagaagacggcgctcaagctccttaaagaatgggggtcgttggagaacttgcttaagaatttagatcaggtcaaaccagagtcagtgcgtgagaagattcttgctcacctcgaagacctcaaattaagccgcgaattgtcccgtgtacgcaccgatttgccgctcgaagttgatttcggtcgccgccgcgaacctgactgggagggtcttaaagcgtttttagagcgtcttgaatttggttcgctcttgcatgaattcggccttttagaaagcccgttactggccgaagaagcaccttggccaccgcccgagggcgcgtttttaggttaccgtttgagtcgcccggaaccgatgtgggccgaattactggctcttgcagcgtctgcccagggacgtgtgtatcgcgcggaagaccctcatggtgcgctccgcggcctcttcgaagtccgtggactccttgccaaagacttagctgttgttgcattgcgcgaaggtcttgatttacctccgactgatgatccaatgcttcttgcgtacctcttggacccgtcaaacacgacgcccgaaggcgtagcccgtcgttacggcggcgagtggaccgaagatgcagcgaaacgcgcgttattggccgaacgtttgcacgccaatttattaggacgtttgcaaggcgaggaacgtctcctctggctttacgaagaagtggagaaaccattgagtcgcgtgctcgcgcatatggaagctaccggtgtcaaattagactcggcgtatttggagaatctcagccttgaagttgctgcccacatgcgccgcttggaggaagaagtattccgtttagcaggccgttcctttcgccttaactctcgcgatcagttagaacgtgtgttgttcgatgaacttggtctccctcctatcggcaagacagagaagaccggtaaacgtagcacttcagcggcggttttagaagctcttcgcgaagtccatcccattgtggacaagatcttgcagtaccgcgaactcgcgaaattgaaaggcacctatattgaccgtcttccggcattagtccacccgaaaacgggacgcctccatacccgcttcaaccaaacagccacggcgaccggtcgtttgtcctcctctgatccaaaccttcagaatattccagtacgtaccccattgggccagaagatccgccgtgcgtttgtagctgaggagggttggcgtttagtggccctcgattatcgtcaaattgaattacgtgtccttgcccatctttctggcgatgagaacctcatccgcgtgtttcaggaaggcaaagacattcacactcaaacggcaagctggatgtttggattatcagctgaagcgatcgatcctttgatgcgtcgtgcagcgaagaccatcaatttcggtgttctctacggtatgagtgcctttcgtttgtcgcaggaattaggcattccctatgaagaagctcaggcgttcattcagaaatactttcaaagctatcccaaagttaaagcatggatcgagaagactctccgtgaaggccgcacacgtggttacgtagagaccttatttggacgtcgccgctatgttcccgatttaaacgctcgcgtgaaaggcaagcgtgaagccgccgaacgcatggcgttcaacatgcctgtacagggcacggcagctgacctcatgaaacttgcaatggtgcgcctttttccacaattgcgtgaagttggtgcccgcatgctcttgcaggtccacgatgaactcttgttagaagcgccaaaagagcgtgcggaagaggtggcagccctcgcgaaagaagttatggaaggcgtgtggcccttagcggtgcctcttgaagtcgaagttggtattggcgaggattggctggctgccaaagga

SEQ ID NO: 4850 - protein, 841 aa, synthetic construct
  REGION 1..841: note = Variant of DNA polymerase I from Thermus sp. strain 2.9
MHHHHHHGGSGVLPVFEPKGRVLLVDGHHLAYRNFFALKGLTTSLGEPVQGVYGFAKSLLKALKEDGDVVIVVFDAKAPSFRHEAYEAYKAGRAPTPEDFPRQLALMKELVDLLGLERLEVPGFEADDVLATLAKKAEREGYEVQILTADRDLFQLLSPRISVLHPEGHRITPEWLWEKYGLRPEQWVDFRALAGDPSDNIPGVKGIGEKTALKLLKEWGSLENLLKNLDQVKPESVREKILAHLEDLKLSRELSRVRTDLPLEVDFGRRREPDWEGLKAFLERLEFGSLLHEFGLLESPLLAEEAPWPPPEGAFLGYRLSRPEPMWAELLALAASAQGRVYRAEDPHGALRGLFEVRGLLAKDLAVVALREGLDLPPTDDPMLLAYLLDPSNTTPEGVARRYGGEWTEDAAKRALLAERLHANLLGRLQGEERLLWLYEEVEKPLSRVLAHMEATGVKLDSAYLENLSLEVAAHMRRLEEEVFRLAGRSFRLNSRDQLERVLFDELGLPPIGKTEKTGKRSTSAAVLEALREVHPIVDKILQYRELAKLKGTYIDRLPALVHPKTGRLHTRFNQTATATGRLSSSDPNLQNIPVRTPLGQKIRRAFVAEEGWRLVALDYRQIELRVLAHLSGDENLIRVFQEGKDIHTQTASWMFGLSAEAIDPLMRRAAKTINFGVLYGMSAFRLSQELGIPYEEAQAFIQKYFQSYPKVKAWIEKTLREGRTRGYVETLFGRRRYVPDLNARVKGKREAAERMAFNMPVQGTAADLMKLAMVRLFPQLREVGARMLLQVHDELLLEAPKERAEEVAALAKEVMEGVWPLAVPLEVEVGIGEDWLAAKG

SEQ ID NO: 4851 - DNA, 2523 bp, synthetic construct
  misc_feature 1..2523: note = Variant of DNA polymerase I from Thermus sp. strain 2.9
  source 1..2523: mol_type = other DNA
atgcaccatcatcatcatcatggcggtagcggcgtgttaccggtgttcgagcctaaaggtcgcgtgcttctggttgatggccatcatctcgcgtatcgtaacttctttgccctgaaaggattaaccaccagcctgggcgagccggtacagggtgtctacggctttgcaaagtcgctcctgaaagctctgaaagaagacggtgatgtggtgattgttgtctttgatgcgaaagcgccaagttttcgccacgaagcgtacgaagcttacaaagccgggcgtgctccaacgccggaagactttcctcgccaattggcgcttatgaaggaattagtggatttgcttggcctcgaacgcttggaagttcccggtttcgaggcagacgacgtattagcgactctcgcaaagaaagccgaacgtgagggctatgaagtccagatcttgacagcagatcgcgatcttttccagcttttatctccgcgcatctcggtgttacacccggaagggcatcgtatcaccccggaatggctctgggagaaatatggtttgcgtcccgaacaatgggtggattttcgcgccttagcaggcgatccgagcgacaatattccgggagttaaaggtatcggcgagaagacggcgctcaagctccttaaagaatgggggtcgttggagaacttgcttaagaatttagatcaggtcaaaccagagtcagtgcgtgagaagattcttgctcacctcgaagacctcaaattaagccgcgaattgtcccgtgtacgcaccgatttgccgctcgaagttgatttcggtcgccgccgcgaacctgactgggagggtcttaaagcgtttttagagcgtcttgaatttggttcgctcttgcatgaattcggccttttagaaagcccgttactggccgaagaagcaccttggccaccgcccgagggcgcgtttttaggttaccgtttgagtcgcccggaaccgatgtgggccgaattactggctcttgcagcgtctgcccagggacgtgtgtatcgcgcggaagaccctcatggtgcgctccgcggcctcttcgaagtccgtggactccttgccaaagacttagctgttgttgcattgcgcgaaggtcttgatttacctccgactgatgatccaatgcttcttgcgtacctcttggacccgtcaaacacgacgcccgaaggcgtagcccgtcgttacggcggcgagtggaccgaagatgcagcgaaacgcgcgttattggccgaacgtttgcacgccaatttattaggacgtttgcaaggcgaggaacgtctcctctggctttacgaagaagtggagaaaccattgagtcgcgtgctcgcgcatatggaagctaccggtgtcaaattagacgtggcgtatttggagaatactagccttgaagttgctgcccacatgcgccgcttggaggaagaagtattccgtttagcaggccgttcctttcgccttaactctcgcgatcagttagaacgtgtgttgttcgatgaacttggtctccctcctatcggcaagacagagaagaccggtaaacgtagcacttcagcggcggttttagaagctcttcgcgaagtccatcccattgtggacaagatcttgcagtaccgcgaactcgcgaaattgaaaggcacctatattgaccgtcttccggcattagtccacccgaaaacgggacgcctccatacccgcttcaaccaaacagccacggcgaccggtcgtttgtcctcctctgatccaaaccttcagaatattccagtacgtaccccattgggccagaagatccgccgtgcgtttgtagctgaggagggttggcgtttagtggccctcgattatcgtcaaattgaattacgtgtccttgcccatctttctggcgatgagaacctcatccgcgtgtttcaggaaggcaaagacattcacactcaaacggcaagctggatgtttggattatcagctgaagcgatcgatcctttgatgcgtcgtgcagcgaagaccatcaatttcggtgttctctacggtatgagtgcctttcgtttgtcgcaggaattaggcattccctatgaagaagctcaggcgttcattcagaaatactttcaaagctatcccaaagttaaagcatggatcgagaagactctccgtgaaggccgcacacgtggttacgtagagaccttatttggacgtcgccgctatgttcccgatttaaacgctcgcgtgaaaggcaagcgtgaagccgccgaacgcatggcgttcaacatgcctgtacagggcacggcagctgacctcatgaaacttgcaatggtgcgcctttttccacaattgcgtgaagttggtgcccgcatgctcttgcaggtccacgatgaactcttgttagaagcgccaaaagagcgtgcggaagaggtggcagccctcgcgaaagaagttatggaaggcgtgtggcccttagcggtgcctcttgaagtcgaagttggtattggcgaggattggctggctgccaaagga

SEQ ID NO: 4852 - protein, 841 aa, synthetic construct
  REGION 1..841: note = Variant of DNA polymerase I from Thermus sp. strain 2.9
MHHHHHHGGSGVLPVFEPKGRVLLVDGHHLAYRNFFALKGLTTSLGEPVQGVYGFAKSLLKALKEDGDVVIVVFDAKAPSFRHEAYEAYKAGRAPTPEDFPRQLALMKELVDLLGLERLEVPGFEADDVLATLAKKAEREGYEVQILTADRDLFQLLSPRISVLHPEGHRITPEWLWEKYGLRPEQWVDFRALAGDPSDNIPGVKGIGEKTALKLLKEWGSLENLLKNLDQVKPESVREKILAHLEDLKLSRELSRVRTDLPLEVDFGRRREPDWEGLKAFLERLEFGSLLHEFGLLESPLLAEEAPWPPPEGAFLGYRLSRPEPMWAELLALAASAQGRVYRAEDPHGALRGLFEVRGLLAKDLAVVALREGLDLPPTDDPMLLAYLLDPSNTTPEGVARRYGGEWTEDAAKRALLAERLHANLLGRLQGEERLLWLYEEVEKPLSRVLAHMEATGVKLDVAYLENTSLEVAAHMRRLEEEVFRLAGRSFRLNSRDQLERVLFDELGLPPIGKTEKTGKRSTSAAVLEALREVHPIVDKILQYRELAKLKGTYIDRLPALVHPKTGRLHTRFNQTATATGRLSSSDPNLQNIPVRTPLGQKIRRAFVAEEGWRLVALDYRQIELRVLAHLSGDENLIRVFQEGKDIHTQTASWMFGLSAEAIDPLMRRAAKTINFGVLYGMSAFRLSQELGIPYEEAQAFIQKYFQSYPKVKAWIEKTLREGRTRGYVETLFGRRRYVPDLNARVKGKREAAERMAFNMPVQGTAADLMKLAMVRLFPQLREVGARMLLQVHDELLLEAPKERAEEVAALAKEVMEGVWPLAVPLEVEVGIGEDWLAAKG

SEQ ID NO: 4853 - DNA, 2523 bp, synthetic construct
  misc_feature 1..2523: note = Variant of DNA polymerase I from Thermus sp. strain 2.9
  source 1..2523: mol_type = other DNA
atgcaccatcatcatcatcatggcggtagcggcgtgttaccggtgttcgagcctaaaggtcgcgtgcttctggttgatggccatcatctcgcgtatcgtaacttctttgccctgaaaggattaaccaccagcctgggcgagccggtacagggtgtctacggctttgcaaagtcgctcctgaaagctctgaaagaagacggtgatgtggtgattgttgtctttgatgcgaaagcgccaagttttcgccacgaagcgtacgaagcttacaaagccgggcgtgctccaacgccggaagactttcctcgccaattggcgcttatgaaggaattagtggatttgcttggcctcgaacgcttggaagttcccggtttcgaggcagacgacgtattagcgactctcgcaaagaaagccgaacgtgagggctatgaagtccagatcttgacagcagatcgcgatcttttccagcttttatctccgcgcatctcggtgttacacccggaagggcatcgtatcaccccggaatggctctgggagaaatatggtttgcgtcccgaacaatgggtggattttcgcgccttagcaggcgatccgagcgacaatattccgggagttaaaggtatcggcgagaagacggcgctcaagctccttaaagaatgggggtcgttggagaacttgcttaagaatttagatcaggtcaaaccagagtcagtgcgtgagaagattcttgctcacctcgaagacctcaaattaagccgcgaattgtcccgtgtacgcaccgatttgccgctcgaagttgatttcggtcgccgccgcgaacctgactgggagggtcttaaagcgtttttagagcgtcttgaatttggttcgctcttgcatgaattcggccttttagaaagcccgttactggccgaagaagcaccttggccaccgcccgagggcgcgtttttaggttaccgtttgagtcgcccggaaccgatgtgggccgaattactggctcttgcagcgtctgcccagggacgtgtgtatcgcgcggaagaccctcatggtgcgctccgcggcctcttcgaagtccgtggactccttgccaaagacttagctgttgttgcattgcgcgaaggtcttgatttacctccgactgatgatccaatgcttcttgcgtacctcttggacccgtcaaacacgacgcccgaaggcgtagcccgtcgttacggcggcgagtggaccgaagatgcagcgaaacgcgcgttattggccgaacgtttgcacgccaatttattaggacgtttgcaaggcgaggaacgtctcctctggctttacgaagaagtggagaaaccattgagtcgcgtgctcgcgcatatggaacctaccggtgtcaaattagacgtggcgtatttggagaatctcagccttgaagttgctgcccacatgcgccgcttggaggaagaagtattccgtttagcaggccgttcctttcgccttaactctcgcgatcagttagaacgtgtgttgttcgatgaacttggtctccctcctatcggcaagacagagaagatcggtaaacgtagcacttcagcggcggttttagaagctcttcgcgaagtccatcccattgtggacaagatcttgcagtaccgcgaactcgcgaaattgaaaggcacctatattgaccgtcttccggcattagtccacccgaaaacgggacgcctccatacccgcttcaaccaaacagccacggcgaccggtcgtttgtcctcctctgatccaaaccttcagaatattccagtacgtaccccattgggccagaagatccgccgtgcgtttgtagctgaggagggttggcgtttagtggccctcgattatcgtcaaattgaattacgtgtccttgcccatctttctggcgatgagaacctcatccgcgtgtttcaggaaggcaaagacattcacactcaaacggcaagctggatgtttggattatcagctgaagcgatcgatcctttgatgcgtcgtgcagcgaagaccatcaatttcggtgttctctacggtatgagtgcctttcgtttgtcgcaggaattaggcattccctatgaagaagctcaggcgttcattcagaaatactttcaaagctatcccaaagttaaagcatggatcgagaagactctccgtgaaggccgcacacgtggttacgtagagaccttatttggacgtcgccgctatgttcccgatttaaacgctcgcgtgaaaggcaagcgtgaagccgccgaacgcatggcgttcaacatgcctgtacagggcacggcagctgacctcatgaaacttgcaatggtgcgcctttttccacaattgcgtgaagttggtgcccgcatgctcttgcaggtccacgatgaactcttgttagaagcgccaaaagagcgtgcggaagaggtggcagccctcgcgaaagaagttatggaaggcgtgtggcccttagcggtgcctcttgaagtcgaagttggtattggcgaggattggctggctgccaaagga

SEQ ID NO: 4854 - protein, 841 aa, synthetic construct
  REGION 1..841: note = Variant of DNA polymerase I from Thermus sp. strain 2.9
MHHHHHHGGSGVLPVFEPKGRVLLVDGHHLAYRNFFALKGLTTSLGEPVQGVYGFAKSLLKALKEDGDVVIVVFDAKAPSFRHEAYEAYKAGRAPTPEDFPRQLALMKELVDLLGLERLEVPGFEADDVLATLAKKAEREGYEVQILTADRDLFQLLSPRISVLHPEGHRITPEWLWEKYGLRPEQWVDFRALAGDPSDNIPGVKGIGEKTALKLLKEWGSLENLLKNLDQVKPESVREKILAHLEDLKLSRELSRVRTDLPLEVDFGRRREPDWEGLKAFLERLEFGSLLHEFGLLESPLLAEEAPWPPPEGAFLGYRLSRPEPMWAELLALAASAQGRVYRAEDPHGALRGLFEVRGLLAKDLAVVALREGLDLPPTDDPMLLAYLLDPSNTTPEGVARRYGGEWTEDAAKRALLAERLHANLLGRLQGEERLLWLYEEVEKPLSRVLAHMEPTGVKLDVAYLENLSLEVAAHMRRLEEEVFRLAGRSFRLNSRDQLERVLFDELGLPPIGKTEKIGKRSTSAAVLEALREVHPIVDKILQYRELAKLKGTYIDRLPALVHPKTGRLHTRFNQTATATGRLSSSDPNLQNIPVRTPLGQKIRRAFVAEEGWRLVALDYRQIELRVLAHLSGDENLIRVFQEGKDIHTQTASWMFGLSAEAIDPLMRRAAKTINFGVLYGMSAFRLSQELGIPYEEAQAFIQKYFQSYPKVKAWIEKTLREGRTRGYVETLFGRRRYVPDLNARVKGKREAAERMAFNMPVQGTAADLMKLAMVRLFPQLREVGARMLLQVHDELLLEAPKERAEEVAALAKEVMEGVWPLAVPLEVEVGIGEDWLAAKG

SEQ ID NO: 4855 - DNA, 2523 bp, synthetic construct
  misc_feature 1..2523: note = Variant of DNA polymerase I from Thermus sp. strain 2.9
  source 1..2523: mol_type = other DNA
atgcaccatcatcatcatcatggcggtagcggcgtgttaccggtgttcgagcctaaaggtcgcgtgcttctggttgatggccatcatctcgcgtatcgtaacttctttgccctgaaaggattaaccaccagcctgggcgagccggtacagggtgtctacggctttgcaaagtcgctcctgaaagctctgaaagaagacggtgatgtggtgattgttgtctttgatgcgaaagcgccaagttttcgccacgaagcgtacgaagcttacaaagccgggcgtgctccaacgccggaagactttcctcgccaattggcgcttatgaaggaattagtggatttgcttggcctcgaacgcttggaagttcccggtttcgaggcagacgacgtattagcgactctcgcaaagaaagccgaacgtgagggctatgaagtccagatcttgacagcagatcgcgatcttttccagcttttatctccgcgcatctcggtgttacacccggaagggcatcgtatcaccccggaatggctctgggagaaatatggtttgcgtcccgaacaatgggtggattttcgcgccttagcaggcgatccgagcgacaatattccgggagttaaaggtatcggcgagaagacggcgctcaagctccttaaagaatgggggtcgttggagaacttgcttaagaatttagatcaggtcaaaccagagtcagtgcgtgagaagattcttgctcacctcgaagacctcaaattaagccgcgaattgtcccgtgtacgcaccgatttgccgctcgaagttgatttcggtcgccgccgcgaacctgactgggagggtcttaaagcgtttttagagcgtcttgaatttggttcgctcttgcatgaattcggccttttagaaagcccgttactggccgaagaagcaccttggccaccgcccgagggcgcgtttttaggttaccgtttgagtcgcccggaaccgatgtgggccgaattactggctcttgcagcgtctgcccagggacgtgtgtatcgcgcggaagaccctcatggtgcgctccgcggcctcttcgaagtccgtggactccgggccaaagacttagctgttgttgcattgcgcgaaggtcttgatttacctccgactgatgatccaatgcttcttgcgtacctcttggacccgtcaaacacgacgcccgaaggcgtagcccgtcgttacggcggcgagtggaccgaagatgcagcgaaacgcgcgttattggccgaacgtttgcacgccaatttattaggacgtttgcaaggcgaggaacgtctcctctggctttacgaagaagtggagaaaccattgagtcgcgtgctcgcgcatatggaagctaccggtgtcaaattagacgtggcgtatttggagaatctcagccttgaagttgctgcccacatgcgccgcttggaggaagaagtattccgtttagcaggccgttcctttcgccttaactctcgcgatcagttagaacgtgtgttgttcgatgaacttggtctccctcctatcggcaagacagagaagaccggtaaacgtagcacttcagcggcggttttagaagctcttcgcgaagtccatcccattgtggacaagatcttgcagtaccgcgaactcgcgaaattgaaaggcacctatattgaccgtcttccggcattagtccacccgaaaacgggacgcctccatacccgcttcaaccaaacagccacggcgaccggtcgtttgtcctcctctgatccaaaccttcagaatattccagtacgtaccccattgggccagaagatccgccgtgcgtttgtagctgaggagggttggcgtttagtggccctcgattatcgtcaaattgaattacgtgtccttgcccatctttctggcgatgagaacctcatccgcgtgtttcaggaaggcaaagacattcacactcaaacggcaagctggatgtttggattatcagctgaagcgatcgatcctttgatgcgtcgtgcagcgaagaccatcaatttcggtgttctctacggtatgagtgcctttcgtttgtcgcaggaattaggcattccctatgaagaagctcaggcgttcattcagaaatactttcaaagctatcccaaagttaaagcatggatcgagaagactctccgtgaaggccgcacacgtggttacgtagagaccttatttggacgtcgccgctatgttcccgatttaaacgctcgcgtgaaaggcaagcgtgaagccgccgaacgcatggcgttcaacatgcctgtacagggcacggcagctgacctcatgaaacttgcaatggtgcgcctttttccacaattgcgtgaagttggtgcccgcatgctcttgcaggtccacgatgaactcttgttagaagcgccaaaagagcgtgcggaagaggtggcagccctcgcgaaagaagttatggaaggcgtgtggcccttagcggtgcctcttgaagtcgaagttggtattggcgaggattggctggctgccaaagga

SEQ ID NO: 4856 - protein, 841 aa, synthetic construct
  REGION 1..841: note = Variant of DNA polymerase I from Thermus sp. strain 2.9
MHHHHHHGGSGVLPVFEPKGRVLLVDGHHLAYRNFFALKGLTTSLGEPVQGVYGFAKSLLKALKEDGDVVIVVFDAKAPSFRHEAYEAYKAGRAPTPEDFPRQLALMKELVDLLGLERLEVPGFEADDVLATLAKKAEREGYEVQILTADRDLFQLLSPRISVLHPEGHRITPEWLWEKYGLRPEQWVDFRALAGDPSDNIPGVKGIGEKTALKLLKEWGSLENLLKNLDQVKPESVREKILAHLEDLKLSRELSRVRTDLPLEVDFGRRREPDWEGLKAFLERLEFGSLLHEFGLLESPLLAEEAPWPPPEGAFLGYRLSRPEPMWAELLALAASAQGRVYRAEDPHGALRGLFEVRGLRAKDLAVVALREGLDLPPTDDPMLLAYLLDPSNTTPEGVARRYGGEWTEDAAKRALLAERLHANLLGRLQGEERLLWLYEEVEKPLSRVLAHMEATGVKLDVAYLENLSLEVAAHMRRLEEEVFRLAGRSFRLNSRDQLERVLFDELGLPPIGKTEKTGKRSTSAAVLEALREVHPIVDKILQYRELAKLKGTYIDRLPALVHPKTGRLHTRFNQTATATGRLSSSDPNLQNIPVRTPLGQKIRRAFVAEEGWRLVALDYRQIELRVLAHLSGDENLIRVFQEGKDIHTQTASWMFGLSAEAIDPLMRRAAKTINFGVLYGMSAFRLSQELGIPYEEAQAFIQKYFQSYPKVKAWIEKTLREGRTRGYVETLFGRRRYVPDLNARVKGKREAAERMAFNMPVQGTAADLMKLAMVRLFPQLREVGARMLLQVHDELLLEAPKERAEEVAALAKEVMEGVWPLAVPLEVEVGIGEDWLAAKG

SEQ ID NO: 4857 - DNA, 2523 bp, synthetic construct
  misc_feature 1..2523: note = Variant of DNA polymerase I from Thermus sp. strain 2.9
  source 1..2523: mol_type = other DNA
atgcaccatcatcatcatcatggcggtagcggcgtgttaccggtgttcgagcctaaaggtcgcgtgcttctggttgatggccatcatctcgcgtatcgtaacttctttgccctgaaaggattaaccaccagcctgggcgagccggtacagggtgtctacggctttgcaaagtcgctcctgaaagctctgaaagaagacggtgatgtggtgattgttgtctttgatgcgaaagcgccaagttttcgccacgaagcgtacgaagcttacaaagccgggcgtgctccaacgccggaagactttcctcgccaattggcgcttatgaaggaattagtggatttgcttggcctcgaacgcttggaagttcccggtttcgaggcagacgacgtattagcgactctcgcaaagaaagccgaacgtgagggctatgaagtccagatcttgacagcagatcgcgatcttttccagcttttatctccgcgcatctcggtgttacacccggaagggcatcgtatcaccccggaatggctctgggagaaatatggtttgcgtcccgaacaatgggtggattttcgcgccttagcaggcgatccgagcgacaatattccgggagttaaaggtatcggcgagaagacggcgctcaagctccttaaagaatgggggtcgttggagaacttgcttaagaatttagatcaggtcaaaccagagtcagtgcgtgagaagattcttgctcacctcgaagacctcaaattaagccgcgaattgtcccgtgtacgcaccgatttgccgctcgaagttgatttcggtcgccgccgcgaacctgactgggagggtcttaaagcgtttttagagcgtcttgaatttggttcgctcttgcatgaattcggccttttagaaagcccgttactggccgaagaagcaccttggccaccgcccgagggcgcgtttttaggttaccgtttgagtcgcccggaaccgatgtgggccgaattactggctcttgcagcgtctgcccagggacgtgtgtatcgcgcggaagaccctcatggtgcgctccgcggcctcttcgaagtccgtggactccttgccaaagacttagctgttgttgcattgcgcgaaggtcttgatttacctccgactgatgatccaatgcttcttgcgtacctcttggacccgtcaaacacgacgcccgaaggcgtagcccgtcgttacggcggcgagtggaccgaagatgcagcgaaacgcgcgttattggccgaacgtttgcacgccaatttattaggacgtttgcaaggcgaggaacgtctcctctggctttacgaagaagtggagaaaccattgagtcgcgtgctcgcgcatatggaagctaccggtgtcaaattagacgtggcgtatttggagaatctcagccttgaagttgctgcccacatgcgccgcttggaggaagaagtattccgtttagcaggccgttcctttcgccttaactctcgcgatcagttagaacgtgtgttgttcgatgaacttggtctccctcctatcggcaagacagagaagaccggtaaacgtagcacttcagcggcggttttagaagctcttcgcgaagtccatcccattgtggacaagatcttgcagtaccgcgaactcgcgaaattgaaaggcacctatattgaccgtcttccggcattagtccacccgaaaacgggacgcctccatacccgcttcaaccaaacagccacggcgaccggtcgtttgtcctcctctgatccaaaccttcagaatattccagtacgtaccccattgcggcagaagatccgccgtgcgtttgtagctgaggagggttggcgtttagtggccctcgattatcgtcaaattgaattacgtgtccttgcccatctttctggcgatgagaacctcatccgcgtgtttcaggaaggcaaagacattcacactcaaacggcaagctggatgtttggattatcagctgaagcgatcgatcctttgatgcgtcgtgcagcgaagaccatcaatttcggtgttctctacggtatgagtgcctttcgtttgtcgcaggaattaggcattccctatgaagaagctcaggcgttcattcagaaatactttcaaagctatcccaaagttaaagcatggatcgagaagactctccgtgaaggccgcacacgtggttacgtagagaccttatttggacgtcgccgctatgttcccgatttaaacgctcgcgtgaaaggcaagcgtgaagccgccgaacgcatggcgttcaacatgcctgtacagggcacggcagctgacctcatgaaacttgcaatggtgcgcctttttccacaattgcgtgaagttggtgcccgcatgctcttgcaggtccacgatgaactcttgttagaagcgccaaaagagcgtgcggaagaggtggcagccctcgcgaaagaagttatggaaggcgtgtggcccttagcggtgcctcttgaagtcgaagttggtattggcgaggattggctggctgccaaagga

SEQ ID NO: 4858 - protein, 841 aa, synthetic construct
  REGION 1..841: note = Variant of DNA polymerase I from Thermus sp. strain 2.9
MHHHHHHGGSGVLPVFEPKGRVLLVDGHHLAYRNFFALKGLTTSLGEPVQGVYGFAKSLLKALKEDGDVVIVVFDAKAPSFRHEAYEAYKAGRAPTPEDFPRQLALMKELVDLLGLERLEVPGFEADDVLATLAKKAEREGYEVQILTADRDLFQLLSPRISVLHPEGHRITPEWLWEKYGLRPEQWVDFRALAGDPSDNIPGVKGIGEKTALKLLKEWGSLENLLKNLDQVKPESVREKILAHLEDLKLSRELSRVRTDLPLEVDFGRRREPDWEGLKAFLERLEFGSLLHEFGLLESPLLAEEAPWPPPEGAFLGYRLSRPEPMWAELLALAASAQGRVYRAEDPHGALRGLFEVRGLLAKDLAVVALREGLDLPPTDDPMLLAYLLDPSNTTPEGVARRYGGEWTEDAAKRALLAERLHANLLGRLQGEERLLWLYEEVEKPLSRVLAHMEATGVKLDVAYLENLSLEVAAHMRRLEEEVFRLAGRSFRLNSRDQLERVLFDELGLPPIGKTEKTGKRSTSAAVLEALREVHPIVDKILQYRELAKLKGTYIDRLPALVHPKTGRLHTRFNQTATATGRLSSSDPNLQNIPVRTPLRQKIRRAFVAEEGWRLVALDYRQIELRVLAHLSGDENLIRVFQEGKDIHTQTASWMFGLSAEAIDPLMRRAAKTINFGVLYGMSAFRLSQELGIPYEEAQAFIQKYFQSYPKVKAWIEKTLREGRTRGYVETLFGRRRYVPDLNARVKGKREAAERMAFNMPVQGTAADLMKLAMVRLFPQLREVGARMLLQVHDELLLEAPKERAEEVAALAKEVMEGVWPLAVPLEVEVGIGEDWLAAKG

SEQ ID NO: 4859 - DNA, 2523 bp, synthetic construct
  misc_feature 1..2523: note = Variant of DNA polymerase I from Thermus sp. strain 2.9
  source 1..2523: mol_type = other DNA
atgcaccatcatcatcatcatggcggtagcggcgtgttaccggtgttcgagcctaaaggtcgcgtgcttctggttgatggccatcatctcgcgtatcgtaacttctttgccctgaaaggattaaccaccagcctgggcgagccggtacagggtgtctacggctttgcaaagtcgctcctgaaagctctgaaagaagacggtgatgtggtgattgttgtctttgatgcgaaagcgccaagttttcgccacgaagcgtacgaagcttacaaagccgggcgtgctccaacgccggaagactttcctcgccaattggcgcttatgaaggaattagtggatttgcttggcctcgaacgcttggaagttcccggtttcgaggcagacgacgtattagcgactctcgcaaagaaagccgaacgtgagggctatgaagtccagatcttgacagcagatcgcgatcttttccagcttttatctccgcgcatctcggtgttacacccggaagggcatcgtatcaccccggaatggctctgggagaaatatggtttgcgtcccgaacaatgggtggattttcgcgccttagcaggcgatccgagcgacaatattccgggagttaaaggtatcggcgagaagacggcgctcaagctccttaaagaatgggggtcgttggagaacttgcttaagaatttagatcaggtcaaaccagagtcagtgcgtgagaagattcttgctcacctcgaagacctcaaattaagccgcgaattgtcccgtgtacgcaccgatttgccgctcgaagttgatttcggtcgccgccgcgaacctgactgggagggtcttaaagcgtttttagagcgtcttgaatttggttcgctcctgcatgaattcggccttttagaaagcccgttactggccgaagaagcaccttggccaccgcccgagggcgcgtttttaggttaccgtttgagtcgcccggaaccgatgtgggccgaattactggctcttgcagcgtctgcccagggacgtgtgtatcgcgcggaagaccctcatggtgcgctccgcggcctcttcgaagtccgtggactccttgccaaagacttagctgttgttgcattgcgcgaaggtcttgatttacctccgactgatgatccaatgcttcttgcgtacctcttggacccgtcaaacacgacgcccgaaggcgtagcccgtcgttacggcggcgagtggaccgaagatgcagcgaaacgcgcgttattggccgaacgtttgcacgcaaatttattaggacgtttgcaaggcgaggaacgtctcctctggctttacgaagaagtggagaaaccattgagtcgcgtgctcgcgcatatggaagctaccggtgtcaaattagacgtggcgtatttggagaatctcagccttgaagttgctgcccacatgcgccgcttggaggaagaagtattccgtttagcaggccgttcctttcgccttaactctcgcgatcagttagaacgtgtgttgttcgatgaacttggtctccctcctatcggcaagacagagaagaccggtaaacgtagcacttcacgcgcggttttagaggctcttcgcgaagtccatcccattgtggacaagatcttgcagtaccgcgaactcgcgaaattgaaaggcacctatattgaccgtcttccggcattagtccacccgaaaacgggacgcctccatacccgcttcaaccaaacagccacggcgaccggtcgtttgtcctcctctgatccaaaccttcagaatattccagtacgtaccccattgggccagaagatccgccgtgcgtttgtagctgaggagggttggcgtttagtggccctcgattatcgtcaaattgaattacgtgtccttgcccatctttctggcgatgagaacctcatccgcgtgtttcaggaaggcaaagacattcacactcaaacggcaagctggatgtttggattatcagctgaagcgatcgatcctttgatgcgtcgtgcagcgaagaccatcaatttcggtgttctctacggtatgagtgcatttcgtttgtcgcaggaattaggcattccctatgaagaagctcaggcgttcattcagaaatactttcaaagctatcccaaagttaaagcatggatcgagaagactctccgtgaaggccgcacacgtggttacgtagagaccttatttggacgtcgccgctatgttcccgatttaaacgctcgcgtgaaaggcaagcgtgaagccgccgaacgcatggcgttcaacatgcctgtacagggcacggcagctgacctcatgaaacttgcaatggtgcgcctttttccacaattgcgtgaagttggtgcccgcatgctcttgcaggtccacgatgaactcttgttagaagcgccaaaagagcgtgcggaagaggtggcagccctcgcgaaagaagttatggaaggcgtgtggcccttagcggtgcctcttgaagtcgaagttggtattggcgaggattggctggctgccaaagga

SEQ ID NO: 4860 - protein, 841 aa, synthetic construct
  REGION 1..841: note = Variant of DNA polymerase I from Thermus sp. strain 2.9
MHHHHHHGGSGVLPVFEPKGRVLLVDGHHLAYRNFFALKGLTTSLGEPVQGVYGFAKSLLKALKEDGDVVIVVFDAKAPSFRHEAYEAYKAGRAPTPEDFPRQLALMKELVDLLGLERLEVPGFEADDVLATLAKKAEREGYEVQILTADRDLFQLLSPRISVLHPEGHRITPEWLWEKYGLRPEQWVDFRALAGDPSDNIPGVKGIGEKTALKLLKEWGSLENLLKNLDQVKPESVREKILAHLEDLKLSRELSRVRTDLPLEVDFGRRREPDWEGLKAFLERLEFGSLLHEFGLLESPLLAEEAPWPPPEGAFLGYRLSRPEPMWAELLALAASAQGRVYRAEDPHGALRGLFEVRGLLAKDLAVVALREGLDLPPTDDPMLLAYLLDPSNTTPEGVARRYGGEWTEDAAKRALLAERLHANLLGRLQGEERLLWLYEEVEKPLSRVLAHMEATGVKLDVAYLENLSLEVAAHMRRLEEEVFRLAGRSFRLNSRDQLERVLFDELGLPPIGKTEKTGKRSTSRAVLEALREVHPIVDKILQYRELAKLKGTYIDRLPALVHPKTGRLHTRFNQTATATGRLSSSDPNLQNIPVRTPLGQKIRRAFVAEEGWRLVALDYRQIELRVLAHLSGDENLIRVFQEGKDIHTQTASWMFGLSAEAIDPLMRRAAKTINFGVLYGMSAFRLSQELGIPYEEAQAFIQKYFQSYPKVKAWIEKTLREGRTRGYVETLFGRRRYVPDLNARVKGKREAAERMAFNMPVQGTAADLMKLAMVRLFPQLREVGARMLLQVHDELLLEAPKERAEEVAALAKEVMEGVWPLAVPLEVEVGIGEDWLAAKG

SEQ ID NO: 4861 - DNA, 2523 bp, synthetic construct
  misc_feature 1..2523: note = Variant of DNA polymerase I from Thermus sp. strain 2.9
  source 1..2523: mol_type = other DNA
atgcaccatcatcatcatcatggcggtagcggcgtgttaccggtgttcgagcctaaaggtcgcgtgcttctggttgatggccatcatctcgcgtatcgtaacttctttgccctgaaaggattaaccaccagcctgggcgagccggtacagggtgtctacggctttgcaaagtcgctcctgaaagctctgaaagaagacggtgatgtggtgattgttgtctttgatgcgaaagcgccaagttttcgccacgaagcgtacgaagcttacaaagccgggcgtgctccaacgccggaagactttcctcgccaattggcgcttatgaaggaattagtggatttgcttggcctcgaacgcttggaagttcccggtttcgaggcagacgacgtattagcgactctcgcaaagaaagccgaacgtgagggctatgaagtccagatcttgacagcagatcgcgatcttttccagcttttatctccgcgcatctcggtgttacacccggaagggcatcgtatcaccccggaatggctctgggagaaatatggtttgcgtcccgaacaatgggtggattttcgcgccttagcaggcgatccgagcgacaatattccgggagttaaaggtatcggcgagaagacggcgctcaagctccttaaagaatgggggtcgttggagaacttgcttaagaatttagatcaggtcaaaccagagtcagtgcgtgagaagattcttgctcacctcgaagacctcaaattaagccgcgaattgtcccgtgtacgcaccgatttgccgctcgaagttgatttcggtcgccgccgcgaacctgactgggagggtcttaaagcgtttttagagcgtcttgaatttggttcgctcctgcatgaattcggccttttagaaagcccgttactggccgaagaagcaccttggccaccgcccgagggcgcgtttttaggttaccgtttgagtcgcccggaaccgatgtgggccgaattactggctcttgcagcgtctgcccagggacgtgtgtatcgcgcggaagaccctcatggtgcgctccgcggcctcttcgaagtccgtggactccttgccaaagacttagctgttgttgcattgcgcgaaggtcttgatttacctccgactgatgatccaatgcttcttgcgtacctcttggacccgtcaaacacgacgcccgaaggcgtagcccgtcgttacggcggcgagtggaccgaagatgcagcgaaacgcgcgttattggccgaacgtttgcacgcaaatttattaggacgtttgcaaggcgagaaacgtctcctctggctttacgaagaagtggagaaaccattgagtcgcgtgctcgcgcatatggaagctaccggtgtcaaattagacgtggcgtatttggagaatctcagccttgaagttgctgcccacatgcgccgcttggaggaagaagtattccgtttagcaggccgttcctttcgccttaactctcgcgatcagttagaacgtgtgttgttcgatgaacttggtctccctcctatcggcaagacagagaagaccggtaaacgtagcacttcacgcgcggttttagacgctcttcgcgaagtccatcccattgtggacaagatcttgcagtaccgcgaactcgcgaaattgaaaggcacctatattgaccgtcttccggcattagtccacccgaaaacgggacgcctccatacccgcttcaaccaaacagccacggcgaccggtcgtttgtcctcctctgatccaaaccttcagaatattccagtacgtaccccattgggccagaagatccgccgtgcgtttgtagctgaggagggttggcgtttagtggccctcgattatcgtcaaattgaattacgtgtccttgcccatctttctggcgatgagaacctcatccgcgtgtttcaggaaggcaaagacattcacactcaaacggcaagctggatgtttggattaggtgctgaagcgatcgatcctttgatgcgtcgtgcagcgaagaccatcaatttcggtgttctctacggtatgagtccatttcgtttgtcgcaggaattaggcattcccaaggaagaagctcaggcgttcattcagaaatactttcaaagctatcccaaagttaaagcatggatcgagaagactctccgtgaaggccgcacacgtggttacgtagagaccttatttggacgtcgccgctatgttcccgatttaaacgctcgcgtgaaaggcaagcgtgaagccgccgaacgcatggcgttcaacatgcctgtacagggcacggcagctgacctcatgaaacttgcaatggtgcgcctttttccacaattgcgtgaagttggtgcccgcatgctcttgcaggtccacgatgaactcttgttagaagcgccaaaagagcgtgcggaagaggtggcagccctcgcgaaagaagttatggaaggcgtgtggcccttagcggtgcctcttgaagtcgaagttggtattggcgaggattggctggctgccaaagga

SEQ ID NO: 4862 - protein, 841 aa, synthetic construct
  REGION 1..841: note = Variant of DNA polymerase I from Thermus sp. strain 2.9
MHHHHHHGGSGVLPVFEPKGRVLLVDGHHLAYRNFFALKGLTTSLGEPVQGVYGFAKSLLKALKEDGDVVIVVFDAKAPSFRHEAYEAYKAGRAPTPEDFPRQLALMKELVDLLGLERLEVPGFEADDVLATLAKKAEREGYEVQILTADRDLFQLLSPRISVLHPEGHRITPEWLWEKYGLRPEQWVDFRALAGDPSDNIPGVKGIGEKTALKLLKEWGSLENLLKNLDQVKPESVREKILAHLEDLKLSRELSRVRTDLPLEVDFGRRREPDWEGLKAFLERLEFGSLLHEFGLLESPLLAEEAPWPPPEGAFLGYRLSRPEPMWAELLALAASAQGRVYRAEDPHGALRGLFEVRGLLAKDLAVVALREGLDLPPTDDPMLLAYLLDPSNTTPEGVARRYGGEWTEDAAKRALLAERLHANLLGRLQGEKRLLWLYEEVEKPLSRVLAHMEATGVKLDVAYLENLSLEVAAHMRRLEEEVFRLAGRSFRLNSRDQLERVLFDELGLPPIGKTEKTGKRSTSRAVLDALREVHPIVDKILQYRELAKLKGTYIDRLPALVHPKTGRLHTRFNQTATATGRLSSSDPNLQNIPVRTPLGQKIRRAFVAEEGWRLVALDYRQIELRVLAHLSGDENLIRVFQEGKDIHTQTASWMFGLGAEAIDPLMRRAAKTINFGVLYGMSPFRLSQELGIPKEEAQAFIQKYFQSYPKVKAWIEKTLREGRTRGYVETLFGRRRYVPDLNARVKGKREAAERMAFNMPVQGTAADLMKLAMVRLFPQLREVGARMLLQVHDELLLEAPKERAEEVAALAKEVMEGVWPLAVPLEVEVGIGEDWLAAKG

SEQ ID NO: 4863 - DNA, 2523 bp, synthetic construct
  misc_feature 1..2523: note = Variant of DNA polymerase I from Thermus sp. strain 2.9
  source 1..2523: mol_type = other DNA
atgcaccatcatcatcatcatggcggtagcggcgtgttaccggtgttcgagcctaaaggtcgcgtgcttctggttgatggccatcatctcgcgtatcgtaacttctttgccctgaaaggattaaccaccagcctgggcgagccggtacagggtgtctacggctttgcaaagtcgctcctgaaagctctgaaagaagacggtgatgtggtgattgttgtctttgatgcgaaagcgccaagttttcgccacgaagcgtacgaagcttacaaagccgggcgtgctccaacgccggaagactttcctcgccaattggcgcttatgaaggaattagtggatttgcttggcctcgaacgcttggaagttcccggtttcgaggcagacgacgtattagcgactctcgcaaagaaagccgaacgtgagggctatgaagtccagatcttgacagcagatcgcgatcttttccagcttttatctccgcgcatctcggtgttacacccggaagggcatcgtatcaccccggaatggctctgggagaaatatggtttgcgtcccgaacaatgggtggattttcgcgccttagcaggcgatccgagcgacaatattccgggagttaaaggtatcggcgagaagacggcgctcaagctccttaaagaatgggggtcgttggagaacttgcttaagaatttagatcaggtcaaaccagagtcagtgcgtgagaagattcttgctcacctcgaagacctcaaattaagccgcgaattgtccgtggtacgcaccgatttgccgctcgaagttgatttcggtcgccgccgcgaacctgactgggagggtcttaaagcgtttttagagcgtcttgaatttggttcgctcttgcatgaattcggccttttagaaagcccgttactggccgaagaagcaccttggccaccgcccgagggcgcgtttttaggttaccgtttgagtcgcccggaaccgatgtgggccgaattactggctcttgcagcgtctgcccagggacgtgtgtatcgcgcggaagaccctcatggtgcgctccgcggcctcttcgaagtccgtggactccttgccaaagacttagctgttgttgcattgcgcgaaggtcttgatttacctccgactgatgatccaatgcttcttgcgtacctcttggacccgtcaaacacgacgcccgaaggcgtagcccgtcgttacggcggcgagtggaccgaagatgcagcgaaacgcgcgttattggccgaacgtttgcacgccaatttattaggacgtttgcaaggcgaggaacgtctcctctggctttacgaagaagtggagaaaccattgagtcgcgtgctcgcgcatatggaagctaccggtgtcaaattagacgtggcgtatttggagaatctcagccttgaagttgctgcccacatgcgccgcttggaggaagaagtattccgtttagcaggccgttcctttcgccttaactctcgcgatcagttagaacgtgtgttgttcgatgaacttggtctccctcctatcggcaagacagagaagaccggtaaacgtagcacttcagcggcggttttagaagctcttcgcgaagtccatcccattgtggacaagatcttgcagtaccgcgaactcgcgaaattgaaaggcacctatattgaccgtcttccggcattagtccacccgaaaacgggacgcctccatacccgcttcaaccaaacagccacggcgaccggtcgtttgtcctcctctgatccaaaccttcagaatattccagtacgtaccccattgggccagaagatccgccgtgcgtttgtagctgaggagggttggcgtttagtggccctcgattatcgtcaaattgaattacgtgtccttgcccatctttctggcgatgagaacctcatccgcgtgtttcaggaaggcaaagacattcacactcaaacggcaagctggatgtttggattatcagctgaagcgatcgatcctttgatgcgtcgtgcagcgaagaccatcaatttcggtgttctctacggtatgagtgcctttcgtttgtcgcaggaattaggcattccctatgaagaagctcaggcgttcattcagaaatactttcaaagctatcccaaagttaaagcatggatcgagaagactctccgtgaaggccgcacacgtggttacgtagagaccttatttggacgtcgccgctatgttcccgatttaaacgctcgcgtgaaaggcaagcgtgaagccgccgaacgcatggcgttcaacatgcctgtacagggcacggcagctgacctcatgaaacttgcaatggtgcgcctttttccacaattgcgtgaagttggtgcccgcatgctcttgcaggtccacgatgaactcttgttagaagcgccaaaagagcgtgcggaagaggtggcagccctcgcgaaagaagttatggaaggcgtgtggcccttagcggtgcctcttgaagtcgaagttggtattggcgaggattggctggctgccaaagga

SEQ ID NO: 4864 - protein, 841 aa, synthetic construct
  REGION 1..841: note = Variant of DNA polymerase I from Thermus sp. strain 2.9
MHHHHHHGGSGVLPVFEPKGRVLLVDGHHLAYRNFFALKGLTTSLGEPVQGVYGFAKSLLKALKEDGDVVIVVFDAKAPSFRHEAYEAYKAGRAPTPEDFPRQLALMKELVDLLGLERLEVPGFEADDVLATLAKKAEREGYEVQILTADRDLFQLLSPRISVLHPEGHRITPEWLWEKYGLRPEQWVDFRALAGDPSDNIPGVKGIGEKTALKLLKEWGSLENLLKNLDQVKPESVREKILAHLEDLKLSRELSVVRTDLPLEVDFGRRREPDWEGLKAFLERLEFGSLLHEFGLLESPLLAEEAPWPPPEGAFLGYRLSRPEPMWAELLALAASAQGRVYRAEDPHGALRGLFEVRGLLAKDLAVVALREGLDLPPTDDPMLLAYLLDPSNTTPEGVARRYGGEWTEDAAKRALLAERLHANLLGRLQGEERLLWLYEEVEKPLSRVLAHMEATGVKLDVAYLENLSLEVAAHMRRLEEEVFRLAGRSFRLNSRDQLERVLFDELGLPPIGKTEKTGKRSTSAAVLEALREVHPIVDKILQYRELAKLKGTYIDRLPALVHPKTGRLHTRFNQTATATGRLSSSDPNLQNIPVRTPLGQKIRRAFVAEEGWRLVALDYRQIELRVLAHLSGDENLIRVFQEGKDIHTQTASWMFGLSAEAIDPLMRRAAKTINFGVLYGMSAFRLSQELGIPYEEAQAFIQKYFQSYPKVKAWIEKTLREGRTRGYVETLFGRRRYVPDLNARVKGKREAAERMAFNMPVQGTAADLMKLAMVRLFPQLREVGARMLLQVHDELLLEAPKERAEEVAALAKEVMEGVWPLAVPLEVEVGIGEDWLAAKG

SEQ ID NO: 4865 - DNA, 2523 bp, synthetic construct
  misc_feature 1..2523: note = Variant of DNA polymerase I from Thermus sp. strain 2.9
  source 1..2523: mol_type = other DNA
atgcaccatcatcatcatcatggcggtagcggcgtgttaccggtgttcgagcataaaggtcgcgtgcttctggttgatggccatcatctcgcgtatcgtaacttctttgccctgaaaggattaaccaccagcctgggcgagccggtacagggtgtctacggctttgcaaagtcgctcctgaaagctctgaaagaagacggtgatgtggtgattgttgtctttgatgcgaaagcgccaagttttcgccacgaagcgtacgaagcttacaaagccgggcgtgctccaacgccggaagactttcctcgccaattggctcttatgaaggaattagtggatttgcttggcctcgaacgcttggaagttcccggtttcgaggcagacgacgtattagcgactctcgcaaagaaagccgaagatgagggctatgaagtccagatcttgacagcagatcgcgatcttttccagcttttatctccgcgcatctcggtgttacacccggaagggcatcgtatcaccccggaatggctctgggagaaatatggtttgcgtcccgaacaatgggtggattttcgcgccttagcaggcgataagagcgacaatattccgggagttaaaggtatcggcgagaagacggcgctcaagctccttaaagaatgggggtcgttggagaacttgcttaagaatttagatcaggtcaaaccagagtcagtgcgtgagaagattcttgctcacctcgaagacctcgagttaagccgcgaattgtcccgtgtacgcaccgatttgccgctcgaagttgatttcggtcgccgccgcgaacctgactgggagggtcttaaagcgtttttagagcgtcttgaatttggttcgctcttgcatgaattcggccttttagaaaacccgttagtggccgaagaagcaccttggccaccgcccgagggcgcgtttttaggttaccgtttgagtcgcccggaaccgatgtgggccgaattactggctcttgcagcgtctgcccagggacgtgtgtatcgcgcggaagaccctcatggtgcgctccgcggcctcttcgaagtccgtggactccttgccaaagacttagctgttgttgcattgcgcgaaggtcttgatttacctccgactgatgatccaatgcttcttgcgtacctcttggacccgtcaaacacgacgcccgaaggcgtagcccgtcgttacggcggcgagtggaccgaagatgcagcgaaacgcgcgttattggccgaacgtttgcacgcgaatttactgggacgtttgcaaggcgagaagcgtctcctctggctttacgaagaagtggagaaaccattgagtcgcgtgctcgcgcatatggaagctaccggtgtcaaattagacgtggcgtatttggagaatctcagccttgaagttgctgcccacatgcgccgcttggaggaagaagtattccgtttagcaggccgttcctttcgccttaactctcgcgatcagttagaacgtgtgttgttcgatgaacttggtctccctcctatcggcaagacagagaagaccggtaaacgtagcacttcagcggcggttttagaagctcttcgcgaagtccatcccattgtggacaagatcttgcagtaccgcgaaatggcgaaattgaaaggcacctatattgaccgtcttccggcattagtccacccgaaaacgggacgcctccatacccgcttcaaccaaacagccacggcgaccggtcgtttgtcctcctctgatccaaaccttcagaatattccagtacgtaccccattgggccagaagatccgccgtgcgtttgtagctgaggagggttggcgtttagtggccctcgattatcgtcaaattgaattacgtgtccttgcccatctttctggcgatgagaacctcatccgcgtgtttgaagaaggcaaagacattcacactcaaacggcaagctggatgtttggattaggcgctgaagcgatcgatcctttgatgcgtcgtgcagcgaagaccatcaatttcggtgttctctacggtatgagtgcctttcgtttgtcgcaggagttaggcattcccaaagaagaagctcaggcgttcattcagaaatactttcaaagctatcccaaagttaaagcatggatcgagaagactctccgtgaaggccgcacacgtggttacgtagagaccttatttggacgtcgccgctatgttcccgatttaaacggccgcgtgaaaggcaagcgtgaagccgccgaacgcatggcgttcaacatgcctgtacagggcacggcagctgacctcatgaaacttgcaatggtgcgcctttttccacaattgcgtgaagttggtgcccgcatgctcttgcaggtccacgatgaactcttgttagaagcgccaaaagagcgtgcggaagaggtggcagccctcgcgaaagaagttatggaaggcgtgtggcccttagcggtgcctcttgaagtcgaagttggtattggcgaggattggctggctgccaaagga

SEQ ID NO: 4866 - protein, 841 aa, synthetic construct
  REGION 1..841: note = Variant of DNA polymerase I from Thermus sp. strain 2.9
MHHHHHHGGSGVLPVFEHKGRVLLVDGHHLAYRNFFALKGLTTSLGEPVQGVYGFAKSLLKALKEDGDVVIVVFDAKAPSFRHEAYEAYKAGRAPTPEDFPRQLALMKELVDLLGLERLEVPGFEADDVLATLAKKAEDEGYEVQILTADRDLFQLLSPRISVLHPEGHRITPEWLWEKYGLRPEQWVDFRALAGDKSDNIPGVKGIGEKTALKLLKEWGSLENLLKNLDQVKPESVREKILAHLEDLELSRELSRVRTDLPLEVDFGRRREPDWEGLKAFLERLEFGSLLHEFGLLENPLVAEEAPWPPPEGAFLGYRLSRPEPMWAELLALAASAQGRVYRAEDPHGALRGLFEVRGLLAKDLAVVALREGLDLPPTDDPMLLAYLLDPSNTTPEGVARRYGGEWTEDAAKRALLAERLHANLLGRLQGEKRLLWLYEEVEKPLSRVLAHMEATGVKLDVAYLENLSLEVAAHMRRLEEEVFRLAGRSFRLNSRDQLERVLFDELGLPPIGKTEKTGKRSTSAAVLEALREVHPIVDKILQYREMAKLKGTYIDRLPALVHPKTGRLHTRFNQTATATGRLSSSDPNLQNIPVRTPLGQKIRRAFVAEEGWRLVALDYRQIELRVLAHLSGDENLIRVFEEGKDIHTQTASWMFGLGAEAIDPLMRRAAKTINFGVLYGMSAFRLSQELGIPKEEAQAFIQKYFQSYPKVKAWIEKTLREGRTRGYVETLFGRRRYVPDLNGRVKGKREAAERMAFNMPVQGTAADLMKLAMVRLFPQLREVGARMLLQVHDELLLEAPKERAEEVAALAKEVMEGVWPLAVPLEVEVGIGEDWLAAKG

SEQ ID NO: 4867 - DNA, 2523 bp, synthetic construct
  misc_feature 1..2523: note = Variant of DNA polymerase I from Thermus sp. strain 2.9
  source 1..2523: mol_type = other DNA
atgcaccatcatcatcatcatggcggtagcggcgtgttaccggtgttcgagcctaaaggtcgcgtgcttctggttgatggccatcatctcgcgtatcgtaacttctttgccctgaaaggattaaccaccagcctgggcgagccggtacagggtgtctacggctttgcaaagtcgctcctgaaagctctgaaagaagacggtgatgtggtgattgttgtctttgatgcgaaagcgccaagttttcgccacgaagcgtacgaagcttacaaagccgggcgtgctccaacgccggaagactttcctcgccaattggcgcttatgaaggaattagtggatttgcttggcctcgaacgcttggaagttcccggtttcgaggcagacgacgtattagcgactctcgcaaagaaagccgaacgtgagggctatgaagtccagatcttgacagcagatcgcgatcttttccagcttttatctccgcgcatctcggtgttacacccggaagggcatcgtatcaccccggaatggctctgggagaaatatggtttgcgtcccgaacaatgggtggattttcgcgccttagcaggcgatccgagcgacaatattccgggagttaaaggtatcggcgagaagacggcgctcaagctccttaaagaatgggggtcgttggagaacttgcttaagaatttagatcaggtcaaaccagagtcagtgcgtgagaagattcttgctcacctcgaagacctcaaattaagccgcgaattgtcccgtgtacgcaccgatttgccgctcgaagttgatttcggtcgccgccgcgaacctgactgggagggtcttaaagcgtttttagagcgtcttgaatttggttcgctcttgcatgaattcggccttttagaaagcccgttactggccgaagaagcaccttggccaccgcccgagggcgcgtttttaggttaccgtttgagtcgcccggaaccgatgtgggccgaattactggctcttgcagcgtctgcccagggacgtgtgtatcgcgcggaagaccctcatggtgcgctccgcggcctcttcgaagtccgtggactccttgccaaagacttagctgttgttgcattgcgcgaaggtcttgatttacctccgactgatgatccaatgcttcttgcgtacctcttggacccgtcaaacacgacgcccgaaggcgtagcccgtcgttacggcggcgagtggaccgaagatgcagcgaaacgcgcgttattggccgaacgtttgcacgccaatttattaggacgtttgcaaggcgaggaacgtctcctctggctttacgaagaagtggagaaaccattgagtcgcgtgctcgcgcatatggaagctaccggtgtcaaattagacgtggcgtatttggagaatctcagccttgaagttgctgcccacatgcgccgcttggaggaagaagtattccgtttagcaggccgttcctttcgccttaactctcgcgatcagttagaacgtgtgttgttcgatgaacttggtctccctcctatcggcaagacagagaagaccggtaaacgtagcacttcagtggcggttttagaagctcttcgcgaagtccatcccattgtggacaagatcttgcagtaccgcgaactcgcgaaattgaaaggcacctatattgaccgtcttccggcattagtccacccgaaaacgggacgcctccatacccgcttcaaccaaacagccacggcgaccggtcgtttgtcctcctctgatccaaaccttcagaatattccagtacgtaccccattgggccagaagatccgccgtgcgtttgtagctgaggagggttggcgtttagtggccctcgattatcgtcaaattgaattacgtgtccttgcccatctttctggcgatgagaacctcatccgcgtgtttcaggaaggcaaagacattcacactcaaacggcaagctggatgtttggattatcagctgaagcgatcgatcctttgatgcgtcgtgcagcgaagaccatcaatttcggtgttctctacggtatgagtgcctttcgtttgtcgcaggaattaggcattccctatgaagaagctcaggcgttcattcagaaatactttcaaagctatcccaaagttaaagcatggatcgagaagactctccgtgaaggccgcacacgtggttacgtagagaccttatttggacgtcgccgctatgttcccgatttaaacgctcgcgtgaaaggcaagcgtgaagccgccgaacgcatggcgttcaacatgcctgtacagggcacggcagctgacctcatgaaacttgcaatggtgcgcctttttccacaattgcgtgaagttggtgcccgcatgctcttgcaggtccacgatgaactcttgttagaagcgccaaaagagcgtgcggaagaggtggcagccctcgcgaaagaagttatggaaggcgtgtggcccttagcggtgcctcttgaagtcgaagttggtattggcgaggattggctggctgccaaagga

SEQ ID NO: 4868 - protein, 841 aa, synthetic construct
  REGION 1..841: note = Variant of DNA polymerase I from Thermus sp. strain 2.9
MHHHHHHGGSGVLPVFEPKGRVLLVDGHHLAYRNFFALKGLTTSLGEPVQGVYGFAKSLLKALKEDGDVVIVVFDAKAPSFRHEAYEAYKAGRAPTPEDFPRQLALMKELVDLLGLERLEVPGFEADDVLATLAKKAEREGYEVQILTADRDLFQLLSPRISVLHPEGHRITPEWLWEKYGLRPEQWVDFRALAGDPSDNIPGVKGIGEKTALKLLKEWGSLENLLKNLDQVKPESVREKILAHLEDLKLSRELSRVRTDLPLEVDFGRRREPDWEGLKAFLERLEFGSLLHEFGLLESPLLAEEAPWPPPEGAFLGYRLSRPEPMWAELLALAASAQGRVYRAEDPHGALRGLFEVRGLLAKDLAVVALREGLDLPPTDDPMLLAYLLDPSNTTPEGVARRYGGEWTEDAAKRALLAERLHANLLGRLQGEERLLWLYEEVEKPLSRVLAHMEATGVKLDVAYLENLSLEVAAHMRRLEEEVFRLAGRSFRLNSRDQLERVLFDELGLPPIGKTEKTGKRSTSVAVLEALREVHPIVDKILQYRELAKLKGTYIDRLPALVHPKTGRLHTRFNQTATATGRLSSSDPNLQNIPVRTPLGQKIRRAFVAEEGWRLVALDYRQIELRVLAHLSGDENLIRVFQEGKDIHTQTASWMFGLSAEAIDPLMRRAAKTINFGVLYGMSAFRLSQELGIPYEEAQAFIQKYFQSYPKVKAWIEKTLREGRTRGYVETLFGRRRYVPDLNARVKGKREAAERMAFNMPVQGTAADLMKLAMVRLFPQLREVGARMLLQVHDELLLEAPKERAEEVAALAKEVMEGVWPLAVPLEVEVGIGEDWLAAKG

SEQ ID NO: 4869 - DNA, 2523 bp, synthetic construct
  misc_feature 1..2523: note = Variant of DNA polymerase I from Thermus sp. strain 2.9
  source 1..2523: mol_type = other DNA
atgcaccatcatcatcatcatggcggtagcggcgtgttaccggtgttcgagcctaaaggtcgcgtgcttctggttgatggccatcatctcgcgtatcgtaacttctttgccctgaaaggattaaccaccagcctgggcgagccggtacagggtgtctacggctttgcaaagtcgctcctgaaagctctgaaagaagacggtgatgtggtgattgttgtctttgatgcgaaagcgccaagttttcgccacgaagcgtacgaagcttacaaagccgggcgtgctccaacgccggaagactttcctcgccaattggcgcttatgaaggaattagtggatttgcttggcctcgaacgcttggaagttcccggtttcgaggcagacgacgtattagcgactctcgcaaagaaagccgaacgtgagggctatgaagtccagatcttgacagcagatcgcgatcttttccagcttttatctccgcgcatctcggtgttacacccggaagggcatcgtatcaccccggaatggctctgggagaaatatggtttgcgtcccgaacaatgggtggattttcgcgccttagcaggcgatccgagcgacaatattccgggagttaaaggtatcggcgagaagacggcgctcaagctccttaaagaatgggggtcgttggagaacttgcttaagaatttagatcaggtcaaaccagagtcagtgcgtgagaagattcttgctcacctcgaagacctcaaattaagccgcgaattgtcccgtgtacgcaccgatttgccgctcgaagttgatttcggtcgccgccgcgaacctgactgggagggtcttaaagcgtttttagagcgtcttgaatttggttcgctcttgcatgaattcggccttttagaaagcccgttactggccgaagaagcaccttggccaccgcccgagggcgcgtttttaggttaccgtttgagtcgcccggaaccgatgtgggccgaattactggctcttgcagcgtctgcccagggacgtgtgtatcgcgcggaagaccctcatggtgcgctccgcggcctcttcgaagtccgtggactccttgccaaagacttagctgttgttgcattgcgcgaaggtcttgatttacctccgactgatgatccaatgcttcttgcgtacctcttggacccgtcaaacacgacgcccgaaggcgtagcccgtcgttacggcggcgagtggaccgaagatgcagcgaaacgcgcgttattggccgaacgtttgcacgccaatttattaggacgtttgcaaggcgaggaacgtctcctctggctttacgaagaagtggagaaaccattgagtcgcgtgctcgcgcatatggaagctaccggtgtcaaattagacgtggcgtatttggagaatctcagccttgaagttgctgcccacatgcgccgcttggaggaagaagtattccgtttagcaggccgttcctttcgccttaactctcgcgatcagttagaacgtgtgttgttcgatgaacttggtctccctcctatcggcaagacagagaagaccggtaaacgtagcacttcagcggcggttttagaagctcttcgcgaagtccatcccattgtggacaagatcttgcagtaccgcgaactcgcgaaattgaaaggcacctatattgaccgtcttccggcattagtccacccgaaaacgggacgcctccatacccgcttcaaccaaacagccacggcgaccggtcgtttgtcctcctctgatccaaaccttcagaatattccagtacgtaccccattgggccagaagatccgccgtgcgtttgtagctgaggagggttggcgtttagtggccctcgattatcgtcaaattgaattacgtgtccttgcccatctttctggcgatgagaacctcatccgcgtgtttcaggaaggcaaagacattcacactcaaacggcaagctggatgtttggattatcagaggaagcgatcgatcctttgatgcgtcgtgcagcgaagaccatcaatttcggtgttctctacggtatgagtgcctttcgtttgtcgcaggaattaggcattccctatgaagaagctcaggcgttcattcagaaatactttcaaagctatcccaaagttaaagcatggatcgagaagactctccgtgaaggccgcacacgtggttacgtagagaccttatttggacgtcgccgctatgttcccgatttaaacgctcgcgtgaaaggcaagcgtgaagccgccgaacgcatggcgttcaacatgcctgtacagggcacggcagctgacctcatgaaacttgcaatggtgcgcctttttccacaattgcgtgaagttggtgcccgcatgctcttgcaggtccacgatgaactcttgttagaagcgccaaaagagcgtgcggaagaggtggcagccctcgcgaaagaagttatggaaggcgtgtggcccttagcggtgcctcttgaagtcgaagttggtattggcgaggattggctggctgccaaagga

SEQ ID NO: 4870 - protein, 841 aa, synthetic construct
  REGION 1..841: note = Variant of DNA polymerase I from Thermus sp. strain 2.9
MHHHHHHGGSGVLPVFEPKGRVLLVDGHHLAYRNFFALKGLTTSLGEPVQGVYGFAKSLLKALKEDGDVVIVVFDAKAPSFRHEAYEAYKAGRAPTPEDFPRQLALMKELVDLLGLERLEVPGFEADDVLATLAKKAEREGYEVQILTADRDLFQLLSPRISVLHPEGHRITPEWLWEKYGLRPEQWVDFRALAGDPSDNIPGVKGIGEKTALKLLKEWGSLENLLKNLDQVKPESVREKILAHLEDLKLSRELSRVRTDLPLEVDFGRRREPDWEGLKAFLERLEFGSLLHEFGLLESPLLAEEAPWPPPEGAFLGYRLSRPEPMWAELLALAASAQGRVYRAEDPHGALRGLFEVRGLLAKDLAVVALREGLDLPPTDDPMLLAYLLDPSNTTPEGVARRYGGEWTEDAAKRALLAERLHANLLGRLQGEERLLWLYEEVEKPLSRVLAHMEATGVKLDVAYLENLSLEVAAHMRRLEEEVFRLAGRSFRLNSRDQLERVLFDELGLPPIGKTEKTGKRSTSAAVLEALREVHPIVDKILQYRELAKLKGTYIDRLPALVHPKTGRLHTRFNQTATATGRLSSSDPNLQNIPVRTPLGQKIRRAFVAEEGWRLVALDYRQIELRVLAHLSGDENLIRVFQEGKDIHTQTASWMFGLSEEAIDPLMRRAAKTINFGVLYGMSAFRLSQELGIPYEEAQAFIQKYFQSYPKVKAWIEKTLREGRTRGYVETLFGRRRYVPDLNARVKGKREAAERMAFNMPVQGTAADLMKLAMVRLFPQLREVGARMLLQVHDELLLEAPKERAEEVAALAKEVMEGVWPLAVPLEVEVGIGEDWLAAKG

SEQ ID NO: 4871 - DNA, 2523 bp, synthetic construct
  misc_feature 1..2523: note = Variant of DNA polymerase I from Thermus sp. strain 2.9
  source 1..2523: mol_type = other DNA
atgcaccatcatcatcatcatggcggtagcggcgtgttaccggtgttcgagcctaaaggtcgcgtgcttctggttgatggccatcatctcgcgtatcgtaacttctttgccctgaaaggattaaccaccagcctgggcgagccggtacagggtgtctacggctttgcaaagtcgctcctgaaagctctgaaagaagacggtgatgtggtgattgttgtctttgatgcgaaagcgccaagttttcgccacgaagcgtacgaagcttacaaagccgggcgtgctccaacgccggaagactttcctcgccaattggcgcttatgaaggaattagtggatttgcttggcctcgaacgcttggaagttcccggtttcgaggcagacgacgtattagcgactctcgcaaagaaagccgaacgtgagggctatgaagtccagatcttgacagcagatcgcgatcttttccagcttttatctccgcgcatctcggtgttacacccggaagggcatcgtatctggccggaatggctctgggagaaatatggtttgcgtcccgaacaatgggtggattttcgcgccttagcaggcgatccgagcgacaatattccgggagttaaaggtatcggcgagaagacggcgctcaagctccttaaagaatgggggtcgttggagaacttgcttaagaatttagatcaggtcaaaccagagtcagtgcgtgagaagattcttgctcacctcgaagacctcaaattaagccgcgaattgtcccgtgtacgcaccgatttgccgctcgaagttgatttcggtcgccgccgcgaacctgactgggagggtcttaaagcgtttttagagcgtcttgaatttggttcgctcttgcatgaattcggccttttagaaagcccgttactggccgaagaagcaccttggccaccgcccgagggcgcgtttttaggttaccgtttgagtcgcccggaaccgatgtgggccgaattactggctcttgcagcgtctgcccagggacgtgtgtatcgcgcggaagaccctcatggtgcgctccgcggcctcttcgaagtccgtggactccttgccaaagacttagctgttgttgcattgcgcgaaggtcttgatttacctccgactgatgatccaatgcttcttgcgtacctcttggacccgtcaaacacgacgcccgaaggcgtagcccgtcgttacggcggcgagtggaccgaagatgcagcgaaacgcgcgttattggccgaacgtttgcacgccaatttattaggacgtttgcaaggcgaggaacgtctcctctggctttacgaagaagtggagaaaccattgagtcgcgtgctcgcgcatatggaagctaccggtgtcaaattagacgtggcgtatttggagaatctcagccttgaagttgctgcccacatgcgccgcttggaggaagaagtattccgtttagcaggccgttcctttcgccttaactctcgcgatcagttagaacgtgtgttgttcgatgaacttggtctccctcctatcggcaagacagagaagaccggtaaacgtagcacttcagcggcggttttagaagctcttcgcgaagtccatcccattgtggacaagatcttgcagtaccgcgaactcgcgaaattgaaaggcacctatattgaccgtcttccggcattagtccacccgaaaacgggacgcctccatacccgcttcaaccaaacagccacggcgaccggtcgtttgtcctcctctgatccaaaccttcagaatattccagtacgtaccccattgggccagaagatccgccgtgcgtttgtagctgaggagggttggcgtttagtggccctcgattatcgtcaaattgaattacgtgtccttgcccatctttctggcgatgagaacctcatccgcgtgtttcaggaaggcaaagacattcacactcaaacggcaagctggatgtttggattatcagctgaagcgatcgatcctttgatgcgtcgtgcagcgaagaccatcaatttcggtgttctctacggtatgagtgcctttcgtttgtcgcaggaattaggcattccctatgaagaagctcaggcgttcattcagaaatactttcaaagctatcccaaagttaaagcatggatcgagaagactctccgtgaaggccgcacacgtggttacgtagagaccttatttggacgtcgccgctatgttcccgatttaaacgctcgcgtgaaaggcaagcgtgaagccgccgaacgcatggcgttcaacatgcctgtacagggcacggcagctgacctcatgaaacttgcaatggtgcgcctttttccacaattgcgtgaagttggtgcccgcatgctcttgcaggtccacgatgaactcttgttagaagcgccaaaagagcgtgcggaagaggtggcagccctcgcgaaagaagttatggaaggcgtgtggcccttagcggtgcctcttgaagtcgaagttggtattggcgaggattggctggctgccaaagga

SEQ ID NO: 4872 - protein, 841 aa, synthetic construct
  REGION 1..841: note = Variant of DNA polymerase I from Thermus sp. strain 2.9
MHHHHHHGGSGVLPVFEPKGRVLLVDGHHLAYRNFFALKGLTTSLGEPVQGVYGFAKSLLKALKEDGDVVIVVFDAKAPSFRHEAYEAYKAGRAPTPEDFPRQLALMKELVDLLGLERLEVPGFEADDVLATLAKKAEREGYEVQILTADRDLFQLLSPRISVLHPEGHRIWPEWLWEKYGLRPEQWVDFRALAGDPSDNIPGVKGIGEKTALKLLKEWGSLENLLKNLDQVKPESVREKILAHLEDLKLSRELSRVRTDLPLEVDFGRRREPDWEGLKAFLERLEFGSLLHEFGLLESPLLAEEAPWPPPEGAFLGYRLSRPEPMWAELLALAASAQGRVYRAEDPHGALRGLFEVRGLLAKDLAVVALREGLDLPPTDDPMLLAYLLDPSNTTPEGVARRYGGEWTEDAAKRALLAERLHANLLGRLQGEERLLWLYEEVEKPLSRVLAHMEATGVKLDVAYLENLSLEVAAHMRRLEEEVFRLAGRSFRLNSRDQLERVLFDELGLPPIGKTEKTGKRSTSAAVLEALREVHPIVDKILQYRELAKLKGTYIDRLPALVHPKTGRLHTRFNQTATATGRLSSSDPNLQNIPVRTPLGQKIRRAFVAEEGWRLVALDYRQIELRVLAHLSGDENLIRVFQEGKDIHTQTASWMFGLSAEAIDPLMRRAAKTINFGVLYGMSAFRLSQELGIPYEEAQAFIQKYFQSYPKVKAWIEKTLREGRTRGYVETLFGRRRYVPDLNARVKGKREAAERMAFNMPVQGTAADLMKLAMVRLFPQLREVGARMLLQVHDELLLEAPKERAEEVAALAKEVMEGVWPLAVPLEVEVGIGEDWLAAKG

SEQ ID NO: 4873 - DNA, 2523 bp, synthetic construct
  misc_feature 1..2523: note = Variant of DNA polymerase I from Thermus sp. strain 2.9
  source 1..2523: mol_type = other DNA
atgcaccatcatcatcatcatggcggtagcggcgtgttaccggtgttcgagcataaaggtcgcgtgcttctggttgatggccatcatctcgcgtatcgtaacttctttgccctgaaaggattaaccaccagcctgggcgagccggtacagggtgtctacggctttgcaaagtcgctcctgaaagctctgaaagaagacggtgatgtggtgattgttgtctttgatgcgaaagcgccaagttttcgccacgaagcgtacgaagcttacaaagccgggcgtgctccaacgccggaagactttcctcgccaattggcgcttatgaaggaattagtggatttgcttggcctcgaacgcttggaagttcccggtttcgaggcagacgacgtattagcgactctcgcaaagaaagccgaacgtgagggctatgaagtccagatcttgacagcagatcgcgatcttttccagcttttatctccgcgcatctcggtgttacacccggaagggcatcgtatcaccccggaatggctctgggagaaatatggtttgcgtcccgaacaatgggtggattttcgcgccttagcaggcgatccgagcgacaatattccgggagttaaaggtatcggcgagaagacggcgctcaagctccttaaagaatgggggtcgttggagaacttgcttaagaatttagatcaggtcaaaccagagtcagtgcgtgagaagattcttgctcacctcgaagacctcaaattaagccgcgaattgtcccgtgtacgcaccgatttgccgctcgaagttgatttcggtcgccgccgcgaacctgactgggagggtcttaaagcgtttttagagcgtcttgaatttggttcgctccagcatgaattcggccttttagaaagcccgttactggccgaagaagcaccttggccaccgcccgagggcgcgtttttaggttaccgtttgagtcgcccggaaccgatgtgggccgaattactggctcttgcagcgtctgcccagggacgtgtgtatcgcgcggaagaccctcatggtgcgctccgcggcctcttcgaagtccgtggactccttgccaaagacttagctgttgttgcattgcgcgaaggtcttgatttacctccgactgatgatccaatgcttcttgcgtacctcttggacccgtcaaacacgacgcccgaaggcgtagcccgtcgttacggcggcgagtggaccgaagatgcagcgaaacgcgcgttattggccgaacgtttgcacgcaaatttattaggacgtttgcaaggcgaggaacgtctcctctggctttacgaagaagtggagaaaccattgagtcgcgtgctcgcgcatatggaagctaccggtgtcaaattagacgtggcgtatttggagaatctcagccttgaagttgctgcccacatgcgccgcttggaggaagaagtattccgtttagcaggccgttcctttcgccttaactctcgcgatcagttagaacgtgtgttgttcgatgaacttggtctccctcctatcggcaagacagagaagaccggtaaacgtagcacttcagcggcggttttagaagctcttcgcgaagtccatcccattgtggacaagatcttgcagtaccgcgaactcgcgaaattgaaaggcacctatattgaccgtcttccggcattagtccacccgaaaacgggacgcctccatacccgcttcaaccaaacagccacggcgaccggtcgtttgtcctcctctgatccaaaccttcagaatattccagtacgtaccccattgggccagaagatccgccgtgcgtttgtagctgaggagggttggcgtttagtggccctcgattatcgtcaaattgaattacgtgtccttgcccatctttctggcgatgagaacctcatccgcgtgtttcaggaaggcaaagacattcacactcaaacggcaagctggatgtttggattaggtgctgaagcgatcgatcctttgatgcgtcgtgcagcgaagaccatcaatttcggtgttctctacggtatgagtgcctttcgtttgtcgcaggaattaggcattccctatgaagaagctcaggcgttcattcagaaatactttcaaagctatcccaaagttaaagcatggatcgagaagactctccgtgaaggccgcacacgtggttacgtagagaccttatttggacgtcgccgctatgttcccgatttaaacgctcgcgtgaaaggcaagcgtgaagccgccgaacgcatggcgttcaacatgcctgtacagggcacggcagctgacctcatgaaacttgcaatggtgcgcctttttccacaattgcgtgaagttggtgcccgcatgctcttgcaggtccacgatgaactcttgttagaagcgccaaaagagcgtgcggaagaggtggcagccctcgcgaaagaagttatggaaggcgtgtggcccttagcggtgcctcttgaagtcgaagttggtattggcgaggattggctggctgccaaagga

SEQ ID NO: 4874 - protein, 841 aa, synthetic construct
  REGION 1..841: note = Variant of DNA polymerase I from Thermus sp. strain 2.9
MHHHHHHGGSGVLPVFEHKGRVLLVDGHHLAYRNFFALKGLTTSLGEPVQGVYGFAKSLLKALKEDGDVVIVVFDAKAPSFRHEAYEAYKAGRAPTPEDFPRQLALMKELVDLLGLERLEVPGFEADDVLATLAKKAEREGYEVQILTADRDLFQLLSPRISVLHPEGHRITPEWLWEKYGLRPEQWVDFRALAGDPSDNIPGVKGIGEKTALKLLKEWGSLENLLKNLDQVKPESVREKILAHLEDLKLSRELSRVRTDLPLEVDFGRRREPDWEGLKAFLERLEFGSLQHEFGLLESPLLAEEAPWPPPEGAFLGYRLSRPEPMWAELLALAASAQGRVYRAEDPHGALRGLFEVRGLLAKDLAVVALREGLDLPPTDDPMLLAYLLDPSNTTPEGVARRYGGEWTEDAAKRALLAERLHANLLGRLQGEERLLWLYEEVEKPLSRVLAHMEATGVKLDVAYLENLSLEVAAHMRRLEEEVFRLAGRSFRLNSRDQLERVLFDELGLPPIGKTEKTGKRSTSAAVLEALREVHPIVDKILQYRELAKLKGTYIDRLPALVHPKTGRLHTRFNQTATATGRLSSSDPNLQNIPVRTPLGQKIRRAFVAEEGWRLVALDYRQIELRVLAHLSGDENLIRVFQEGKDIHTQTASWMFGLGAEAIDPLMRRAAKTINFGVLYGMSAFRLSQELGIPYEEAQAFIQKYFQSYPKVKAWIEKTLREGRTRGYVETLFGRRRYVPDLNARVKGKREAAERMAFNMPVQGTAADLMKLAMVRLFPQLREVGARMLLQVHDELLLEAPKERAEEVAALAKEVMEGVWPLAVPLEVEVGIGEDWLAAKG

SEQ ID NO: 4875 - DNA, 2523 bp, synthetic construct
  misc_feature 1..2523: note = Variant of DNA polymerase I from Thermus sp. strain 2.9
  source 1..2523: mol_type = other DNA
atgcaccatcatcatcatcatggcggtagcggcgtgttaccggtgttcgagcctaaaggtcgcgtgcttctggttgatggccatcatctcgcgtatcgtaacttctttgccctgaaaggattaaccaccagcctgggcgagccggtacagggtgtctacggctttgcaaagtcgctcctgaaagctctgaaagaagacggtgatgtggtgattgttgtctttgatgcgaaagcgccaagttttcgccacgaagcgtacgaagcttacaaagccgggcgtgctccaacgccggaagactttcctcgccaattggcgcttatgaaggaattagtggatttgcttggcctcgaacgcttggaagttcccggtttcgaggcagacgacgtattagcgactctcgcaaagaaagccgaacgtgagggctatgaagtccagatcttgacagcagatcgcgatcttttccagcttttatctccgcgcatctcggtgttacacccggaagggcatcgtatcaccccggaatggctctgggagaaatatggtttgcgtcccgaacaatgggtggattttcgcgccttagcaggcgatccgagcgacaatattccgggagttaaaggtatcggcgagaagacggcgctcaagctccttaaagaatgggggtcgttggagaacttgcttaagaatttagatcaggtcaaaccagagtcagtgcgtgagaagattcttgctcacctcgaagacctcaaattaagccgcgaattgtcccgtgtacgcaccgatttgccgctcgaagttgatttcggtcgccgccgcgaacctgactgggagggtcttaaagcgtttttagagcgtcttgaatttggttcgctcttgcatgaattcggccttttagaaagcccgttactggccgaagaagcaccttggccaccgcccgagggcgcgtttttaggttaccgtttgagtcgcccggaaccgatgtgggccgaattactggctcttgcagcgtctgcccagggacgtgtgtatcgcgcggaagaccctcatggtgcgctccgcggcctcttcgaagtccgtggactccttgccaaagacttagctgttgttgcattgcgcgaaggtcttgatttacctccgactgatgatccaatgcttcttgcgtacctcttggacccgtcaaacacgacgcccgaaggcgtagcccgtcgttacggcggcgagtggaccgaagatgcagcgaaacgcgcgttattggccgaacgtttgcacgccaatttattaggacgtttgcaaggcgaggaacgtctcctctggctttacgaagaagtggagaaaccattgagtcgcgtgctcgcgcatatggaagctaccggtgtcaaattagacgtggcgtatttggagaatctcagccttgaagttgctgcccacatgcgccgcttggaggaagaagtattccgtttagcaggccgttcctttcgccttaactctcgcgatcagttagaacgtgtgttgttcgatgaacttggtctccctcctatcggcaagacagagaagaccggtaaacgtagcacttcagcggcggttttagaagctcttcgcaatgtccatcccattgtggacaagatcttgcagtaccgcgaactcgcgaaattgaaaggcacctatattgaccgtcttccggcattagtccacccgaaaacgggacgcctccatacccgcttcaaccaaacagccacggcgaccggtcgtttgtcctcctctgatccaaaccttcagaatattccagtacgtaccccattgggccagaagatccgccgtgcgtttgtagctgaggagggttggcgtttagtggccctcgattatcgtcaaattgaattacgtgtccttgcccatctttctggcgatgagaacctcatccgcgtgtttcaggaaggcaaagacattcacactcaaacggcaagctggatgtttggattatcagctgaagcgatcgatcctttgatgcgtcgtgcagcgaagaccatcaatttcggtgttctctacggtatgagtgcctttcgtttgtcgcaggaattaggcattccctatgaagaagctcaggcgttcattcagaaatactttcaaagctatcccaaagttaaagcatggatcgagaagactctccgtgaaggccgcacacgtggttacgtagagaccttatttggacgtcgccgctatgttcccgatttaaacgctcgcgtgaaaggcaagcgtgaagccgccgaacgcatggcgttcaacatgcctgtacagggcacggcagctgacctcatgaaacttgcaatggtgcgcctttttccacaattgcgtgaagttggtgcccgcatgctcttgcaggtccacgatgaactcttgttagaagcgccaaaagagcgtgcggaagaggtggcagccctcgcgaaagaagttatggaaggcgtgtggcccttagcggtgcctcttgaagtcgaagttggtattggcgaggattggctggctgccaaagga

SEQ ID NO: 4876 - protein, 841 aa, synthetic construct
  REGION 1..841: note = Variant of DNA polymerase I from Thermus sp. strain 2.9
MHHHHHHGGSGVLPVFEPKGRVLLVDGHHLAYRNFFALKGLTTSLGEPVQGVYGFAKSLLKALKEDGDVVIVVFDAKAPSFRHEAYEAYKAGRAPTPEDFPRQLALMKELVDLLGLERLEVPGFEADDVLATLAKKAEREGYEVQILTADRDLFQLLSPRISVLHPEGHRITPEWLWEKYGLRPEQWVDFRALAGDPSDNIPGVKGIGEKTALKLLKEWGSLENLLKNLDQVKPESVREKILAHLEDLKLSRELSRVRTDLPLEVDFGRRREPDWEGLKAFLERLEFGSLLHEFGLLESPLLAEEAPWPPPEGAFLGYRLSRPEPMWAELLALAASAQGRVYRAEDPHGALRGLFEVRGLLAKDLAVVALREGLDLPPTDDPMLLAYLLDPSNTTPEGVARRYGGEWTEDAAKRALLAERLHANLLGRLQGEERLLWLYEEVEKPLSRVLAHMEATGVKLDVAYLENLSLEVAAHMRRLEEEVFRLAGRSFRLNSRDQLERVLFDELGLPPIGKTEKTGKRSTSAAVLEALRNVHPIVDKILQYRELAKLKGTYIDRLPALVHPKTGRLHTRFNQTATATGRLSSSDPNLQNIPVRTPLGQKIRRAFVAEEGWRLVALDYRQIELRVLAHLSGDENLIRVFQEGKDIHTQTASWMFGLSAEAIDPLMRRAAKTINFGVLYGMSAFRLSQELGIPYEEAQAFIQKYFQSYPKVKAWIEKTLREGRTRGYVETLFGRRRYVPDLNARVKGKREAAERMAFNMPVQGTAADLMKLAMVRLFPQLREVGARMLLQVHDELLLEAPKERAEEVAALAKEVMEGVWPLAVPLEVEVGIGEDWLAAKG

SEQ ID NO: 4877 - DNA, 2523 bp, synthetic construct
  misc_feature 1..2523: note = Variant of DNA polymerase I from Thermus sp. strain 2.9
  source 1..2523: mol_type = other DNA
atgcaccatcatcatcatcatggcggtagcggcgtgttaccggtgttcgagcctaaaggtcgcgtgcttctggttgatggccatcatctcgcgtatcgtaacttctttgccctgaaaggattaaccaccagcctgggcgagccggtacagggtgtctacggctttgcaaagtcgctcctgaaagctctgaaagaagacggtgatgtggtgattgttgtctttgatgcgaaagcgccaagttttcgccacgaagcgtacgaagcttacaaagccgggcgtgctccaacgccggaagactttcctcgccaattggcgcttatgaaggaattagtggatttgcttggcctcgaacgcttggaagttcccggtttcgaggcagacgacgtattagcgactctcgcaaagaaagccgaacgtgagggctatgaagtccagatcttgacagcagatcgcgatcttttccagcttttatctccgcgcatctcggtgttacacccggaagggcatcgtatcaccccggaatggctctgggagaaatatggtttgcgtcccgaacaatgggtggattttcgcgccttagcaggcgatccgagcgacaatattccgggagttaaaggtatcggcgagaagacggcgctcaagctccttaaagaatgggggtcgttggagaacttgcttaagaatttagatcaggtcaaaccagagtcagtgcgtgagaagattcttgctcacctcgaagacctcaaattaagccgcgaattgtcccgtgtacgcaccgatttgccgctcgaagttgatttcggtcgccgccgcgaacctgactgggagggtcttaaagcgtttttagagcgtcttgaatttggttcgctcttgcatgaattcggccttttagaaagcccgttactggccgaagaagcaccttggccaccgcccgagggcgcgtttttaggttaccgtttgagtcgcccggaaccgatgtgggccgaattactggctcttgcagcgtctgcccagggacgtgtgtatcgcgcggaagaccctcatggtgcgctccgcggcctcttcgaagtccgtggactccttgccaaagacttagctgttgttgcattgcgcgaaggtcttgatttacctccgactgatgatccaatgcttcttgcgtacctcttggacccgtcaaacacgacgcccgaaggcgtagcccgtcgttacggcggcgagtggaccgaagatgcagcgaaacgcgcgttattggccgaacgtttgcacgccaatttattaggacgtttgcaaggcgaggaacgtctcctctggctttacgaagaagtggagaaaccattgagtcgcgtgctcgcgcatatggaagctaccggtgtcaaattagacgtggcgtatttggagaatctcagccttgaagttgctgcccacatgcgccgcttggaggaagaagtattccgtttagcaggccgttcctttcgccttaactctcgcgatcagttagaacgtgtgttgttcgatgaacttggtctccctcctatcggcaagacagagaagaccggtaaacgtagcacttcagcggcggttttagaagctcttcgcgaagtccatcccattgtggacaagatcttgcagtaccgcgaactcgcgaaattgaaaggcacctatattgaccgtcttccggcattagtccacccgaaaacgggacgcctccatacccgcttcaaccaaacagccacggcgaccggtcgtttgtcctcctctgatccaaaccttcagaatattccagtacgtaccccattgggccagaagatccgccgtgcgtttgtagctgaggagggttggcgtttagtggccctcgattatcgtcaaattgaattacgtgtccttgcccatctttctggcgatgagaacctcatccgcgtgtttcaggaaggcaaagacattcacactcaaacggcaagctggatgtttggattatcagctgaagcgatcgatcctttgatgcgtcgtgcagcgaagaccatcaatttcggtgttctctacggtatgagtgcctttcgtttgtcgcaggaattaggcattccctatgaagaagctcaggcgttcattcagaaatactttcaaagctatcccaaagttaaagcatggatcgagaagactctccgtgaaggccgcacacgtggtgcggtagagaccttatttggacgtcgccgctatgttcccgatttaaacgctcgcgtgaaaggcaagcgtgaagccgccgaacgcatggcgttcaacatgcctgtacagggcacggcagctgacctcatgaaacttgcaatggtgcgcctttttccacaattgcgtgaagttggtgcccgcatgctcttgcaggtccacgatgaactcttgttagaagcgccaaaagagcgtgcggaagaggtggcagccctcgcgaaagaagttatggaaggcgtgtggcccttagcggtgcctcttgaagtcgaagttggtattggcgaggattggctggctgccaaagga

SEQ ID NO: 4878 - protein, 841 aa, synthetic construct
  REGION 1..841: note = Variant of DNA polymerase I from Thermus sp. strain 2.9
MHHHHHHGGSGVLPVFEPKGRVLLVDGHHLAYRNFFALKGLTTSLGEPVQGVYGFAKSLLKALKEDGDVVIVVFDAKAPSFRHEAYEAYKAGRAPTPEDFPRQLALMKELVDLLGLERLEVPGFEADDVLATLAKKAEREGYEVQILTADRDLFQLLSPRISVLHPEGHRITPEWLWEKYGLRPEQWVDFRALAGDPSDNIPGVKGIGEKTALKLLKEWGSLENLLKNLDQVKPESVREKILAHLEDLKLSRELSRVRTDLPLEVDFGRRREPDWEGLKAFLERLEFGSLLHEFGLLESPLLAEEAPWPPPEGAFLGYRLSRPEPMWAELLALAASAQGRVYRAEDPHGALRGLFEVRGLLAKDLAVVALREGLDLPPTDDPMLLAYLLDPSNTTPEGVARRYGGEWTEDAAKRALLAERLHANLLGRLQGEERLLWLYEEVEKPLSRVLAHMEATGVKLDVAYLENLSLEVAAHMRRLEEEVFRLAGRSFRLNSRDQLERVLFDELGLPPIGKTEKTGKRSTSAAVLEALREVHPIVDKILQYRELAKLKGTYIDRLPALVHPKTGRLHTRFNQTATATGRLSSSDPNLQNIPVRTPLGQKIRRAFVAEEGWRLVALDYRQIELRVLAHLSGDENLIRVFQEGKDIHTQTASWMFGLSAEAIDPLMRRAAKTINFGVLYGMSAFRLSQELGIPYEEAQAFIQKYFQSYPKVKAWIEKTLREGRTRGAVETLFGRRRYVPDLNARVKGKREAAERMAFNMPVQGTAADLMKLAMVRLFPQLREVGARMLLQVHDELLLEAPKERAEEVAALAKEVMEGVWPLAVPLEVEVGIGEDWLAAKG

SEQ ID NO: 4879 - DNA, 2523 bp, synthetic construct
  misc_feature 1..2523: note = Variant of DNA polymerase I from Thermus sp. strain 2.9
  source 1..2523: mol_type = other DNA
atgcaccatcatcatcatcatggcggtagcggcgtgttaccggtgttcgagcctaaaggtcgcgtgcttctggttgatggccatcatctcgcgtatcgtaacttctttgccctgaaaggattaaccaccagcctgggcgagccggtacagggtgtctacggctttgcaaagtcgctcctgaaagctctgaaagaagacggtgatgtggtgattgttgtctttgatgcgaaagcgccaagttttcgccacgaagcgtacgaagcttacaaagccgggcgtgctccaacgccggaagactttcctcgccaattggcgcttatgaaggaattagtggatttgcttggcctcgaacgcttggaagttcccggtttcgaggcagacgacgtattagcgactctcgcaaagaaagccgaacgtgagggctatgaagtccagatcttgacagcagatcgcgatcttttccagcttttatctccgcgcatctcggtgttacacccggaagggcatcgtatcaccccggaatggctctgggagaaatatggtttgcgtcccgaacaatgggtggattttcgcgccttagcaggcgatccgagcgacaatattccgggagttaaaggtatcggcgagaagacggcgctcaagctccttaaagaatgggggtcgttggagaacttgcttaagaatttagatcaggtcaaaccagagtcagtgcgtgagaagattcttgctcacctcgaagacctcaaattaagccgcgaattgtcccgtgtacgcaccgatttgccgctcgaagttgatttcggtcgccgccgcgaacctgactgggagggtcttaaagcgtttttagagcgtcttgaatttggttcgctcttgcatgaattcggccttttagaaagcccgttactggccgaagaagcaccttggccaccgcccgagggcgcgtttttaggttaccgtttgagtcgcccggaaccgatgtgggccgaattactggctcttgcagcgtctgcccagggacgtgtgtatcgcgcggaagaccctcatggtgcgctccgcggcctcttcgaagtccgtggactccttgccaaagacttagctgttgttgcattgcgcgaaggtcttgatttacctccgactgatgatccaatgcttcttgcgtacctcttggacccgtcaaacacgacgcccgaaggcgtagcccgtcgttacggcggcgagtggaccgaagatgcagcgaaacgcgcgttattggccgaacgtttgcacgccaatttattaggacgtttgcaaggcgaggaacgtctcctctggctttacgaagaagtggagaaaccattgagtcgcgtgctcgcgcatatggaagctaccggtgtcaaattagacgtggcgtatttggagaatctcagccttgaagttgctgcccacatgcgccgcttggaggaagaagtattccgtttagcaggccgttcctttcgccttaactctcgcgatcagttagaacgtgtgttgttcgatgaacttggtctccctcctatcggcaagacagagaagaccggtaaacgtagcacttcagcggcggttttagaagctcttcgcgaagtccatcccattgtggacaagatcttgcagtaccgcgaactcgcgaaattgaaaggcacctatattgaccgtcttccggcattagtccacccgaaaacgggacgcctccatacccgcttcaaccaaacagccacggcgaccggtcgtttgtcctcctctgatccaaaccttcagaatattccagtacgtaccccattgggccagaagatccgccgtgcgtttgtagctgaggagggttggcgtttagtggccctcgattatcgtcaaattgaattacgtgtccttgcccatctttctggcgatgagaacctcatccgcgtgtttcaggaaggcaaagacattcacactcaaacggcaagctggatgtttggattatcagctgaagcgatcgatcctttgatgcgtcgtgcagcgaagaccatcaatttcggtgttctctacggtatgagtgcctttcgtttgtcgcaggaattaggcattccctatgaagaagctcaggcgttcattccgaaatactttcaaagctatcccaaagttaaagcatggatcgagaagactctccgtgaaggccgcacacgtggttacgtagagaccttatttggacgtcgccgctatgttcccgatttaaacgctcgcgtgaaaggcaagcgtgaagccgccgaacgcatggcgttcaacatgcctgtacagggcacggcagctgacctcatgaaacttgcaatggtgcgcctttttccacaattgcgtgaagttggtgcccgcatgctcttgcaggtccacgatgaactcttgttagaagcgccaaaagagcgtgcggaagaggtggcagccctcgcgaaagaagttatggaaggcgtgtggcccttagcggtgcctcttgaagtcgaagttggtattggcgaggattggctggctgccaaagga

SEQ ID NO: 4880 - protein, 841 aa, synthetic construct
  REGION 1..841: note = Variant of DNA polymerase I from Thermus sp. strain 2.9
MHHHHHHGGSGVLPVFEPKGRVLLVDGHHLAYRNFFALKGLTTSLGEPVQGVYGFAKSLLKALKEDGDVVIVVFDAKAPSFRHEAYEAYKAGRAPTPEDFPRQLALMKELVDLLGLERLEVPGFEADDVLATLAKKAEREGYEVQILTADRDLFQLLSPRISVLHPEGHRITPEWLWEKYGLRPEQWVDFRALAGDPSDNIPGVKGIGEKTALKLLKEWGSLENLLKNLDQVKPESVREKILAHLEDLKLSRELSRVRTDLPLEVDFGRRREPDWEGLKAFLERLEFGSLLHEFGLLESPLLAEEAPWPPPEGAFLGYRLSRPEPMWAELLALAASAQGRVYRAEDPHGALRGLFEVRGLLAKDLAVVALREGLDLPPTDDPMLLAYLLDPSNTTPEGVARRYGGEWTEDAAKRALLAERLHANLLGRLQGEERLLWLYEEVEKPLSRVLAHMEATGVKLDVAYLENLSLEVAAHMRRLEEEVFRLAGRSFRLNSRDQLERVLFDELGLPPIGKTEKTGKRSTSAAVLEALREVHPIVDKILQYRELAKLKGTYIDRLPALVHPKTGRLHTRFNQTATATGRLSSSDPNLQNIPVRTPLGQKIRRAFVAEEGWRLVALDYRQIELRVLAHLSGDENLIRVFQEGKDIHTQTASWMFGLSAEAIDPLMRRAAKTINFGVLYGMSAFRLSQELGIPYEEAQAFIPKYFQSYPKVKAWIEKTLREGRTRGYVETLFGRRRYVPDLNARVKGKREAAERMAFNMPVQGTAADLMKLAMVRLFPQLREVGARMLLQVHDELLLEAPKERAEEVAALAKEVMEGVWPLAVPLEVEVGIGEDWLAAKG

SEQ ID NO: 4881 - DNA, 2523 bp, synthetic construct
  misc_feature 1..2523: note = Variant of DNA polymerase I from Thermus sp. strain 2.9
  source 1..2523: mol_type = other DNA
atgcaccatcatcatcatcatggcggtagcggcgtgttaccggtgttcgagcataaaggtcgcgtgcttctggttgatggccatcatctcgcgtatcgtaacttctttgccctgaaaggattaaccaccagcctgggcgagccggtacagggtgtctacggctttgcaaagtcgctcctgaaagctctgaaagaagacggtgatgtggtgattgttgtctttgatgcgaaagcgccaagttttcgccacgaagcgtacgaagcttacaaagccgggcgtgctccaacgccggaagactttcctcgccaattgtttcttatgaaggaattagtggatttgcttggcctcgaacgcttggaagttcccggtttcgaggcagacgacgtattagcgactctcgcaaagaaagccgaagatgagggctatgaagtccagatcttgacagcagatcgcgatcttttccagcttttatctccgcgcatctcggtgttacacccggaagggcatcgtatcaccccggaatggctctgggagaaatatggtttgcgtcccgaacaatgggtggattttcgcgccttagcaggcgataagagcgacaatattccgggagttaaaggtatcggcgagaagacggcgctcaagctccttaaagaatgggggtcgttggagaacttgcttaagaatttagatcaggtcaaaccagagtcagtgcgtgagaagattcttgctcacctcgaagacctcgagttaagccgcgaattgtcccgtgtacgcaccgatttgccgctcgaagttgatttcggtcgccgccgcgaacctgactgggagggtcttaaagcgtttttagagcgtcttgaatttggttcgctcttgcatgaattcggccttttagaaagcccgttactggccgaagaagcaccttggccaccgcccgagggcgcgtttttaggttaccgtttgagccgcccggaaccgatgtgggccgaattactggctcttgcagcgtctgcccagggacgtgtgtatcgcgcggaagaccctcatggtgcgctccgcggcctcttcgaagtccgtggactccttgccaaagacttagctgttgttgcattgcgcgaaggtcttgatttacctccgactgatgatccaatgcttcttgcgtacctcttggacccgtcaaacacgacgcccgaaggcgtagcccgtcgttacggcggcgagtggaccgaagatgcagcgaaacgcgcgttattggccgaacgtttgcacgcgaatttacgtggacgtttgcaaggcgaggaacgtctcctctggctttacgaagaagtggagaaaccattgagtcgcgtgctcgcgcatatggaagctaccggtgtcaaattagacgtggcgtatttggagaatctcagccttgaagttgctgcccacatgcgccgcttggaggaagaagtattccgtttagcaggccgttcctttcgccttaactctcgcgatcagttagaacgtgtgttgttcgatgaacttggtctccctcctatcggcaagacagagaagaccggtaaacgtagcacttcagcggcggttttagaagctcttcgcgaagtccatcccattgtggacaagatcttgcagtaccgcgaactcgcgaaattgaaaggcacctatattgaccgtcttccggcattagtccacccgaaaacgggacgcctccatacccgcttcaaccaaacagccacggcgaccggtcgtttgtcctcctctgatccaaaccttcagaatattccagtacgtaccaaattgggccagaagatccgccgtgcgtttgtagctgaggagggttggcgtttagtggccctcgattatcgtcaaattgaattacgtgtccttgcccatctttctggcgatgagaacctcatccgcgtgtttcaggaaggcaaagacattcacactcaaacggcaagctggatgtttggattatcagctgaagcgatcgatcctttgatgcgtcgtgcagcgaagacgatcaatttcggtgttctctacggtatgagtgcatttcgtttgtcgcaggaattaggcattccctatgaagaagctcaggcgttcattcagaaatactttcaaagctatcccaaagttaaagcatggatcgagaagactctccgtgaaggccgcacccgtggttacgtagagaccttatttggacgtcgccgctatgttcccgatttaaacgctcgcgtgaaaggcaagcgtgaagccgccgaacgcatggcgttcaacatgcctgtacagggcacggcagctgacctcatgaaacttgcaatggtgcgcctttttccacaattgcgtgaagttggtgcccgcatgctcttgcaggtccacgatgaactcttgttagaagcgccaaaagagcgtgcggaagaggtggcagccctcgcgaaagaagttatggaaggcgtgtggcccttagcggtgcctcttgaagtcgaagttggtattggcgaggattggctggctgccaaagga

SEQ ID NO: 4882 - protein, 841 aa, synthetic construct
  REGION 1..841: note = Variant of DNA polymerase I from Thermus sp. strain 2.9
MHHHHHHGGSGVLPVFEHKGRVLLVDGHHLAYRNFFALKGLTTSLGEPVQGVYGFAKSLLKALKEDGDVVIVVFDAKAPSFRHEAYEAYKAGRAPTPEDFPRQLFLMKELVDLLGLERLEVPGFEADDVLATLAKKAEDEGYEVQILTADRDLFQLLSPRISVLHPEGHRITPEWLWEKYGLRPEQWVDFRALAGDKSDNIPGVKGIGEKTALKLLKEWGSLENLLKNLDQVKPESVREKILAHLEDLELSRELSRVRTDLPLEVDFGRRREPDWEGLKAFLERLEFGSLLHEFGLLESPLLAEEAPWPPPEGAFLGYRLSRPEPMWAELLALAASAQGRVYRAEDPHGALRGLFEVRGLLAKDLAVVALREGLDLPPTDDPMLLAYLLDPSNTTPEGVARRYGGEWTEDAAKRALLAERLHANLRGRLQGEERLLWLYEEVEKPLSRVLAHMEATGVKLDVAYLENLSLEVAAHMRRLEEEVFRLAGRSFRLNSRDQLERVLFDELGLPPIGKTEKTGKRSTSAAVLEALREVHPIVDKILQYRELAKLKGTYIDRLPALVHPKTGRLHTRFNQTATATGRLSSSDPNLQNIPVRTKLGQKIRRAFVAEEGWRLVALDYRQIELRVLAHLSGDENLIRVFQEGKDIHTQTASWMFGLSAEAIDPLMRRAAKTINFGVLYGMSAFRLSQELGIPYEEAQAFIQKYFQSYPKVKAWIEKTLREGRTRGYVETLFGRRRYVPDLNARVKGKREAAERMAFNMPVQGTAADLMKLAMVRLFPQLREVGARMLLQVHDELLLEAPKERAEEVAALAKEVMEGVWPLAVPLEVEVGIGEDWLAAKG

SEQ ID NO: 4883 - DNA, 2523 bp, synthetic construct
  misc_feature 1..2523: note = Variant of DNA polymerase I from Thermus sp. strain 2.9
  source 1..2523: mol_type = other DNA
atgcaccatcatcatcatcatggcggtagcggcgtgttaccggtgttcgagcctaaaggtcgcgtgcttctggttgatggccatcatctcgcgtctcgtaacttctttgccctgaaaggattaaccaccagcctgggcgagccggtacagggtgtctacggctttgcaaagtcgctcctgaaagctctgaaagaagacggtgatgtggtgattgttgtctttgatgcgaaagcgccaagttttcgccacgaagcgtacgaagcttacaaagccgggcgtgctccaacgccggaagactttcctcgccaattggcgcttatgaaggaattagtggatttgcttggcctcgaacgcttggaagttcccggtttcgaggcagacgacgtattagcgactctcgcaaagaaagccgaacgtgagggctatgaagtccagatcttgacagcagatcgcgatcttttccagcttttatctccgcgcatctcggtgttacacccggaagggcatcgtatcaccccggaatggctctgggagaaatatggtttgcgtcccgaacaatgggtggattttcgcgccttagcaggcgatccgagcgacaatattccgggagttaaaggtatcggcgagaagacggcgctcaagctccttaaagaatgggggtcgttggagaacttgcttaagaatttagatcaggtcaaaccagagtcagtgcgtgagaagattcttgctcacctcgaagacctcaaattaagccgcgaattgtcccgtgtacgcaccgatttgccgctcgaagttgatttcggtcgccgccgcgaacctgactgggagggtcttaaagcgtttttagagcgtcttgaatttggttcgctcttgcatgaattcggccttttagaaagcccgttactggccgaagaagcaccttggccaccgcccgagggcgcgtttttaggttaccgtttgagtcgcccggaaccgatgtgggccgaattactggctcttgcagcgtctgcccagggacgtgtgtatcgcgcggaagaccctcatggtgcgctccgcggcctcttcgaagtccgtggactccttgccaaagacttagctgttgttgcattgcgcgaaggtcttgatttacctccgactgatgatccaatgcttcttgcgtacctcttggacccgtcaaacacgacgcccgaaggcgtagcccgtcgttacggcggcgagtggaccgaagatgcagcgaaacgcgcgttattggccgaacgtttgcacgccaatttattaggacgtttgcaaggcgaggaacgtctcctctggctttacgaagaagtggagaaaccattgagtcgcgtgctcgcgcatatggaagctaccggtgtcaaattagacgtggcgtatttggagaatctcagccttgaagttgctgcccacatgcgccgcttggaggaagaagtattccgtttagcaggccgttcctttcgccttaactctcgcgatcagttagaacgtgtgttgttcgatgaacttggtctccctcctatcggcaagacagagaagaccggtaaacgtagcacttcagcggcggttttagaagctcttcgcgaagtccatcccattgtggacaagatcttgcagtaccgcgaactcgcgaaattgaaaggcacctatattgaccgtcttccggcattagtccacccgaaaacgggacgcctccatacccgcttcaaccaaacagccacggcgaccggtcgtttgtcctcctctgatccaaaccttcagaatattccagtacgtaccccattgggccagaagatccgccgtgcgtttgtagctgaggagggttggcgtttagtggccctcgattatcgtcaaattgaattacgtgtccttgcccatctttctggcgatgagaacctcatccgcgtgtttcaggaaggcaaagacattcacactcaaacggcaagctggatgtttggattatcagctgaagcgatcgatcctttgatgcgtcgtgcagcgaagaccatcaatttcggtgttctctacggtatgagtgcctttcgtttgtcgcaggaattaggcattccctatgaagaagctcaggcgttcattcagaaatactttcaaagctatcccaaagttaaagcatggatcgagaagactctccgtgaaggccgcacacgtggttacgtagagaccttatttggacgtcgccgctatgttcccgatttaaacgctcgcgtgaaaggcaagcgtgaagccgccgaacgcatggcgttcaacatgcctgtacagggcacggcagctgacctcatgaaacttgcaatggtgcgcctttttccacaattgcgtgaagttggtgcccgcatgctcttgcaggtccacgatgaactcttgttagaagcgccaaaagagcgtgcggaagaggtggcagccctcgcgaaagaagttatggaaggcgtgtggcccttagcggtgcctcttgaagtcgaagttggtattggcgaggattggctggctgccaaagga

SEQ ID NO: 4884 - protein, 841 aa, synthetic construct
  REGION 1..841: note = Variant of DNA polymerase I from Thermus sp. strain 2.9
MHHHHHHGGSGVLPVFEPKGRVLLVDGHHLASRNFFALKGLTTSLGEPVQGVYGFAKSLLKALKEDGDVVIVVFDAKAPSFRHEAYEAYKAGRAPTPEDFPRQLALMKELVDLLGLERLEVPGFEADDVLATLAKKAEREGYEVQILTADRDLFQLLSPRISVLHPEGHRITPEWLWEKYGLRPEQWVDFRALAGDPSDNIPGVKGIGEKTALKLLKEWGSLENLLKNLDQVKPESVREKILAHLEDLKLSRELSRVRTDLPLEVDFGRRREPDWEGLKAFLERLEFGSLLHEFGLLESPLLAEEAPWPPPEGAFLGYRLSRPEPMWAELLALAASAQGRVYRAEDPHGALRGLFEVRGLLAKDLAVVALREGLDLPPTDDPMLLAYLLDPSNTTPEGVARRYGGEWTEDAAKRALLAERLHANLLGRLQGEERLLWLYEEVEKPLSRVLAHMEATGVKLDVAYLENLSLEVAAHMRRLEEEVFRLAGRSFRLNSRDQLERVLFDELGLPPIGKTEKTGKRSTSAAVLEALREVHPIVDKILQYRELAKLKGTYIDRLPALVHPKTGRLHTRFNQTATATGRLSSSDPNLQNIPVRTPLGQKIRRAFVAEEGWRLVALDYRQIELRVLAHLSGDENLIRVFQEGKDIHTQTASWMFGLSAEAIDPLMRRAAKTINFGVLYGMSAFRLSQELGIPYEEAQAFIQKYFQSYPKVKAWIEKTLREGRTRGYVETLFGRRRYVPDLNARVKGKREAAERMAFNMPVQGTAADLMKLAMVRLFPQLREVGARMLLQVHDELLLEAPKERAEEVAALAKEVMEGVWPLAVPLEVEVGIGEDWLAAKG

SEQ ID NO: 4885 - DNA, 2523 bp, synthetic construct
  misc_feature 1..2523: note = Variant of DNA polymerase I from Thermus sp. strain 2.9
  source 1..2523: mol_type = other DNA
atgcaccatcatcatcatcatggcggtagcggcgtgttaccggtgttcgagcctaaaggtcgcgtgcttctggttgatggccatcatctcgcgtatcgtaacttctttgccctgaaaggattaaccaccagcctgggcgagccggtacagggtgtctacggctttgcaaagtcgctcctgaaagctctgaaagaagacggtgatgtggtgattgttgtctttgatgcgaaagcgccaagttttcgccacgaagcgtacgaagcttacaaagccgggcgtgctccaacgccggaagactttcctcgccaattggcgcttatgaaggaattagtggatttgcttggcctcgaacgcttggaagttcccggtttcgaggcagacgacgtattagcgactctcgcaaagaaagccgaacgtgagggctatgaagtccagatcttgacagcagatcgcgatcttttccagcttttatctccgcgcatctcggtgttacacccggaagggcatcgtatcaccccggaatggctctgggagaaatatggtttgcgtcccgaacaatgggtggattttcgcgccttagcaggcgatccgagcgacaatattccgggagttaaaggtatcggcgagaagacggcgctcaagctccttaaagaatgggggtcgttggagaacttgcttaagaatttagatcaggtcaaaccagagtcagtgcgtgagaagattcttgctcacctcgaagacctcaaattaagccgcgaattgtcccgtgtacgcaccgatttgccgctcgaagttgatttcggtcgccgccgcgaacctgactgggagggtcttaaagcgtttttagagcgtcttgaatttggttcgctcttgcatgaattcggccttttagaaagcccgttactggccgaagaagcaccttggccaccgcccgagggcgcgtttttaggttaccgtttgagtcgcccggaaccgatgtgggccgaattactggctcttgcagcgtctgcccagggacgtgtgtatcgcgcggaagaccctcatggtgcgctccgcggcctcttcgaagtccgtggactccttgccaaagacttagctgttgttgcattgcgcgaaggtcttgatttacctccgactgatgatccaatgcttcttgcgtacctcttggacccgtcaaacacgacgcccgaaggcgtagcccgtcgttacggcggcgagtggaccgaagatgcagcgaaacgcgcgttattggccgaacgtttgcacgccaatttattaggacgtttgcaaggcgaggaacgtctcctctggctttacgaagaagtggagaaaccattgagtcgcgtgctcgcgcatatggaagctaccggtgtcaaattagacgtggcgtatttggagaatctcagccttgaagttgctgcccacatgcgccgcttggaggaagaagtattccgtttagcaggccgttcctttcgccttaactctcgcgatcagttagaacgtgtgttgttcgatgaacttggtctccctcctatcggcaagacagagaagaccggtaaacgtagcacttcagcggcggttttagaagctcttcgcgaagtccatcccattgtggacaagatcttgcagtaccgcgaactcgcgaaattgaaaggcttgtatattgaccgtcttccggcattagtccacccgaaaacgggacgcctccatacccgcttcaaccaaacagccacggcgaccggtcgtttgtcctcctctgatccaaaccttcagaatattccagtacgtaccccattgggccagaagatccgccgtgcgtttgtagctgaggagggttggcgtttagtggccctcgattatcgtcaaattgaattacgtgtccttgcccatctttctggcgatgagaacctcatccgcgtgtttcaggaaggcaaagacattcacactcaaacggcaagctggatgtttggattatcagctgaagcgatcgatcctttgatgcgtcgtgcagcgaagaccatcaatttcggtgttctctacggtatgagtgcctttcgtttgtcgcaggaattaggcattccctatgaagaagctcaggcgttcattcagaaatactttcaaagctatcccaaagttaaagcatggatcgagaagactctccgtgaaggccgcacacgtggttacgtagagaccttatttggacgtcgccgctatgttcccgatttaaacgctcgcgtgaaaggcaagcgtgaagccgccgaacgcatggcgttcaacatgcctgtacagggcacggcagctgacctcatgaaacttgcaatggtgcgcctttttccacaattgcgtgaagttggtgcccgcatgctcttgcaggtccacgatgaactcttgttagaagcgccaaaagagcgtgcggaagaggtggcagccctcgcgaaagaagttatggaaggcgtgtggcccttagcggtgcctcttgaagtcgaagttggtattggcgaggattggctggctgccaaagga

SEQ ID NO: 4886 - protein, 841 aa, synthetic construct
  REGION 1..841: note = Variant of DNA polymerase I from Thermus sp. strain 2.9
MHHHHHHGGSGVLPVFEPKGRVLLVDGHHLAYRNFFALKGLTTSLGEPVQGVYGFAKSLLKALKEDGDVVIVVFDAKAPSFRHEAYEAYKAGRAPTPEDFPRQLALMKELVDLLGLERLEVPGFEADDVLATLAKKAEREGYEVQILTADRDLFQLLSPRISVLHPEGHRITPEWLWEKYGLRPEQWVDFRALAGDPSDNIPGVKGIGEKTALKLLKEWGSLENLLKNLDQVKPESVREKILAHLEDLKLSRELSRVRTDLPLEVDFGRRREPDWEGLKAFLERLEFGSLLHEFGLLESPLLAEEAPWPPPEGAFLGYRLSRPEPMWAELLALAASAQGRVYRAEDPHGALRGLFEVRGLLAKDLAVVALREGLDLPPTDDPMLLAYLLDPSNTTPEGVARRYGGEWTEDAAKRALLAERLHANLLGRLQGEERLLWLYEEVEKPLSRVLAHMEATGVKLDVAYLENLSLEVAAHMRRLEEEVFRLAGRSFRLNSRDQLERVLFDELGLPPIGKTEKTGKRSTSAAVLEALREVHPIVDKILQYRELAKLKGLYIDRLPALVHPKTGRLHTRFNQTATATGRLSSSDPNLQNIPVRTPLGQKIRRAFVAEEGWRLVALDYRQIELRVLAHLSGDENLIRVFQEGKDIHTQTASWMFGLSAEAIDPLMRRAAKTINFGVLYGMSAFRLSQELGIPYEEAQAFIQKYFQSYPKVKAWIEKTLREGRTRGYVETLFGRRRYVPDLNARVKGKREAAERMAFNMPVQGTAADLMKLAMVRLFPQLREVGARMLLQVHDELLLEAPKERAEEVAALAKEVMEGVWPLAVPLEVEVGIGEDWLAAKG

SEQ ID NO: 4887 - DNA, 2523 bp, synthetic construct
  misc_feature 1..2523: note = Variant of DNA polymerase I from Thermus sp. strain 2.9
  source 1..2523: mol_type = other DNA
atgcaccatcatcatcatcatggcggtagcggcgtgttaccggtgttcgagcctaaaggtcgcgtgcttctggttgatggccatcatctcgcgtatcgtaacttctttgccctgaaaggattaaccaccagcctgggcgagccggtacagggtgtctacggctttgcaaagtcgctcctgaaagctctgaaagaagacggtgatgtggtgattgttgtctttgatgcgaaagcgccaagttttcgccacgaagcgtacgaagcttacaaagccgggcgtgctccaacgccggaagactttcctcgccaattggcgcttatgaaggaattagtggatttgcttggcctcgaacgcttggaagttcccggtttcgaggcagacgacgtattagcgactctcgcaaagaaagccgaacgtgagggctatgaagtccagatcttgacagcagatcgcgatcttttccagcttttatctccgcgcatctcggtgttacacccggaagggcatcgtatcaccccggaatggctctgggagaaatatggtttgcgtcccgaacaatgggtggattttcgcgccttagcaggcgatccgagcgacaatattccgggagttaaaggtatcggcgagaagacggcgctcaagctccttaaagaatgggggtcgttggagaacttgcttaagaatttagatcaggtcaaaccagagtcagtgcgtgagaagattcttgctcacctcgaagacctcaaattaagccgcgaattgtcccgtgtacgcaccgatttgccgctcgaagttgatttcggtcgccgccgcgaacctgactgggagggtcttaaagcgtttttagagcgtcttgaatttggttcgctcttgcatgaattcggccttttagaaagcccgttactggccgaagaagcaccttggccaccgcccgagggcgcgtttttaggttaccgtttgagtcgcccggaaccgatgtgggccgaattactggctcttgcagcgtctgcccagggacgtgtgtatcgcgcggaagaccctcatggtgcgctccgcggcctcttcgaagtccgtggactccttgccaaagacttagctgttgttgcattgcgcgaaggtcttgatttacctccgactgatgatccaatgcttcttgcgtacctcttggacccgtcaaacacgacgcccgaaggcgtagcccgtcgttacggcggcgagtggaccgaagatgcagcgaaacgcgcgttattggccgaacgtttgcacgccaatttattaggacgtttgcaaggcgaggaacgtctcctctggctttacgaagaagtggagaaaccattgagtcgcgtgctcgcgcatatggaagctaccggtgtcaaattagacgtggcgtatttggagaatctcagccttgaagttgctgcccacatgcgccgcttggaggaagaagtattccgtttagcaggccgttcctttcgccttaactctcgcgatcagttagaacgtgtgttgttcgatgaacttggtctccctcctatcggcaagacagagaagaccggtaaacgtagcacttcagcggcggttttagaagctcttcgcgaagtccatcccattgtggacaagatcttgcagtaccgcgaactcgcgaaattgaaaggcacctatattgaccgtcttccggcattagtccacccgaaaacgggacgcctccatacccgcactaaccaaacagccacggcgaccggtcgtttgtcctcctctgatccaaaccttcagaatattccagtacgtaccccattgggccagaagatccgccgtgcgtttgtagctgaggagggttggcgtttagtggccctcgattatcgtcaaattgaattacgtgtccttgcccatctttctggcgatgagaacctcatccgcgtgtttcaggaaggcaaagacattcacactcaaacggcaagctggatgtttggattatcagctgaagcgatcgatcctttgatgcgtcgtgcagcgaagaccatcaatttcggtgttctctacggtatgagtgcctttcgtttgtcgcaggaattaggcattccctatgaagaagctcaggcgttcattcagaaatactttcaaagctatcccaaagttaaagcatggatcgagaagactctccgtgaaggccgcacacgtggttacgtagagaccttatttggacgtcgccgctatgttcccgatttaaacgctcgcgtgaaaggcaagcgtgaagccgccgaacgcatggcgttcaacatgcctgtacagggcacggcagctgacctcatgaaacttgcaatggtgcgcctttttccacaattgcgtgaagttggtgcccgcatgctcttgcaggtccacgatgaactcttgttagaagcgccaaaagagcgtgcggaagaggtggcagccctcgcgaaagaagttatggaaggcgtgtggcccttagcggtgcctcttgaagtcgaagttggtattggcgaggattggctggctgccaaagga

SEQ ID NO: 4888 - protein, 841 aa, synthetic construct
  REGION 1..841: note = Variant of DNA polymerase I from Thermus sp. strain 2.9
MHHHHHHGGSGVLPVFEPKGRVLLVDGHHLAYRNFFALKGLTTSLGEPVQGVYGFAKSLLKALKEDGDVVIVVFDAKAPSFRHEAYEAYKAGRAPTPEDFPRQLALMKELVDLLGLERLEVPGFEADDVLATLAKKAEREGYEVQILTADRDLFQLLSPRISVLHPEGHRITPEWLWEKYGLRPEQWVDFRALAGDPSDNIPGVKGIGEKTALKLLKEWGSLENLLKNLDQVKPESVREKILAHLEDLKLSRELSRVRTDLPLEVDFGRRREPDWEGLKAFLERLEFGSLLHEFGLLESPLLAEEAPWPPPEGAFLGYRLSRPEPMWAELLALAASAQGRVYRAEDPHGALRGLFEVRGLLAKDLAVVALREGLDLPPTDDPMLLAYLLDPSNTTPEGVARRYGGEWTEDAAKRALLAERLHANLLGRLQGEERLLWLYEEVEKPLSRVLAHMEATGVKLDVAYLENLSLEVAAHMRRLEEEVFRLAGRSFRLNSRDQLERVLFDELGLPPIGKTEKTGKRSTSAAVLEALREVHPIVDKILQYRELAKLKGTYIDRLPALVHPKTGRLHTRTNQTATATGRLSSSDPNLQNIPVRTPLGQKIRRAFVAEEGWRLVALDYRQIELRVLAHLSGDENLIRVFQEGKDIHTQTASWMFGLSAEAIDPLMRRAAKTINFGVLYGMSAFRLSQELGIPYEEAQAFIQKYFQSYPKVKAWIEKTLREGRTRGYVETLFGRRRYVPDLNARVKGKREAAERMAFNMPVQGTAADLMKLAMVRLFPQLREVGARMLLQVHDELLLEAPKERAEEVAALAKEVMEGVWPLAVPLEVEVGIGEDWLAAKG

SEQ ID NO: 4889 - DNA, 2523 bp, synthetic construct
  misc_feature 1..2523: note = Variant of DNA polymerase I from Thermus sp. strain 2.9
  source 1..2523: mol_type = other DNA
atgcaccatcatcatcatcatggcggtagcggcgtgttaccggtgttcgagcctaaaggtcgcgtgcttctggttgatggccatcatctcgcgtatcgtaacttctttgccctgaaaggattaaccaccagcctgggcgagccggtacagggtgtctacggctttgcaaagtcgctcctgaaagctctgaaagaagacggtgatgtggtgattgttgtctttgatgcgaaagcgccaagttttcgccacgaagcgtacgaagcttacaaagccgggcgtgctccaacgccggaagactttcctcgccaattggcgcttatgaaggaattagtggatttgcttggcctcgaacgcttggaagttcccggtttcgaggcagacgacgtattagcgactctcgcaaagaaagccgaacgtgagggctatgaagtccagatcttgacagcagatcgcgatcttttccagcttttatctccgcgcatctcggtgttacacccggaagggcatcgtatcaccccggaatggctctgggagaaatatggtttgcgtcccgaacaatgggtggattttcgcgccttagcaggcgatccgagcgacaatattccgggagttaaaggtatcggcgagaagacggcgctcaagctccttaaagaatgggggtcgttggagaacttgcttaagaatttagatcaggtcaaaccagagtcagtgcgtgagaagattcttgctcacctcgaagacctcaaattaagccgcgaattgtcccgtgtacgcaccgatttgccgctcgaagttgatttcggtcgccgccgcgaacctgactgggagggtcttaaagcgtttttagagcgtcttgaatttggttcgctcttgcatgaattcggccttttagaaagcccgttactggccgaagaagcaccttggccaccgtgtgagggcgcgtttttaggttaccgtttgagtcgcccggaaccgatgtgggccgaattactggctcttgcagcgtctgcccagggacgtgtgtatcgcgcggaagaccctcatggtgcgctccgcggcctcttcgaagtccgtggactccttgccaaagacttagctgttgttgcattgcgcgaaggtcttgatttacctccgactgatgatccaatgcttcttgcgtacctcttggacccgtcaaacacgacgcccgaaggcgtagcccgtcgttacggcggcgagtggaccgaagatgcagcgaaacgcgcgttattggccgaacgtttgcacgccaatttattaggacgtttgcaaggcgaggaacgtctcctctggctttacgaagaagtggagaaaccattgagtcgcgtgctcgcgcatatggaagctaccggtgtcaaattagacgtggcgtatttggagaatctcagccttgaagttgctgcccacatgcgccgcttggaggaagaagtattccgtttagcaggccgttcctttcgccttaactctcgcgatcagttagaacgtgtgttgttcgatgaacttggtctccctcctatcggcaagacagagaagaccggtaaacgtagcacttcagcggcggttttagaagctcttcgcgaagtccatcccattgtggacaagatcttgcagtaccgcgaactcgcgaaattgaaaggcacctatattgaccgtcttccggcattagtccacccgaaaacgggacgcctccatacccgcttcaaccaaacagccacggcgaccggtcgtttgtcctcctctgatccaaaccttcagaatattccagtacgtaccccattgggccagaagatccgccgtgcgtttgtagctgaggagggttggcgtttagtggccctcgattatcgtcaaattgaattacgtgtccttgcccatctttctggcgatgagaacctcatccgcgtgtttcaggaaggcaaagacattcacactcaaacggcaagctggatgtttggattatcagctgaagcgatcgatcctttgatgcgtcgtgcagcgaagaccatcaatttcggtgttctctacggtatgagtgcctttcgtttgtcgcaggaattaggcattccctatgaagaagctcaggcgttcattcagaaatactttcaaagctatcccaaagttaaagcatggatcgagaagactctccgtgaaggccgcacacgtggttacgtagagaccttatttggacgtcgccgctatgttcccgatttaaacgctcgcgtgaaaggcaagcgtgaagccgccgaacgcatggcgttcaacatgcctgtacagggcacggcagctgacctcatgaaacttgcaatggtgcgcctttttccacaattgcgtgaagttggtgcccgcatgctcttgcaggtccacgatgaactcttgttagaagcgccaaaagagcgtgcggaagaggtggcagccctcgcgaaagaagttatggaaggcgtgtggcccttagcggtgcctcttgaagtcgaagttggtattggcgaggattggctggctgccaaagga

SEQ ID NO: 4890 - protein, 841 aa, synthetic construct
  REGION 1..841: note = Variant of DNA polymerase I from Thermus sp. strain 2.9
MHHHHHHGGSGVLPVFEPKGRVLLVDGHHLAYRNFFALKGLTTSLGEPVQGVYGFAKSLLKALKEDGDVVIVVFDAKAPSFRHEAYEAYKAGRAPTPEDFPRQLALMKELVDLLGLERLEVPGFEADDVLATLAKKAEREGYEVQILTADRDLFQLLSPRISVLHPEGHRITPEWLWEKYGLRPEQWVDFRALAGDPSDNIPGVKGIGEKTALKLLKEWGSLENLLKNLDQVKPESVREKILAHLEDLKLSRELSRVRTDLPLEVDFGRRREPDWEGLKAFLERLEFGSLLHEFGLLESPLLAEEAPWPPCEGAFLGYRLSRPEPMWAELLALAASAQGRVYRAEDPHGALRGLFEVRGLLAKDLAVVALREGLDLPPTDDPMLLAYLLDPSNTTPEGVARRYGGEWTEDAAKRALLAERLHANLLGRLQGEERLLWLYEEVEKPLSRVLAHMEATGVKLDVAYLENLSLEVAAHMRRLEEEVFRLAGRSFRLNSRDQLERVLFDELGLPPIGKTEKTGKRSTSAAVLEALREVHPIVDKILQYRELAKLKGTYIDRLPALVHPKTGRLHTRFNQTATATGRLSSSDPNLQNIPVRTPLGQKIRRAFVAEEGWRLVALDYRQIELRVLAHLSGDENLIRVFQEGKDIHTQTASWMFGLSAEAIDPLMRRAAKTINFGVLYGMSAFRLSQELGIPYEEAQAFIQKYFQSYPKVKAWIEKTLREGRTRGYVETLFGRRRYVPDLNARVKGKREAAERMAFNMPVQGTAADLMKLAMVRLFPQLREVGARMLLQVHDELLLEAPKERAEEVAALAKEVMEGVWPLAVPLEVEVGIGEDWLAAKG

SEQ ID NO: 4891 - DNA, 2523 bp, synthetic construct
  misc_feature 1..2523: note = Variant of DNA polymerase I from Thermus sp. strain 2.9
  source 1..2523: mol_type = other DNA
atgcaccatcatcatcatcatggcggtagcggcgtgttaccggtgttcgagcctaaaggtcgcgtgcttctggttgatggccatcatctcgcgtatcgtaacttctttgccctgaaaggattaaccaccagcctgggcgagccggtacagggtgtctacggctttgcaaagtcgctcctgaaagctctgaaagaagacggtgatgtggtgattgttgtctttgatgcgaaagcgccaagttttcgccacgaagcgtacgaagcttacaaagccgggcgtgctccaacgccggaagactttcctcgccaattggcgcttatgaaggaattagtggatttgcttggcctcgaacgcttggaagttcccggtttcgaggcagacgacgtattagcgactctcgcaaagaaagccgaacgtgagggctatgaagtccagatcttgacagcagatcgcgatcttttccagcttttatctccgcgcatctcggtgttacacccggaagggcatcgtatcaccccggaatggctctgggagaaatatggtttgcgtcccgaacaatgggtggattttcgcgccttagcaggcgatccgagcgacaatattccgggagttaaaggtatcggcgagaagacggcgctcaagctccttaaagaatgggggtcgttggagaacttgcttaagaatttagatcaggtcaaaccagagtcagtgcgtgagaagattcttgctcacctcgaagacctcaaattaagccgcgaattgtcccgtgtacgcaccgatttgccgctcgaagttgatttcggtcgccgccgcgaacctgactgggagggtcttaaagcgtttttagagcgtcttgaatttggttcgctcttgcatgaattcggccttttagaaagcccgttactggccgaagaagcaccttggccaccgcccgagggcgcgtttttaggttaccgtttgagtcgcccggaaccgatgtgggccgaattactggctcttgcagcgtctgcccagggacgtgtgtatcgcgcggaagaccctcatggtgcgctccgcggcctcttcgaagtccgtggactccttgccaaagacttagctgttgttgcattgcgcgaaggtcttgatttacctccgactgatgatccaatgcttcttgcgtacctcttggacccgtcaaacacgacgcccgaaggcgtagcccgtcgttacggcggcgagtggaccgaagatgcagcgaaacgcgcgttattggccgaacgtttgcacgccaatttattaggacgtttgcaaggcgaggaacgtctcctctggctttacgaagaagtggagaaaccattgagtcgcgtgctcgcgcatatggaagctaccggtgtcaaattagacgtggcgtatttggagaatctcagccttgaagttgctgcccacatgcgccgcttggaggaagaagtattccgtttagcaggccgttcctttcgccttaactctcgcgatcagttagaacgtgtgttgttcgatgaacttggtctccctcctatcggcaagacagagaagaccggtaaacgtagcacttcagcggcggttttagaagctcttcgcgaagtccatcccattgtggacaagatcttgcagtaccgcgaactcgcgaaattgaaaggcacctatattgaccgtcttccggcattagtccacccgaaaacgggaaagctccatacccgcttcaaccaaacagccacggcgaccggtcgtttgtcctcctctgatccaaaccttcagaatattccagtacgtaccccattgggccagaagatccgccgtgcgtttgtagctgaggagggttggcgtttagtggccctcgattatcgtcaaattgaattacgtgtccttgcccatctttctggcgatgagaacctcatccgcgtgtttcaggaaggcaaagacattcacactcaaacggcaagctggatgtttggattatcagctgaagcgatcgatcctttgatgcgtcgtgcagcgaagaccatcaatttcggtgttctctacggtatgagtgcctttcgtttgtcgcaggaattaggcattccctatgaagaagctcaggcgttcattcagaaatactttcaaagctatcccaaagttaaagcatggatcgagaagactctccgtgaaggccgcacacgtggttacgtagagaccttatttggacgtcgccgctatgttcccgatttaaacgctcgcgtgaaaggcaagcgtgaagccgccgaacgcatggcgttcaacatgcctgtacagggcacggcagctgacctcatgaaacttgcaatggtgcgcctttttccacaattgcgtgaagttggtgcccgcatgctcttgcaggtccacgatgaactcttgttagaagcgccaaaagagcgtgcggaagaggtggcagccctcgcgaaagaagttatggaaggcgtgtggcccttagcggtgcctcttgaagtcgaagttggtattggcgaggattggctggctgccaaagga

SEQ ID NO: 4892 - protein, 841 aa, synthetic construct
  REGION 1..841: note = Variant of DNA polymerase I from Thermus sp. strain 2.9
MHHHHHHGGSGVLPVFEPKGRVLLVDGHHLAYRNFFALKGLTTSLGEPVQGVYGFAKSLLKALKEDGDVVIVVFDAKAPSFRHEAYEAYKAGRAPTPEDFPRQLALMKELVDLLGLERLEVPGFEADDVLATLAKKAEREGYEVQILTADRDLFQLLSPRISVLHPEGHRITPEWLWEKYGLRPEQWVDFRALAGDPSDNIPGVKGIGEKTALKLLKEWGSLENLLKNLDQVKPESVREKILAHLEDLKLSRELSRVRTDLPLEVDFGRRREPDWEGLKAFLERLEFGSLLHEFGLLESPLLAEEAPWPPPEGAFLGYRLSRPEPMWAELLALAASAQGRVYRAEDPHGALRGLFEVRGLLAKDLAVVALREGLDLPPTDDPMLLAYLLDPSNTTPEGVARRYGGEWTEDAAKRALLAERLHANLLGRLQGEERLLWLYEEVEKPLSRVLAHMEATGVKLDVAYLENLSLEVAAHMRRLEEEVFRLAGRSFRLNSRDQLERVLFDELGLPPIGKTEKTGKRSTSAAVLEALREVHPIVDKILQYRELAKLKGTYIDRLPALVHPKTGKLHTRFNQTATATGRLSSSDPNLQNIPVRTPLGQKIRRAFVAEEGWRLVALDYRQIELRVLAHLSGDENLIRVFQEGKDIHTQTASWMFGLSAEAIDPLMRRAAKTINFGVLYGMSAFRLSQELGIPYEEAQAFIQKYFQSYPKVKAWIEKTLREGRTRGYVETLFGRRRYVPDLNARVKGKREAAERMAFNMPVQGTAADLMKLAMVRLFPQLREVGARMLLQVHDELLLEAPKERAEEVAALAKEVMEGVWPLAVPLEVEVGIGEDWLAAKG

SEQ ID NO: 4893 - DNA, 2523 bp, synthetic construct
  misc_feature 1..2523: note = Variant of DNA polymerase I from Thermus sp. strain 2.9
  source 1..2523: mol_type = other DNA
atgcaccatcatcatcatcatggcggtagcggcgtgttaccggtgttcgagcctaaaggtcgcgtgcttctggttgatggccatcatctcgcgtatcgtaacttctttgccctgaaaggattaaccaccagcctgggcgagccggtacagggtgtctacggctttgcaaagtcgctcctgaaagctctgaaagaagacggtgatgtggtgattgttgtctttgatgcgaaagcgccaagttttcgccacgaagcgtacgaagcttacaaagccgggcgtgctccaacgccggaagactttcctcgccaattggcgcttatgaaggaattagtggatttgcttggcctcgaacgcttggaagttcccggtttcgaggcagacgacgtattagcgactctcgcaaagaaagccgaacgtgagggctatgaagtccagatcttgacagcagatcgcgatcttttccagcttttatctccgcgcatctcggtgttacacccggaagggcatcgtatcaccccggaatggctctgggagaaatatggtttgcgtcccgaacaatgggtggattttcgcgccttagcaggcgatccgagcgacaatattccgggagttaaaggtatcggcgagaagacggcgctcaagctccttaaagaatgggggtcgttggagaacttgcttaagaatttagatcaggtcaaaccagagtcagtgcgtgagaagattcttgctcacctcgaagacctcaaattaagccgctgtttgtcccgtgtacgcaccgatttgccgctcgaagttgatttcggtcgccgccgcgaacctgactgggagggtcttaaagcgtttttagagcgtcttgaatttggttcgctcttgcatgaattcggccttttagaaagcccgttactggccgaagaagcaccttggccaccgcccgagggcgcgtttttaggttaccgtttgagtcgcccggaaccgatgtgggccgaattactggctcttgcagcgtctgcccagggacgtgtgtatcgcgcggaagaccctcatggtgcgctccgcggcctcttcgaagtccgtggactccttgccaaagacttagctgttgttgcattgcgcgaaggtcttgatttacctccgactgatgatccaatgcttcttgcgtacctcttggacccgtcaaacacgacgcccgaaggcgtagcccgtcgttacggcggcgagtggaccgaagatgcagcgaaacgcgcgttattggccgaacgtttgcacgccaatttattaggacgtttgcaaggcgaggaacgtctcctctggctttacgaagaagtggagaaaccattgagtcgcgtgctcgcgcatatggaagctaccggtgtcaaattagacgtggcgtatttggagaatctcagccttgaagttgctgcccacatgcgccgcttggaggaagaagtattccgtttagcaggccgttcctttcgccttaactctcgcgatcagttagaacgtgtgttgttcgatgaacttggtctccctcctatcggcaagacagagaagaccggtaaacgtagcacttcagcggcggttttagaagctcttcgcgaagtccatcccattgtggacaagatcttgcagtaccgcgaactcgcgaaattgaaaggcacctatattgaccgtcttccggcattagtccacccgaaaacgggacgcctccatacccgcttcaaccaaacagccacggcgaccggtcgtttgtcctcctctgatccaaaccttcagaatattccagtacgtaccccattgggccagaagatccgccgtgcgtttgtagctgaggagggttggcgtttagtggccctcgattatcgtcaaattgaattacgtgtccttgcccatctttctggcgatgagaacctcatccgcgtgtttcaggaaggcaaagacattcacactcaaacggcaagctggatgtttggattatcagctgaagcgatcgatcctttgatgcgtcgtgcagcgaagaccatcaatttcggtgttctctacggtatgagtgcctttcgtttgtcgcaggaattaggcattccctatgaagaagctcaggcgttcattcagaaatactttcaaagctatcccaaagttaaagcatggatcgagaagactctccgtgaaggccgcacacgtggttacgtagagaccttatttggacgtcgccgctatgttcccgatttaaacgctcgcgtgaaaggcaagcgtgaagccgccgaacgcatggcgttcaacatgcctgtacagggcacggcagctgacctcatgaaacttgcaatggtgcgcctttttccacaattgcgtgaagttggtgcccgcatgctcttgcaggtccacgatgaactcttgttagaagcgccaaaagagcgtgcggaagaggtggcagccctcgcgaaagaagttatggaaggcgtgtggcccttagcggtgcctcttgaagtcgaagttggtattggcgaggattggctggctgccaaagga

SEQ ID NO: 4894 - protein, 841 aa, synthetic construct
  REGION 1..841: note = Variant of DNA polymerase I from Thermus sp. strain 2.9
MHHHHHHGGSGVLPVFEPKGRVLLVDGHHLAYRNFFALKGLTTSLGEPVQGVYGFAKSLLKALKEDGDVVIVVFDAKAPSFRHEAYEAYKAGRAPTPEDFPRQLALMKELVDLLGLERLEVPGFEADDVLATLAKKAEREGYEVQILTADRDLFQLLSPRISVLHPEGHRITPEWLWEKYGLRPEQWVDFRALAGDPSDNIPGVKGIGEKTALKLLKEWGSLENLLKNLDQVKPESVREKILAHLEDLKLSRCLSRVRTDLPLEVDFGRRREPDWEGLKAFLERLEFGSLLHEFGLLESPLLAEEAPWPPPEGAFLGYRLSRPEPMWAELLALAASAQGRVYRAEDPHGALRGLFEVRGLLAKDLAVVALREGLDLPPTDDPMLLAYLLDPSNTTPEGVARRYGGEWTEDAAKRALLAERLHANLLGRLQGEERLLWLYEEVEKPLSRVLAHMEATGVKLDVAYLENLSLEVAAHMRRLEEEVFRLAGRSFRLNSRDQLERVLFDELGLPPIGKTEKTGKRSTSAAVLEALREVHPIVDKILQYRELAKLKGTYIDRLPALVHPKTGRLHTRFNQTATATGRLSSSDPNLQNIPVRTPLGQKIRRAFVAEEGWRLVALDYRQIELRVLAHLSGDENLIRVFQEGKDIHTQTASWMFGLSAEAIDPLMRRAAKTINFGVLYGMSAFRLSQELGIPYEEAQAFIQKYFQSYPKVKAWIEKTLREGRTRGYVETLFGRRRYVPDLNARVKGKREAAERMAFNMPVQGTAADLMKLAMVRLFPQLREVGARMLLQVHDELLLEAPKERAEEVAALAKEVMEGVWPLAVPLEVEVGIGEDWLAAKG

SEQ ID NO: 4895 - DNA, 2523 bp, synthetic construct
  misc_feature 1..2523: note = Variant of DNA polymerase I from Thermus sp. strain 2.9
  source 1..2523: mol_type = other DNA
atgcaccatcatcatcatcatggcggtagcggcgtgttaccggtgttcgagcctaaaggtcgcgtgcttctggttgatggccatcatctcgcgtatcgtaacttctttgccctgaaaggattaaccaccagcctgggcgagccggtacagggtgtctacggctttgcaaagtcgctcctgaaagctctgaaagaagacggtgatgtggtgattgttgtctttgatgcgaaagcgccaagttttcgccacgaagcgtacgaagcttacaaagccgggcgtgctccaacgccggaagactttcctcgccaattggcgcttatgaaggaattagtggatttgcttggcctcgaacgcttggaagttcccggtttcgaggcagacgacgtattagcgactctcgcaaagaaagccgaacgtgagggctatgaagtccagatcttgacagcagatcgcgatcttttccagcttttatctccgcgcatctcggtgttacacccggaagggcatcgtatcaccccggaatggctctgggagaaatatggtttgcgtcccgaacaatgggtggattttcgcgccttagcaggcgatccgagcgacaatattccgggagttaaaggtatcggcgagaagacggcgctcaagctccttaaagaatgggggtcgttggagaacttgcttaagaatttagatcaggtcaaaccagagtcagtgcgtgagaagattcttgctcacctcgaagacctcaaattaagccgcgaattgtcccgtgtacgcaccgatttgccgctcgaagttgatttcggtcgccgccgcgaacctgactgggagggtcttaaagcgtttttagagcgtcttgaatttggttcgctcttgcatgaattcggccttttagaaagcccgttactggccgaagaagcaccttggccaccgcccgagggcgcgtttttaggttaccgtttgagtcgcccggaaccgatgtgggccgaattactggctcttgcagcgtctgcccagggacgtgtgtatcgcgcggaagaccctcatggtgcgctccgcggcctcttcgaagtccgtggactccttgccaaagacttagctgttgttgcattgcgcgaaggtcttgatttacctccgactgatgatccaatgcttcttgcgtacctcttggacccgtcaaacacgacgcccgaaggcgtagcccgtcgttacggcggcgagtggaccgaagatgcagcgaaacgcgcgttattggccgaacgtttgcacgccaatttattaggacgtttgcaaggcgaggaacgtctcctctggctttacgaagaagtggagaaaccattgagtcgcgtgctcgcgcatatggaagctaccggtgtcaaattagacgtggcgtatttggagaatctcagccttgaagttgctgcccacatgcgccgcttggaggaagaagtattccgtttagcaggccgttcctttcgccttaactctcgcgatcagttagaacgtgtgttgttcgatgaacttggtctccctcctatcggcaagacagagaagaccggtaaacgtagcacttcagcggcggttttagaagctcttcgcgaagtccatcccattgtggacaagatcttgcagtaccgcgaactcgcgaaattgaaaggcacctatattgaccgtcttccggcattagtccacccgaaaacgggacgcctccatacccgcttcaaccaaacagccacggcgaccggtcgtttgtcctcctctgatccaaaccttcagaatattccagtacgtaccccattgggccagaagatccgccgtgcgtttgtagctgaggagggttggcgtttagtggccctcgattatcgtcaaattgaattacgtgtccttgcccatctttctggcgatgagaacctcatccgcgtgtttcaggaaggcaaagacattcacactcaaacggcaagctggatgtttggattatcatgggaagcgatcgatcctttgatgcgtcgtgcagcgaagaccatcaatttcggtgttctctacggtatgagtgcctttcgtttgtcgcaggaattaggcattccctatgaagaagctcaggcgttcattcagaaatactttcaaagctatcccaaagttaaagcatggatcgagaagactctccgtgaaggccgcacacgtggttacgtagagaccttatttggacgtcgccgctatgttcccgatttaaacgctcgcgtgaaaggcaagcgtgaagccgccgaacgcatggcgttcaacatgcctgtacagggcacggcagctgacctcatgaaacttgcaatggtgcgcctttttccacaattgcgtgaagttggtgcccgcatgctcttgcaggtccacgatgaactcttgttagaagcgccaaaagagcgtgcggaagaggtggcagccctcgcgaaagaagttatggaaggcgtgtggcccttagcggtgcctcttgaagtcgaagttggtattggcgaggattggctggctgccaaagga

SEQ ID NO: 4896 - protein, 841 aa, synthetic construct
  REGION 1..841: note = Variant of DNA polymerase I from Thermus sp. strain 2.9
MHHHHHHGGSGVLPVFEPKGRVLLVDGHHLAYRNFFALKGLTTSLGEPVQGVYGFAKSLLKALKEDGDVVIVVFDAKAPSFRHEAYEAYKAGRAPTPEDFPRQLALMKELVDLLGLERLEVPGFEADDVLATLAKKAEREGYEVQILTADRDLFQLLSPRISVLHPEGHRITPEWLWEKYGLRPEQWVDFRALAGDPSDNIPGVKGIGEKTALKLLKEWGSLENLLKNLDQVKPESVREKILAHLEDLKLSRELSRVRTDLPLEVDFGRRREPDWEGLKAFLERLEFGSLLHEFGLLESPLLAEEAPWPPPEGAFLGYRLSRPEPMWAELLALAASAQGRVYRAEDPHGALRGLFEVRGLLAKDLAVVALREGLDLPPTDDPMLLAYLLDPSNTTPEGVARRYGGEWTEDAAKRALLAERLHANLLGRLQGEERLLWLYEEVEKPLSRVLAHMEATGVKLDVAYLENLSLEVAAHMRRLEEEVFRLAGRSFRLNSRDQLERVLFDELGLPPIGKTEKTGKRSTSAAVLEALREVHPIVDKILQYRELAKLKGTYIDRLPALVHPKTGRLHTRFNQTATATGRLSSSDPNLQNIPVRTPLGQKIRRAFVAEEGWRLVALDYRQIELRVLAHLSGDENLIRVFQEGKDIHTQTASWMFGLSWEAIDPLMRRAAKTINFGVLYGMSAFRLSQELGIPYEEAQAFIQKYFQSYPKVKAWIEKTLREGRTRGYVETLFGRRRYVPDLNARVKGKREAAERMAFNMPVQGTAADLMKLAMVRLFPQLREVGARMLLQVHDELLLEAPKERAEEVAALAKEVMEGVWPLAVPLEVEVGIGEDWLAAKG

SEQ ID NO: 4897 - DNA, 2523 bp, synthetic construct
  misc_feature 1..2523: note = Variant of DNA polymerase I from Thermus sp. strain 2.9
  source 1..2523: mol_type = other DNA
atgcaccatcatcatcatcatggcggtagcggcgtgttaccggtgttcgagcctaaaggtcgcgtgcttctggttgatggccatcatctcgcgtatcgtaacttctttgccctgaaaggattaaccaccagcctgggcgagccggtacagggtgtctacggctttgcaaagtcgctcctgaaagctctgaaagaagacggtgatgtggtgattgttgtctttgatgcgaaagcgccaagttttcgccacgaagcgtacgaagcttacaaagccgggcgtgctccaacgccggaagactttcctcgccaattggcgcttatgaaggaattagtggatttgcttggcctcgaacgcttggaagttcccggtttcgaggcagacgacgtattagcgactctcgcaaagaaagccgaacgtgagggctatgaagtccagatcttgacagcagatcgcgatcttttccagcttttatctccgcgcatctcggtgttacacccggaagggcatcgtatcaccccggaatggctctgggagaaatatggtttgcgtcccgaacaatgggtggattttcgcgccttagcaggcgatccgagcgacaatattccgggagttaaaggtatcggcgagaagacggcgctcaagctccttaaagaatgggggtcgttggagaacttgcttaagaatttagatcaggtcaaaccagagtcagtgcgtgagaagattcttgctcacctcgaagacctcaaattaagccgcgaattgtcccgtgtacgcaccgatttgccgctcgaagttgatttcggtcgccgccgcgaacctgactgggagggtcttaaagcgtttttagagcgtcttgaatttggttcgctcttgcatgaattcggccttttagaaagcccgttactggccgaagaagcaccttggccaccgcccgagggcgcgtttttaggttaccgtttgagtcgcccggaaccgatgtgggccgaattactggctcttgcagcgtctgcccagggacgtgtgtatcgcgcggaagaccctcatggtgcgctccgcggcctcttcgaagtccgtggactccttgccaaagacttagctgttgttgcattgcgcgaaggtcttgatttacctccgactgatgatccaatgcttcttgcgtacctcttggacccgtcaaacacgacgcccgaaggcgtagcccgtcgttacggcggcgagtggaccgaagatgcagcgaaacgcgcgttattggccgaacgtttgcacgccaatttattaggacgtttgcaaggcgaggaacgtctcctctggctttacgaagaagtggagaaaccattgagtcgcgtgctcgcgcatatggaagctaccggtgtcaaattagacgtggcgtatttggagaatctcagccttgaagttgctgcccacatgcgccgcttggaggaagaagtacagcgtttagcaggccgttcctttcgccttaactctcgcgatcagttagaacgtgtgttgttcgatgaacttggtctccctcctatcggcaagacagagaagaccggtaaacgtagcacttcagcggcggttttagaagctcttcgcgaagtccatcccattgtggacaagatcttgcagtaccgcgaactcgcgaaattgaaaggcacctatattgaccgtcttccggcattagtccacccgaaaacgggacgcctccatacccgcttcaaccaaacagccacggcgaccggtcgtttgtcctcctctgatccaaaccttcagaatattccagtacgtaccccattgggccagaagatccgccgtgcgtttgtagctgaggagggttggcgtttagtggccctcgattatcgtcaaattgaattacgtgtccttgcccatctttctggcgatgagaacctcatccgcgtgtttcaggaaggcaaagacattcacactcaaacggcaagctggatgtttggattatcagctgaagcgatcgatcctttgatgcgtcgtgcagcgaagaccatcaatttcggtgttctctacggtatgagtgcctttcgtttgtcgcaggaattaggcattccctatgaagaagctcaggcgttcattcagaaatactttcaaagctatcccaaagttaaagcatggatcgagaagactctccgtgaaggccgcacacgtggttacgtagagaccttatttggacgtcgccgctatgttcccgatttaaacgctcgcgtgaaaggcaagcgtgaagccgccgaacgcatggcgttcaacatgcctgtacagggcacggcagctgacctcatgaaacttgcaatggtgcgcctttttccacaattgcgtgaagttggtgcccgcatgctcttgcaggtccacgatgaactcttgttagaagcgccaaaagagcgtgcggaagaggtggcagccctcgcgaaagaagttatggaaggcgtgtggcccttagcggtgcctcttgaagtcgaagttggtattggcgaggattggctggctgccaaagga

SEQ ID NO: 4898 - protein, 841 aa, synthetic construct
  REGION 1..841: note = Variant of DNA polymerase I from Thermus sp. strain 2.9
MHHHHHHGGSGVLPVFEPKGRVLLVDGHHLAYRNFFALKGLTTSLGEPVQGVYGFAKSLLKALKEDGDVVIVVFDAKAPSFRHEAYEAYKAGRAPTPEDFPRQLALMKELVDLLGLERLEVPGFEADDVLATLAKKAEREGYEVQILTADRDLFQLLSPRISVLHPEGHRITPEWLWEKYGLRPEQWVDFRALAGDPSDNIPGVKGIGEKTALKLLKEWGSLENLLKNLDQVKPESVREKILAHLEDLKLSRELSRVRTDLPLEVDFGRRREPDWEGLKAFLERLEFGSLLHEFGLLESPLLAEEAPWPPPEGAFLGYRLSRPEPMWAELLALAASAQGRVYRAEDPHGALRGLFEVRGLLAKDLAVVALREGLDLPPTDDPMLLAYLLDPSNTTPEGVARRYGGEWTEDAAKRALLAERLHANLLGRLQGEERLLWLYEEVEKPLSRVLAHMEATGVKLDVAYLENLSLEVAAHMRRLEEEVQRLAGRSFRLNSRDQLERVLFDELGLPPIGKTEKTGKRSTSAAVLEALREVHPIVDKILQYRELAKLKGTYIDRLPALVHPKTGRLHTRFNQTATATGRLSSSDPNLQNIPVRTPLGQKIRRAFVAEEGWRLVALDYRQIELRVLAHLSGDENLIRVFQEGKDIHTQTASWMFGLSAEAIDPLMRRAAKTINFGVLYGMSAFRLSQELGIPYEEAQAFIQKYFQSYPKVKAWIEKTLREGRTRGYVETLFGRRRYVPDLNARVKGKREAAERMAFNMPVQGTAADLMKLAMVRLFPQLREVGARMLLQVHDELLLEAPKERAEEVAALAKEVMEGVWPLAVPLEVEVGIGEDWLAAKG

SEQ ID NO: 4899 - DNA, 2523 bp, synthetic construct
  misc_feature 1..2523: note = Variant of DNA polymerase I from Thermus sp. strain 2.9
  source 1..2523: mol_type = other DNA
atgcaccatcatcatcatcatggcggtagcggcgtgttaccggtgttcgagcctaaaggtcgcgtgcttctggttgatggccatcatctcgcgtatcgtaacttctttgccctgaaaggattaaccaccagcctgggcgagccggtacagggtgtctacggctttgcaaagtcgctcctgaaagctctgaaagaagacggtgatgtggtgattgttgtctttgatgcgaaagcgccaagttttcgccacgaagcgtacgaagcttacaaagccgggcgtgctccaacgccggaagactttcctcgccaattggcgcttatgaaggaattagtggatttgcttggcctcgaacgcttggaagttcccggtttcgaggcagacgacgtattagcgactctcgcaaagaaagccgaacgtgagggctatgaagtccagatcttgacagcagatcgcgatcttttccagcttttatctccgcgcatctcggtgttacacccggaagggcatcgtatcaccccggaatggctctgggagaaatatggtttgcgtcccgaacaatgggtggattttcgcgccttagcaggcgatccgagcgacaatattccgggagttaaaggtatcggcgagaagacggcgctcaagctccttaaagaatgggggtcgttggagaacttgcttaagaatttagatcaggtcaaaccagagtcagtgcgtgagaagattcttgctcacctcgaagacctcaaattaagccgcgaattgtcccgtgtacgcaccgatttgccgctcgaagttgatttcggtcgccgccgcgaacctgactgggagggtcttaaagcgtttttagagcgtcttgaatttggttcgctcctgcatgaattcggccttttagaaagcccgttactggccgaagaagcaccttggccaccgcccgagggcgcgtttttaggttaccgtttgagtcgcccggaaccgatgtgggccgaattactggctcttgcagcgtctgcccagggacgtgtgtatcgcgcggaagaccctcatggtgcgctccgcggcctcttcgaagtccgtggactccttgccaaagacttagctgttgttgcattgcgcgaaggtcttgatttacctccgactgatgatccaatgcttcttgcgtacctcttggacccgtcaaacacgacgcccgaaggcgtagcccgtcgttacggcggcgagtggaccgaagatgcagcgaaacgcgcgttattggccgaacgtttgcacgaaaatttattaggacgtttgcaaggcgagaaacgtctcctctggctttacgaagaagtggagaaaccattgagtcgcgtgctcgcgcatatggaagctaccggtgtcaaattagacgtggcgtatttggagaatctcagccttgaagttgctgcccacatgcgccgcttggaggaagaagtattccgtttagtaggccgttcctttcgccttaactctcgcgatcagttagaacgtgtgttgttcgatgaacttggtctccctcctatcggcaagacagagaagaccggtaaacgtagcacttcacgcgcggttttagaggctcttcgcgaagtccatcccattgtggacaagatcttgcagtaccgcgaaatggcgaaattgaaaggcacctatattgaccgtcttccggcattagtccacccgaaaacgggacgcctccatacccgcttcaaccaaacagccacggcgaccggtcgtttgtcctcctctgatccaaaccttcagaatattccagtacgtaccccattgggccagaagatccgccgtgcgtttgtagctgaggagggttggcgtttagtggccctcgattatcgtcaaattgaattacgtgtccttgcccatctttctggcgatgagaacctcatccgcgtgtttcaggaaggcaaagacattcacactcaaacggcaagctggatgtttggattatcagctgaagcgatcgatcctttgatgcgtcgtgcagcgaagaccatcaatttcggtgttctctacggtatgagtgcatttcgtttgtcgcaggaattaggcattccctatgaagaagctcaggcgttcattcagaaatactttcaaagctatcccaaagttaaagcatggatcgagaagactctccgtgaaggccgcacacgtggttacgtagagaccttatttggacgtcgccgctatgttcccgatttaaacgctcgcgtgaaaggcaagcgtgaagccgccgaacgcatggcgttcaacatgcctgtacagggcacggcagctgacctcatgaaacttgcaatggtgcgcctttttccacaattgcgtgaagttggtgcccgcatgctcttgcaggtccacgatgaactcttgttagaagcgccaaaagagcgtgcggaagaggtggcagccctcgcgaaagaagttatggaaggcgtgtggcccttagcggtgcctcttgaagtcgaagttggtattggcgaggattggctggctgccaaagga

SEQ ID NO: 4900 - protein, 841 aa, synthetic construct
  REGION 1..841: note = Variant of DNA polymerase I from Thermus sp. strain 2.9
MHHHHHHGGSGVLPVFEPKGRVLLVDGHHLAYRNFFALKGLTTSLGEPVQGVYGFAKSLLKALKEDGDVVIVVFDAKAPSFRHEAYEAYKAGRAPTPEDFPRQLALMKELVDLLGLERLEVPGFEADDVLATLAKKAEREGYEVQILTADRDLFQLLSPRISVLHPEGHRITPEWLWEKYGLRPEQWVDFRALAGDPSDNIPGVKGIGEKTALKLLKEWGSLENLLKNLDQVKPESVREKILAHLEDLKLSRELSRVRTDLPLEVDFGRRREPDWEGLKAFLERLEFGSLLHEFGLLESPLLAEEAPWPPPEGAFLGYRLSRPEPMWAELLALAASAQGRVYRAEDPHGALRGLFEVRGLLAKDLAVVALREGLDLPPTDDPMLLAYLLDPSNTTPEGVARRYGGEWTEDAAKRALLAERLHENLLGRLQGEKRLLWLYEEVEKPLSRVLAHMEATGVKLDVAYLENLSLEVAAHMRRLEEEVFRLVGRSFRLNSRDQLERVLFDELGLPPIGKTEKTGKRSTSRAVLEALREVHPIVDKILQYREMAKLKGTYIDRLPALVHPKTGRLHTRFNQTATATGRLSSSDPNLQNIPVRTPLGQKIRRAFVAEEGWRLVALDYRQIELRVLAHLSGDENLIRVFQEGKDIHTQTASWMFGLSAEAIDPLMRRAAKTINFGVLYGMSAFRLSQELGIPYEEAQAFIQKYFQSYPKVKAWIEKTLREGRTRGYVETLFGRRRYVPDLNARVKGKREAAERMAFNMPVQGTAADLMKLAMVRLFPQLREVGARMLLQVHDELLLEAPKERAEEVAALAKEVMEGVWPLAVPLEVEVGIGEDWLAAKG

SEQ ID NO: 4901 - DNA, 2523 bp, synthetic construct
  misc_feature 1..2523: note = Variant of DNA polymerase I from Thermus sp. strain 2.9
  source 1..2523: mol_type = other DNA
atgcaccatcatcatcatcatggcggtagcggcgtgttaccggtgttcgagcctaaaggtcgcgtgcttctggttgatggccatcatctcgcgtatcgtaacttctttgccctgaaaggattaaccaccagcctgggcgagccggtacagggtgtctacggctttgcaaagtcgctcctgaaagctctgaaagaagacggtgatgtggtgattgttgtctttgatgcgaaagcgccaagttttcgccacgaagcgtacgaagcttacaaagccgggcgtgctccaacgccggaagactttcctcgccaattggcgcttatgaaggaattagtggatttgcttggcctcgaacgcttggaagttcccggtttcgaggcagacgacgtattagcgactctcgcaaagaaagccgaacgtgagggctatgaagtccagatcttgacagcagatcgcgatcttttccagcttttatctccgcgcatctcggtgttacacccggaagggcatcgtatcaccccggaatggctctgggagaaatatggtttgcgtcccgaacaatgggtggattttcgcgccttagcaggcgatccgagcgacaatattccgggagttaaaggtatcggcgagaagacggcgctcaagctccttaaagaatgggggtcgttggagaacttgcttaagaatttagatcaggtcaaaccagagtcagtgcgtgagaagattcttgctcacctcgaagacctcaaattaagccgcgaattgtcccgtgtacgcaccgatttgccgctcgaagttgatttcggtcgccgccgcgaacctgactgggagggtcttaaagcgtttttagagcgtcttgaatttggttcgctcttgcatgaattcggccttttagaaagcccgttactggccgaagaagcaccttggccaccgcccgagggcgcgtttttaggttaccgtttgagtcgcccggaaccgatgtgggccgaattactggctcttgcagcgtctgcccagggacgtgtgtatcgcgcggaagaccctcatggtgcgctccgcggcctcttcgaagtccgtggactccttgccaaagacttagctgttgttgcattgcgcgaaggtcttgatttacctccgactgatgatccaatgcttcttgcgtacctcttggacccgtcaaacacgacgcccgaaggcgtagcccgtcgttacggcggcgagtggaccgaagatgcagcgaaacgcgcgttattggccgaacgtttgcacgccaatttattaggacgtttgcaaggcgaggaacgtctcctctggctttacgaagaagtggagaaaccattgagtcgcgtgctcgcgcatatggaagctaccggtgtcaaattagacgtggcgtatttggagaatctcagccttgaagttgctgcccacatgcgccgcttggaggaagaagtattccgtttagcaggccgttcctttcgccttaactctcgcgatcagttagaacgtgtgttgttcgatgaacttggtctccctcctatcggcaagacagagaagaccggtaaacgtagcacttcagcggcggttttagaagctcttcgcgaagtccatcccattgtggacaagatcttgcagtaccgcgaactcgcgaaattgaaaggcacctatattgaccgtcttccggcattagtccacccgaaaacgggacgcctccatacccgcttcaaccaaacagccacggcgaccggtcgtatgtcctcctctgatccaaaccttcagaatattccagtacgtaccccattgggccagaagatccgccgtgcgtttgtagctgaggagggttggcgtttagtggccctcgattatcgtcaaattgaattacgtgtccttgcccatctttctggcgatgagaacctcatccgcgtgtttcaggaaggcaaagacattcacactcaaacggcaagctggatgtttggattatcagctgaagcgatcgatcctttgatgcgtcgtgcagcgaagaccatcaatttcggtgttctctacggtatgagtgcctttcgtttgtcgcaggaattaggcattccctatgaagaagctcaggcgttcattcagaaatactttcaaagctatcccaaagttaaagcatggatcgagaagactctccgtgaaggccgcacacgtggttacgtagagaccttatttggacgtcgccgctatgttcccgatttaaacgctcgcgtgaaaggcaagcgtgaagccgccgaacgcatggcgttcaacatgcctgtacagggcacggcagctgacctcatgaaacttgcaatggtgcgcctttttccacaattgcgtgaagttggtgcccgcatgctcttgcaggtccacgatgaactcttgttagaagcgccaaaagagcgtgcggaagaggtggcagccctcgcgaaagaagttatggaaggcgtgtggcccttagcggtgcctcttgaagtcgaagttggtattggcgaggattggctggctgccaaagga

SEQ ID NO: 4902 - protein, 841 aa, synthetic construct
  REGION 1..841: note = Variant of DNA polymerase I from Thermus sp. strain 2.9
MHHHHHHGGSGVLPVFEPKGRVLLVDGHHLAYRNFFALKGLTTSLGEPVQGVYGFAKSLLKALKEDGDVVIVVFDAKAPSFRHEAYEAYKAGRAPTPEDFPRQLALMKELVDLLGLERLEVPGFEADDVLATLAKKAEREGYEVQILTADRDLFQLLSPRISVLHPEGHRITPEWLWEKYGLRPEQWVDFRALAGDPSDNIPGVKGIGEKTALKLLKEWGSLENLLKNLDQVKPESVREKILAHLEDLKLSRELSRVRTDLPLEVDFGRRREPDWEGLKAFLERLEFGSLLHEFGLLESPLLAEEAPWPPPEGAFLGYRLSRPEPMWAELLALAASAQGRVYRAEDPHGALRGLFEVRGLLAKDLAVVALREGLDLPPTDDPMLLAYLLDPSNTTPEGVARRYGGEWTEDAAKRALLAERLHANLLGRLQGEERLLWLYEEVEKPLSRVLAHMEATGVKLDVAYLENLSLEVAAHMRRLEEEVFRLAGRSFRLNSRDQLERVLFDELGLPPIGKTEKTGKRSTSAAVLEALREVHPIVDKILQYRELAKLKGTYIDRLPALVHPKTGRLHTRFNQTATATGRMSSSDPNLQNIPVRTPLGQKIRRAFVAEEGWRLVALDYRQIELRVLAHLSGDENLIRVFQEGKDIHTQTASWMFGLSAEAIDPLMRRAAKTINFGVLYGMSAFRLSQELGIPYEEAQAFIQKYFQSYPKVKAWIEKTLREGRTRGYVETLFGRRRYVPDLNARVKGKREAAERMAFNMPVQGTAADLMKLAMVRLFPQLREVGARMLLQVHDELLLEAPKERAEEVAALAKEVMEGVWPLAVPLEVEVGIGEDWLAAKG

SEQ ID NO: 4903 - DNA, 2523 bp, synthetic construct
  misc_feature 1..2523: note = Variant of DNA polymerase I from Thermus sp. strain 2.9
  source 1..2523: mol_type = other DNA
atgcaccatcatcatcatcatggcggtagcggcgtgttaccggtgttcgagcctaaaggtcgcgtgcttctggttgatggccatcatctcgcgtatcgtaacttctttgccctgaaaggattaaccaccagcctgggcgagccggtacagggtgtctacggctttgcaaagtcgctcctgaaagctctgaaagaagacggtgatgtggtgattgttgtctttgatgcgaaagcgccaagttttcgccacgaagcgtacgaagcttacaaagccgggcgtgctccaacgccggaagactttcctcgccaattggcgcttatgaaggaattagtggatttgcttggcctcgaacgcttggaagttcccggtttcgaggcagacgacgtattagcgactctcgcaaagaaagccgaacgtgagggctatgaagtccagatcttgacagcagatcgcgatcttttccagcttttatctccgcgcatctcggtgttacacccggaagggcatcgtatcaccccggaatggctctgggagaaatatggtttgcgtcccgaacaatgggtggattttcgcgccttagcaggcgatccgagcgacaatattccgggagttaaaggtatcggcgagaagacggcgctcaagctccttaaagaatgggggtcgttggagaacttgcttaagaatttagatcaggtcaaaccagagtcagtgcgtgagaagattcttgctcacctcgaagacctcaaattaagccgcgaattgtcccgtgtacgcaccgatttgccgctcgaagttgatttcggtcgccgccgcgaacctgactgggagggtcttaaagcgtttttagagcgtcttgaatttggttcgctcttgcatgaattcggccttttagaaagcccgttactggccgaagaagcaccttggccaccgcccgagggcgcgtttttaggttaccgtttgagtcgcccggaaccgatgtgggccgaattactggctcttgcagcgtctgcccagggacgtgtgtatcgcgcggaagaccctcatggtgcgctccgcggcctcttcgaagtccgtggactccttgccaaagacttagctgttgttgcattgcgcgaaggtcttgatttacctccgactgatgatccaatgcttcttgcgtacctcttggacccgtcaaacacgacgcccgaaggcgtagcccgtcgttacggcggcgagtggaccgaagatgcagcgaaacgcgcgttattggccgaacgtttgcacgccaatttattaggacgtttgcaaggcgaggaacgtctcctctggctttacgaagaagtggagaaaccattgagtcgcgtgctcgcgcatatggaagctaccggtgtcaaattagacgtggcgtatttggagaatctcagccttgaagttgctgcccacatgcgccgcttggaggaagaagtattccgtttagcaggccgttcctttcgccttaactctcgcgatcagttagaacgtgtgttgttcgatgaacttggtctccctcctatcggcaagacagagaagaccggtaaacgtagcacttcagcggcggttttagaagctcttcgcgaagtccatcccattgtggacaagatcttgcagtaccgcgaactcgcgaaattgaaaggcacctatattgaccgtcttccggcattagtccacccgaaaacgggacgcctccattatcgcttcaaccaaacagccacggcgaccggtcgtttgtcctcctctgatccaaaccttcagaatattccagtacgtaccccattgggccagaagatccgccgtgcgtttgtagctgaggagggttggcgtttagtggccctcgattatcgtcaaattgaattacgtgtccttgcccatctttctggcgatgagaacctcatccgcgtgtttcaggaaggcaaagacattcacactcaaacggcaagctggatgtttggattatcagctgaagcgatcgatcctttgatgcgtcgtgcagcgaagaccatcaatttcggtgttctctacggtatgagtgcctttcgtttgtcgcaggaattaggcattccctatgaagaagctcaggcgttcattcagaaatactttcaaagctatcccaaagttaaagcatggatcgagaagactctccgtgaaggccgcacacgtggttacgtagagaccttatttggacgtcgccgctatgttcccgatttaaacgctcgcgtgaaaggcaagcgtgaagccgccgaacgcatggcgttcaacatgcctgtacagggcacggcagctgacctcatgaaacttgcaatggtgcgcctttttccacaattgcgtgaagttggtgcccgcatgctcttgcaggtccacgatgaactcttgttagaagcgccaaaagagcgtgcggaagaggtggcagccctcgcgaaagaagttatggaaggcgtgtggcccttagcggtgcctcttgaagtcgaagttggtattggcgaggattggctggctgccaaagga

SEQ ID NO: 4904 - protein, 841 aa, synthetic construct
  REGION 1..841: note = Variant of DNA polymerase I from Thermus sp. strain 2.9
MHHHHHHGGSGVLPVFEPKGRVLLVDGHHLAYRNFFALKGLTTSLGEPVQGVYGFAKSLLKALKEDGDVVIVVFDAKAPSFRHEAYEAYKAGRAPTPEDFPRQLALMKELVDLLGLERLEVPGFEADDVLATLAKKAEREGYEVQILTADRDLFQLLSPRISVLHPEGHRITPEWLWEKYGLRPEQWVDFRALAGDPSDNIPGVKGIGEKTALKLLKEWGSLENLLKNLDQVKPESVREKILAHLEDLKLSRELSRVRTDLPLEVDFGRRREPDWEGLKAFLERLEFGSLLHEFGLLESPLLAEEAPWPPPEGAFLGYRLSRPEPMWAELLALAASAQGRVYRAEDPHGALRGLFEVRGLLAKDLAVVALREGLDLPPTDDPMLLAYLLDPSNTTPEGVARRYGGEWTEDAAKRALLAERLHANLLGRLQGEERLLWLYEEVEKPLSRVLAHMEATGVKLDVAYLENLSLEVAAHMRRLEEEVFRLAGRSFRLNSRDQLERVLFDELGLPPIGKTEKTGKRSTSAAVLEALREVHPIVDKILQYRELAKLKGTYIDRLPALVHPKTGRLHYRFNQTATATGRLSSSDPNLQNIPVRTPLGQKIRRAFVAEEGWRLVALDYRQIELRVLAHLSGDENLIRVFQEGKDIHTQTASWMFGLSAEAIDPLMRRAAKTINFGVLYGMSAFRLSQELGIPYEEAQAFIQKYFQSYPKVKAWIEKTLREGRTRGYVETLFGRRRYVPDLNARVKGKREAAERMAFNMPVQGTAADLMKLAMVRLFPQLREVGARMLLQVHDELLLEAPKERAEEVAALAKEVMEGVWPLAVPLEVEVGIGEDWLAAKG

SEQ ID NO: 4905 - DNA, 2523 bp, synthetic construct
  misc_feature 1..2523: note = Variant of DNA polymerase I from Thermus sp. strain 2.9
  source 1..2523: mol_type = other DNA
atgcaccatcatcatcatcatggcggtagcggcgtgttaccggtgttcgagcctaaaggtcgcgtgcttctggttgatggccatcatctcgcgtatcgtaacttctttgccctgaaaggattaaccaccagcctgggcgagccggtacagggtgtctacggctttgcaaagtcgctcctgaaagctctgaaagaagacggtgatgtggtgattgttgtctttgatgcgaaagcgccaagttttcgccacgaagcgtacgaagcttacaaagccgggcgtgctccaacgccggaagactttcctcgccaattggcgcttatgaaggaattagtggatttgcttggcctcgaacgcttggaagttcccggtttcgaggcagacgacgtattagcgactctcgcaaagaaagccgaacgtgagggctatgaagtccagatcttgacagcagatcgcgatcttttccagcttttatctccgcgcatctcggtgttacacccggaagggcatcgtatcaccccggaatggctctgggagaaatatggtttgcgtcccgaacaatgggtggattttcgcgccttagcaggcgatccgagcgacaatattccgggagttaaaggtatcggcgagaagacggcgctcaagctccttaaagaatgggggtcgttggagaacttgcttaagaatttagatcaggtcaaaccagagtcagtgcgtgagaagattcttgctcacctcgaagacctcaaattaagccgcgaattgtcccgtgtacgcaccgatttgccgctcgaagttgatttcggtcgccgccgcgaacctgactgggagggtcttaaagcgtttttagagcgtcttgaatttggttcgctcttgcatgaattcggccttttagaaagcccgttactggccgaagaagcaccttggccaccgcccgagggcgcgtttttaggttaccgtttgagtcgcccggaaccgatgtgggccgaattactggctcttgcagcgtctgcccagggacgtgtgtatcgcgcggaagaccctcatggtgcgctccgcggcctcttcgaagtccgtggactccttgccaaagacttagctgttgttgcattgcgcgaaggtcttgatttacctccgactgatgatccaatgcttcttgcgtacctcttggacccgtcaaacacgacgcccgaaggcgtagcccgtcgttacggcggcgagtggaccgaagatgcagcgaaacgcgcgttattggccgaacgtttgcacgccaatttattaggacgtttgcaaggcgaggaacgtctcctctggctttacgaagaagtggagaaaccattgagtcgcgtgctcgcgcatatggaagctaccggtgtcaaattagacgtggcgtatttggagaatctcagccttgaagttgctgcccacatgcgccgcttggaggaagaagtattccgtttagcaggccgttcctttcgccttaactctcgcgatcagttagaacgtgtgttgttcgatgaacttggtctccctcctatcggcaagacagagaagaccggtaaacgtagcacttcagcggcggttttagaagctgctcgcgaagtccatcccattgtggacaagatcttgcagtaccgcgaactcgcgaaattgaaaggcacctatattgaccgtcttccggcattagtccacccgaaaacgggacgcctccatacccgcttcaaccaaacagccacggcgaccggtcgtttgtcctcctctgatccaaaccttcagaatattccagtacgtaccccattgggccagaagatccgccgtgcgtttgtagctgaggagggttggcgtttagtggccctcgattatcgtcaaattgaattacgtgtccttgcccatctttctggcgatgagaacctcatccgcgtgtttcaggaaggcaaagacattcacactcaaacggcaagctggatgtttggattatcagctgaagcgatcgatcctttgatgcgtcgtgcagcgaagaccatcaatttcggtgttctctacggtatgagtgcctttcgtttgtcgcaggaattaggcattccctatgaagaagctcaggcgttcattcagaaatactttcaaagctatcccaaagttaaagcatggatcgagaagactctccgtgaaggccgcacacgtggttacgtagagaccttatttggacgtcgccgctatgttcccgatttaaacgctcgcgtgaaaggcaagcgtgaagccgccgaacgcatggcgttcaacatgcctgtacagggcacggcagctgacctcatgaaacttgcaatggtgcgcctttttccacaattgcgtgaagttggtgcccgcatgctcttgcaggtccacgatgaactcttgttagaagcgccaaaagagcgtgcggaagaggtggcagccctcgcgaaagaagttatggaaggcgtgtggcccttagcggtgcctcttgaagtcgaagttggtattggcgaggattggctggctgccaaagga

SEQ ID NO: 4906 - protein, 841 aa, synthetic construct
  REGION 1..841: note = Variant of DNA polymerase I from Thermus sp. strain 2.9
MHHHHHHGGSGVLPVFEPKGRVLLVDGHHLAYRNFFALKGLTTSLGEPVQGVYGFAKSLLKALKEDGDVVIVVFDAKAPSFRHEAYEAYKAGRAPTPEDFPRQLALMKELVDLLGLERLEVPGFEADDVLATLAKKAEREGYEVQILTADRDLFQLLSPRISVLHPEGHRITPEWLWEKYGLRPEQWVDFRALAGDPSDNIPGVKGIGEKTALKLLKEWGSLENLLKNLDQVKPESVREKILAHLEDLKLSRELSRVRTDLPLEVDFGRRREPDWEGLKAFLERLEFGSLLHEFGLLESPLLAEEAPWPPPEGAFLGYRLSRPEPMWAELLALAASAQGRVYRAEDPHGALRGLFEVRGLLAKDLAVVALREGLDLPPTDDPMLLAYLLDPSNTTPEGVARRYGGEWTEDAAKRALLAERLHANLLGRLQGEERLLWLYEEVEKPLSRVLAHMEATGVKLDVAYLENLSLEVAAHMRRLEEEVFRLAGRSFRLNSRDQLERVLFDELGLPPIGKTEKTGKRSTSAAVLEAAREVHPIVDKILQYRELAKLKGTYIDRLPALVHPKTGRLHTRFNQTATATGRLSSSDPNLQNIPVRTPLGQKIRRAFVAEEGWRLVALDYRQIELRVLAHLSGDENLIRVFQEGKDIHTQTASWMFGLSAEAIDPLMRRAAKTINFGVLYGMSAFRLSQELGIPYEEAQAFIQKYFQSYPKVKAWIEKTLREGRTRGYVETLFGRRRYVPDLNARVKGKREAAERMAFNMPVQGTAADLMKLAMVRLFPQLREVGARMLLQVHDELLLEAPKERAEEVAALAKEVMEGVWPLAVPLEVEVGIGEDWLAAKG

SEQ ID NO: 4907 - DNA, 2523 bp, synthetic construct
  misc_feature 1..2523: note = Variant of DNA polymerase I from Thermus sp. strain 2.9
  source 1..2523: mol_type = other DNA
atgcaccatcatcatcatcatggcggtagcggcgtgttaccggtgttcgagcctaaaggtcgcgtgcttctggttgatggccatcatctcgcgtatcgtaacttctttgccctgaaaggattaaccaccagcctgggcgagccggtacagggtgtctacggctttgcaaagtcgctcctgaaagctctgaaagaagacggtgatgtggtgattgttgtctttgatgcgaaagcgccaagttttcgccacgaagcgtacgaagcttacaaagccgggcgtgctccaacgccggaagactttcctcgccaattggcgcttatgaaggaattagtggatttgcttggcctcgaacgcttggaagttcccggtttcgaggcagacgacgtattagcgactctcgcaaagaaagccgaacgtgagggctatgaagtccagatcttgacagcagatcgcgatcttttccagcttttatctccgcgcatctcggtgttacacccggaagggcatcgtatcaccccggaatggctctgggagaaatatggtttgcgtcccgaacaatgggtggattttcgcgccttagcaggcgatccgagcgacaatattccgggagttaaaggtatcggcgagaagacggcgctcaagctccttaaagaatgggggtcgttggagaacttgcttaagaatttagatcaggtcaaaccagagtcagtgcgtgagaagattcttgctcacctcgaagacctcaaattaagccgcgaattgtcccgtgtacgcaccgatttgccgctcgaagttgatttcggtcgccgccgcgaacctgactgggagggtcttaaagcgtttttagagcgtcttgaatttggttcgctcttgcatgaattcggccttttagaaagcccgttaatggccgaagaagcaccttggccaccgcccgagggcgcgtttttaggttaccgtttgagtcgcccggaaccgatgtgggccgaattactggctcttgcagcgtctgcccagggacgtgtgtatcgcgcggaagaccctcatggtgcgctccgcggcctcttcgaagtccgtggactccttgccaaagacttagctgttgttgcattgcgcgaaggtcttgatttacctccgactgatgatccaatgcttcttgcgtacctcttggacccgtcaaacacgacgcccgaaggcgtagcccgtcgttacggcggcgagtggaccgaagatgcagcgaaacgcgcgttattggccgaacgtttgcacgccaatttattaggacgtttgcaaggcgaggaacgtctcctctggctttacgaagaagtggagaaaccattgagtcgcgtgctcgcgcatatggaagctaccggtgtcaaattagacgtggcgtatttggagaatctcagccttgaagttgctgcccacatgcgccgcttggaggaagaagtattccgtttagcaggccgttcctttcgccttaactctcgcgatcagttagaacgtgtgttgttcgatgaacttggtctccctcctatcggcaagacagagaagaccggtaaacgtagcacttcagcggcggttttagaagctcttcgcgaagtccatcccattgtggacaagatcttgcagtaccgcgaactcgcgaaattgaaaggcacctatattgaccgtcttccggcattagtccacccgaaaacgggacgcctccatacccgcttcaaccaaacagccacggcgaccggtcgtttgtcctcctctgatccaaaccttcagaatattccagtacgtaccccattgggccagaagatccgccgtgcgtttgtagctgaggagggttggcgtttagtggccctcgattatcgtcaaattgaattacgtgtccttgcccatctttctggcgatgagaacctcatccgcgtgtttcaggaaggcaaagacattcacactcaaacggcaagctggatgtttggattatcagctgaagcgatcgatcctttgatgcgtcgtgcagcgaagaccatcaatttcggtgttctctacggtatgagtgcctttcgtttgtcgcaggaattaggcattccctatgaagaagctcaggcgttcattcagaaatactttcaaagctatcccaaagttaaagcatggatcgagaagactctccgtgaaggccgcacacgtggttacgtagagaccttatttggacgtcgccgctatgttcccgatttaaacgctcgcgtgaaaggcaagcgtgaagccgccgaacgcatggcgttcaacatgcctgtacagggcacggcagctgacctcatgaaacttgcaatggtgcgcctttttccacaattgcgtgaagttggtgcccgcatgctcttgcaggtccacgatgaactcttgttagaagcgccaaaagagcgtgcggaagaggtggcagccctcgcgaaagaagttatggaaggcgtgtggcccttagcggtgcctcttgaagtcgaagttggtattggcgaggattggctggctgccaaagga

SEQ ID NO: 4908 - protein, 841 aa, synthetic construct
  REGION 1..841: note = Variant of DNA polymerase I from Thermus sp. strain 2.9
MHHHHHHGGSGVLPVFEPKGRVLLVDGHHLAYRNFFALKGLTTSLGEPVQGVYGFAKSLLKALKEDGDVVIVVFDAKAPSFRHEAYEAYKAGRAPTPEDFPRQLALMKELVDLLGLERLEVPGFEADDVLATLAKKAEREGYEVQILTADRDLFQLLSPRISVLHPEGHRITPEWLWEKYGLRPEQWVDFRALAGDPSDNIPGVKGIGEKTALKLLKEWGSLENLLKNLDQVKPESVREKILAHLEDLKLSRELSRVRTDLPLEVDFGRRREPDWEGLKAFLERLEFGSLLHEFGLLESPLMAEEAPWPPPEGAFLGYRLSRPEPMWAELLALAASAQGRVYRAEDPHGALRGLFEVRGLLAKDLAVVALREGLDLPPTDDPMLLAYLLDPSNTTPEGVARRYGGEWTEDAAKRALLAERLHANLLGRLQGEERLLWLYEEVEKPLSRVLAHMEATGVKLDVAYLENLSLEVAAHMRRLEEEVFRLAGRSFRLNSRDQLERVLFDELGLPPIGKTEKTGKRSTSAAVLEALREVHPIVDKILQYRELAKLKGTYIDRLPALVHPKTGRLHTRFNQTATATGRLSSSDPNLQNIPVRTPLGQKIRRAFVAEEGWRLVALDYRQIELRVLAHLSGDENLIRVFQEGKDIHTQTASWMFGLSAEAIDPLMRRAAKTINFGVLYGMSAFRLSQELGIPYEEAQAFIQKYFQSYPKVKAWIEKTLREGRTRGYVETLFGRRRYVPDLNARVKGKREAAERMAFNMPVQGTAADLMKLAMVRLFPQLREVGARMLLQVHDELLLEAPKERAEEVAALAKEVMEGVWPLAVPLEVEVGIGEDWLAAKG

SEQ ID NO: 4909 - DNA, 2523 bp, synthetic construct
  misc_feature 1..2523: note = Variant of DNA polymerase I from Thermus sp. strain 2.9
  source 1..2523: mol_type = other DNA
atgcaccatcatcatcatcatggcggtagcggcgtgttaccggtgttcgagcctaaaggtcgcgtgcttctggttgatggccatcatctcgcgtatcgtaacttctttgccctgaaaggattaaccaccagcctgggcgagccggtacagggtgtctacggctttgcaaagtcgctcctgaaagctctgaaagaagacggtgatgtggtgattgttgtctttgatgcgaaagcgccaagttttcgccacgaagcgtacgaagcttacaaagccgggcgtgctccaacgccggaagactttcctcgccaattggcgcttatgaaggaattagtggatttgcttggcctcgaacgcttggaagttcccggtttcgaggcagacgacgtattagcgactctcgcaaagaaagccgaacgtgagggctatgaagtccagatcttgacagcagatcgcgatcttttccagcttttatctccgcgcatctcggtgttacacccggaagggcatcgtatcaccccggaatggctctgggagaaatatggtttgcgtcccgaacaatgggtggattttcgcgccttagcaggcgatccgagcgacaatattccgggagttaaaggtatcggcgagaagacggcgctcaagctccttaaagaatgggggtcgttggagaacttgcttaagaatttagatcaggtcaaaccagagtcagtgcgtgagaagattcttgctcacctcgaagacctcaaattaagccgcgaattgtcctttgtacgcaccgatttgccgctcgaagttgatttcggtcgccgccgcgaacctgactgggagggtcttaaagcgtttttagagcgtcttgaatttggttcgctcttgcatgaattcggccttttagaaagcccgttactggccgaagaagcaccttggccaccgcccgagggcgcgtttttaggttaccgtttgagtcgcccggaaccgatgtgggccgaattactggctcttgcagcgtctgcccagggacgtgtgtatcgcgcggaagaccctcatggtgcgctccgcggcctcttcgaagtccgtggactccttgccaaagacttagctgttgttgcattgcgcgaaggtcttgatttacctccgactgatgatccaatgcttcttgcgtacctcttggacccgtcaaacacgacgcccgaaggcgtagcccgtcgttacggcggcgagtggaccgaagatgcagcgaaacgcgcgttattggccgaacgtttgcacgccaatttattaggacgtttgcaaggcgaggaacgtctcctctggctttacgaagaagtggagaaaccattgagtcgcgtgctcgcgcatatggaagctaccggtgtcaaattagacgtggcgtatttggagaatctcagccttgaagttgctgcccacatgcgccgcttggaggaagaagtattccgtttagcaggccgttcctttcgccttaactctcgcgatcagttagaacgtgtgttgttcgatgaacttggtctccctcctatcggcaagacagagaagaccggtaaacgtagcacttcagcggcggttttagaagctcttcgcgaagtccatcccattgtggacaagatcttgcagtaccgcgaactcgcgaaattgaaaggcacctatattgaccgtcttccggcattagtccacccgaaaacgggacgcctccatacccgcttcaaccaaacagccacggcgaccggtcgtttgtcctcctctgatccaaaccttcagaatattccagtacgtaccccattgggccagaagatccgccgtgcgtttgtagctgaggagggttggcgtttagtggccctcgattatcgtcaaattgaattacgtgtccttgcccatctttctggcgatgagaacctcatccgcgtgtttcaggaaggcaaagacattcacactcaaacggcaagctggatgtttggattatcagctgaagcgatcgatcctttgatgcgtcgtgcagcgaagaccatcaatttcggtgttctctacggtatgagtgcctttcgtttgtcgcaggaattaggcattccctatgaagaagctcaggcgttcattcagaaatactttcaaagctatcccaaagttaaagcatggatcgagaagactctccgtgaaggccgcacacgtggttacgtagagaccttatttggacgtcgccgctatgttcccgatttaaacgctcgcgtgaaaggcaagcgtgaagccgccgaacgcatggcgttcaacatgcctgtacagggcacggcagctgacctcatgaaacttgcaatggtgcgcctttttccacaattgcgtgaagttggtgcccgcatgctcttgcaggtccacgatgaactcttgttagaagcgccaaaagagcgtgcggaagaggtggcagccctcgcgaaagaagttatggaaggcgtgtggcccttagcggtgcctcttgaagtcgaagttggtattggcgaggattggctggctgccaaagga

SEQ ID NO: 4910 - protein, 841 aa, synthetic construct
  REGION 1..841: note = Variant of DNA polymerase I from Thermus sp. strain 2.9
MHHHHHHGGSGVLPVFEPKGRVLLVDGHHLAYRNFFALKGLTTSLGEPVQGVYGFAKSLLKALKEDGDVVIVVFDAKAPSFRHEAYEAYKAGRAPTPEDFPRQLALMKELVDLLGLERLEVPGFEADDVLATLAKKAEREGYEVQILTADRDLFQLLSPRISVLHPEGHRITPEWLWEKYGLRPEQWVDFRALAGDPSDNIPGVKGIGEKTALKLLKEWGSLENLLKNLDQVKPESVREKILAHLEDLKLSRELSFVRTDLPLEVDFGRRREPDWEGLKAFLERLEFGSLLHEFGLLESPLLAEEAPWPPPEGAFLGYRLSRPEPMWAELLALAASAQGRVYRAEDPHGALRGLFEVRGLLAKDLAVVALREGLDLPPTDDPMLLAYLLDPSNTTPEGVARRYGGEWTEDAAKRALLAERLHANLLGRLQGEERLLWLYEEVEKPLSRVLAHMEATGVKLDVAYLENLSLEVAAHMRRLEEEVFRLAGRSFRLNSRDQLERVLFDELGLPPIGKTEKTGKRSTSAAVLEALREVHPIVDKILQYRELAKLKGTYIDRLPALVHPKTGRLHTRFNQTATATGRLSSSDPNLQNIPVRTPLGQKIRRAFVAEEGWRLVALDYRQIELRVLAHLSGDENLIRVFQEGKDIHTQTASWMFGLSAEAIDPLMRRAAKTINFGVLYGMSAFRLSQELGIPYEEAQAFIQKYFQSYPKVKAWIEKTLREGRTRGYVETLFGRRRYVPDLNARVKGKREAAERMAFNMPVQGTAADLMKLAMVRLFPQLREVGARMLLQVHDELLLEAPKERAEEVAALAKEVMEGVWPLAVPLEVEVGIGEDWLAAKG

SEQ ID NO: 4911 - DNA, 2523 bp, synthetic construct
  misc_feature 1..2523: note = Variant of DNA polymerase I from Thermus sp. strain 2.9
  source 1..2523: mol_type = other DNA
atgcaccatcatcatcatcatggcggtagcggcgtgttaccggtgttcgagcataaaggtcgcgtgcttctggttgatggccatcatctcgcgtatcgtaacttctttgccctgaaaggattaaccaccagcctgggcgagccggtacagggtgtctacggctttgcaaagtcgctcctgaaagctctgaaagaagacggtgatgtggtgattgttgtctttgatgcgaaagcgccaagttttcgccacgaagcgtacgaagcttacaaagccgggcgtgctccaacgccggaagactttcctcgccaattgtttcttatgaaggaattagtggatttgcttggcctcgaacgcttggaagttcccggtttcgaggcagacgacgtattagcgactctcgcaaagaaagccgaagatgagggctatgaagtccagatcttgacagcagatcgcgatcttttccagcttttatctccgcgcatctcggtgttacacccggaagggcatcgtatcaccccggaatggctctgggagaaatatggtttgcgtcccgaacaatgggtggattttcgcgccttagcaggcgataagagcgacaatattccgggagttaaaggtatcggcgagaagacggcgctcaagctccttaaagaatgggggtcgttggagaacttgcttaagaatttagatcaggtcaaaccagagtcagtgcgtgagaagattcttgctcacctcgaagacctcaagttaagccgcgaattgtcccgtgtacgcaccgatttgccgctcgaagttgatttcggtcgccgccgcgaacctgactgggagggtcttaaagcgtttttagagcgtcttgaatttggttcgctccagcatgaattcggccttttagaaaacccgttactggccgaagaagcaccttggccaccgcccgagggcgcgtttttaggttaccgtttgagtcgcccggaaccgatgtgggccgaattactggctcttgcagcgtctgcccagggacgtgtgtatcgcgcggaagaccctcatggtgcgctccgcggcctcttcgaagtccgtggactccttgccaaagacttagctgttgttgcattgcgcgaaggtcttgatttacctccgactgatgatccaatgcttcttgcgtacctcttggacccgtcaaacacgacgcccgaaggcgtagcccgtcgttacggcggcgagtggaccgaagatgcagcgaaacgcgcgttattggccgaacgtttgcacgagaatttacgtggacgtttgcaaggcgaggaacgtctcctctggctttacgaagaagtggagaaaccattgagtgtggtgctcgctcatatggaagctaccggtgtcaaattagacgtggcgtatttggagaatctcagccttgaagttgctgcccacatgcgccgcttggaggaagaagtattccgtttagcaggccgttcctttcgccttaactctcgcgatcagttagaacgtgtgttgttcgatgaacttggtctccctcctatcggcaagacagagaagaccggtaaacgtagcacttcagcggcggttttagatgctcttcgcgaagtccatcccattgtggacaagatcttgcagtaccgcgaaatggcgaaattgaaaggcacctatattgaccgtcttccggcattagtccacccgaaaacgggacgcctccatacccgcttcaaccaaacagccacggcgaccggtcgtttgtcctcctctgatccaaaccttcagaatattccagtacgtaccccattgggccagaagatccgccgtgcgtttgtagctgaggagggttggcgtttagtggccctcgattatcgtcaaattgaattacgtgtccttgcccatctttctggcgatgagaacctcatccgcgtgtttcaggaaggcaaagacattcacactcaaacggcaagctggatgtttggattatcagctgaagcgatcgatcctttgatgcgtcgtgcagcgaagacgatcaatttcggtgttctctacggtatgagtgcctttcgtttgtcgcaggaattaggcattccctatgaagaagctcaggcgttcattcagaaatactttcaaagctatcccaaagttaaagcatggatcgagaagactctccgtgaaggccgccaccgtggttacgtagagaccttatttggacgtcgccgctatgttcccgatttaaacgctcgcgtgaaaggcaagcgtgaagccgccgaacgcatggcgttcaacatgcctgtacagggcacggcagctgacctcatgaaacttgcaatggtgcgcctttttccacaattgcgtgaagttggtgcccgcatgctcttgcaggtccacgatgaactcttgttagaagcgccaaaagagcgtgcggaagaggtggcagccctcgcgaaagaagttatggaaggcgtgtggcccttagcggtgcctcttgaagtcgaagttggtattggcgaggattggctggctgccaaagga

SEQ ID NO: 4912 - protein, 841 aa, synthetic construct
  REGION 1..841: note = Variant of DNA polymerase I from Thermus sp. strain 2.9
MHHHHHHGGSGVLPVFEHKGRVLLVDGHHLAYRNFFALKGLTTSLGEPVQGVYGFAKSLLKALKEDGDVVIVVFDAKAPSFRHEAYEAYKAGRAPTPEDFPRQLFLMKELVDLLGLERLEVPGFEADDVLATLAKKAEDEGYEVQILTADRDLFQLLSPRISVLHPEGHRITPEWLWEKYGLRPEQWVDFRALAGDKSDNIPGVKGIGEKTALKLLKEWGSLENLLKNLDQVKPESVREKILAHLEDLKLSRELSRVRTDLPLEVDFGRRREPDWEGLKAFLERLEFGSLQHEFGLLENPLLAEEAPWPPPEGAFLGYRLSRPEPMWAELLALAASAQGRVYRAEDPHGALRGLFEVRGLLAKDLAVVALREGLDLPPTDDPMLLAYLLDPSNTTPEGVARRYGGEWTEDAAKRALLAERLHENLRGRLQGEERLLWLYEEVEKPLSVVLAHMEATGVKLDVAYLENLSLEVAAHMRRLEEEVFRLAGRSFRLNSRDQLERVLFDELGLPPIGKTEKTGKRSTSAAVLDALREVHPIVDKILQYREMAKLKGTYIDRLPALVHPKTGRLHTRFNQTATATGRLSSSDPNLQNIPVRTPLGQKIRRAFVAEEGWRLVALDYRQIELRVLAHLSGDENLIRVFQEGKDIHTQTASWMFGLSAEAIDPLMRRAAKTINFGVLYGMSAFRLSQELGIPYEEAQAFIQKYFQSYPKVKAWIEKTLREGRHRGYVETLFGRRRYVPDLNARVKGKREAAERMAFNMPVQGTAADLMKLAMVRLFPQLREVGARMLLQVHDELLLEAPKERAEEVAALAKEVMEGVWPLAVPLEVEVGIGEDWLAAKG

SEQ ID NO: 4913 - DNA, 2523 bp, synthetic construct
  misc_feature 1..2523: note = Variant of DNA polymerase I from Thermus sp. strain 2.9
  source 1..2523: mol_type = other DNA
atgcaccatcatcatcatcatggcggtagcggcgtgttaccggtgttcgagcctaaaggtcgcgtgcttctggttgatggccatcatctcgcgtatcgtaacttctttgccctgaaaggattaaccaccagcctgggcgagccggtacagggtgtctacggctttgcaaagtcgctcctgaaagctctgaaagaagacggtgatgtggtgattgttgtctttgatgcgaaagcgccaagttttcgccacgaagcgtacgaagcttacaaagccgggcgtgctccaacgccggaagactttcctcgccaattggcgcttatgaaggaattagtggatttgcttggcctcgaacgcttggaagttcccggtttcgaggcagacgacgtattagcgactctcgcaaagaaagccgaacgtgagggctatgaagtccagatcttgacagcagatcgcgatcttttccagcttttatctccgcgcatctcggtgttacacccggaagggcatcgtatcaccccggaatggctctgggagaaatatggtttgcgtcccgaacaatgggtggattttcgcgccttagcaggcgatccgagcgacaatattccgggagttaaaggtatcggcgagaagacggcgctcaagctccttaaagaatgggggtcgttggagaacttgcttaagaatttagatcaggtcaaaccagagtcagtgcgtgagaagattcttgctcacctcgaagacctcaaattaagccgcgaattgtcccgtgtacgcaccgatttgccgctcgaagttgatttcggtcgccgccgcgaacctgactgggagggtcttaaagcgtttttagagcgtcttgaatttggttcgctcttgcatgaattcggccttttagaaagcccgttactggccgaagaagcaccttggccaccgcccgagggcgcgtttttaggttaccgtttgagtcgcccggaaccgatgtgggccgaattactggctcttgcagcgtctgcccagggacgtgtgtatcgcgcggaagaccctcatggtgcgctccgcggcctcttcgaagtccgtggactccttgccaaagacttagctgttgttgcattgcgcgaaggtcttgatttacctccgactgatgatccaatgcttcttgcgtacctcttggacccgtcaaacacgacgcccgaaggcgtagcccgtcgttacggcggcgagtggaccgaagatgcagcgaaacgcgcgttattggccgaacgtttgcacgccaatttattaggacgtttgcaaggcgaggaacgtctcctctggctttacgaagaagtggagaaaccattgagtcgcgtgctcgcgcatatggaagctaccggtgtcaaattagacgtggcgtatttggagaatctcagccttgaagttgctgcccacatgcgccgcttggaggaagaagtattccgtttagcaggccgttcctttcgccttaactctcgcgatcagttagaacgtgtgttgttcgatgaacttggtctccctcctatcggcaagacagagaagaccggtaaacgtagcacttcagcggcggttttagaagctcttcgcgaagtccatcccattgtggacaagatcttgcagtaccgcgaactcgcgaaattgaaaggcacctatattgaccgtcttccggcattagtccacccgaaaacgggacgcctccatacccgcttcaaccaaacagccacggcgaccggtcgtttgtcctcctctgatccaaaccttcagaatattccagtacgtaccccattgggccagaagatccgccgtgcgtttgtagctgaggagggttggcgtttagtggccctcgattatcgtcaaattgaattacgtgtccttgcccatctttctggcgatgagaacctcatccgcgtgtttcaggaaggcaaagacattcacactcaaacggcaagctggatgtttggattatcagctgaagcgatcgatcctttgatgcgtcgtgcagcgaagaccatcaatttcggtgttctctacggtatgagtgcctttcgtttgtcgcaggaattaggcattccctatgaagaagctcaggcgttcattcagaaatactttcaaagctatcccaaagttaaagcatggatcgagaagactctccgtgaaggccgcacacgtggttacgtagagaccttatttggacgtcgccgctatgttcccgatttaaacgctcgcgtgaaaggcaagcgtgaagtggccgaacgcatggcgttcaacatgcctgtacagggcacggcagctgacctcatgaaacttgcaatggtgcgcctttttccacaattgcgtgaagttggtgcccgcatgctcttgcaggtccacgatgaactcttgttagaagcgccaaaagagcgtgcggaagaggtggcagccctcgcgaaagaagttatggaaggcgtgtggcccttagcggtgcctcttgaagtcgaagttggtattggcgaggattggctggctgccaaagga

SEQ ID NO: 4914 - protein, 841 aa, synthetic construct
  REGION 1..841: note = Variant of DNA polymerase I from Thermus sp. strain 2.9
MHHHHHHGGSGVLPVFEPKGRVLLVDGHHLAYRNFFALKGLTTSLGEPVQGVYGFAKSLLKALKEDGDVVIVVFDAKAPSFRHEAYEAYKAGRAPTPEDFPRQLALMKELVDLLGLERLEVPGFEADDVLATLAKKAEREGYEVQILTADRDLFQLLSPRISVLHPEGHRITPEWLWEKYGLRPEQWVDFRALAGDPSDNIPGVKGIGEKTALKLLKEWGSLENLLKNLDQVKPESVREKILAHLEDLKLSRELSRVRTDLPLEVDFGRRREPDWEGLKAFLERLEFGSLLHEFGLLESPLLAEEAPWPPPEGAFLGYRLSRPEPMWAELLALAASAQGRVYRAEDPHGALRGLFEVRGLLAKDLAVVALREGLDLPPTDDPMLLAYLLDPSNTTPEGVARRYGGEWTEDAAKRALLAERLHANLLGRLQGEERLLWLYEEVEKPLSRVLAHMEATGVKLDVAYLENLSLEVAAHMRRLEEEVFRLAGRSFRLNSRDQLERVLFDELGLPPIGKTEKTGKRSTSAAVLEALREVHPIVDKILQYRELAKLKGTYIDRLPALVHPKTGRLHTRFNQTATATGRLSSSDPNLQNIPVRTPLGQKIRRAFVAEEGWRLVALDYRQIELRVLAHLSGDENLIRVFQEGKDIHTQTASWMFGLSAEAIDPLMRRAAKTINFGVLYGMSAFRLSQELGIPYEEAQAFIQKYFQSYPKVKAWIEKTLREGRTRGYVETLFGRRRYVPDLNARVKGKREVAERMAFNMPVQGTAADLMKLAMVRLFPQLREVGARMLLQVHDELLLEAPKERAEEVAALAKEVMEGVWPLAVPLEVEVGIGEDWLAAKG

SEQ ID NO: 4915 - DNA, 2523 bp, synthetic construct
  misc_feature 1..2523: note = Variant of DNA polymerase I from Thermus sp. strain 2.9
  source 1..2523: mol_type = other DNA
atgcaccatcatcatcatcatggcggtagcggcgtgttaccggtgttcgagcctaaaggtcgcgtgcttctggttgatggccatcatctcgcgtatcgtaacttctttgccctgaaaggattaaccaccagcctgggcgagccggtacagggtgtctacggctttgcaaagtcgctcctgaaagctctgaaagaagacggtgatgtggtgattgttgtctttgatgcgaaagcgccaagttttcgccacgaagcgtacgaagcttacaaagccgggcgtgctccaacgccggaagactttcctcgccaattggcgcttatgaaggaattagtggatttgcttggcctcgaacgcttggaagttcccggtttcgaggcagacgacgtattagcgactctcgcaaagaaagccgaacgtgagggctatgaagtccagatcttgacagcagatcgcgatcttttccagcttttatctccgcgcatctcggtgttacacccggaagggcatcgtatcaccccggaatggctctgggagaaatatggtttgcgtcccgaacaatgggtggattttcgcgccttagcaggcgatccgagcgacaatattccgggagttaaaggtatcggcgagaagacggcgctcaagctccttaaagaatgggggtcgttggagaacttgcttaagaatttagatcaggtcaaaccagagtcagtgcgtgagaagattcttgctcacctcgaagacctcaaattaagccgcgaattgtcccgtgtacgcaccgatttgccgctcgaagttgatttcggtcgccgccgcgaacctgactgggagggtcttaaagcgtttttagagcgtcttgaatttggttcgctcttgcatgaattcggccttttagaaagcccgttactggccgaagaagcaccttggccaccgcccgagggcgcgtttttaggttaccgtttgagtcgcccggaaccgatgtgggccgaattactggctcttgcagcgtctgcccagggacgtgtgtatcgcgcggaagaccctcatggtgcgctccgcggcctcttcgaagtccgtggactccttgccaaagacttagctgttgttgcattgcgcgaaggtcttgatttacctccgactgatgatccaatgcttcttgcgtacctcttggacccgtcaaacacgacgcccgaaggcgtagcccgtcgttacggcggcgagtggaccgaagatgcagcgaaacgcgcgttattggccgaacgtttgcacgccaatttattaggacgtttgcaaggcgaggaacgtctcctctggctttacgaagaagtggagaaaccattgagtcgcgtgctcgcgcatatggaagctaccggtgtcaaattagacgtggcgtatttggagaatctcagccttgaagttgctgcccacatgcgccgcttggaggaagaagtattccgtttagcaggccgttcctttcgccttaactctcgcgatcagttagaacgtgtgttgttcgatgaacttggtctccctcctatcggcaagacagagaagaccggtaaacgtagcacttcagcggcggttttagaagctcttcgcgaagtccatcccattgtggacaagatcttgcagtaccgcgaactcgcgaaattgaaaggcacctatattgaccgtcttccggcattagtccacccgaaaacgggacgcctccatacccgcttcaaccaaacagccacggcgaccggtcgtttgtcctcctctgatccaaaccttcagaatattccagtacgtgtgccattgggccagaagatccgccgtgcgtttgtagctgaggagggttggcgtttagtggccctcgattatcgtcaaattgaattacgtgtccttgcccatctttctggcgatgagaacctcatccgcgtgtttcaggaaggcaaagacattcacactcaaacggcaagctggatgtttggattatcagctgaagcgatcgatcctttgatgcgtcgtgcagcgaagaccatcaatttcggtgttctctacggtatgagtgcctttcgtttgtcgcaggaattaggcattccctatgaagaagctcaggcgttcattcagaaatactttcaaagctatcccaaagttaaagcatggatcgagaagactctccgtgaaggccgcacacgtggttacgtagagaccttatttggacgtcgccgctatgttcccgatttaaacgctcgcgtgaaaggcaagcgtgaagccgccgaacgcatggcgttcaacatgcctgtacagggcacggcagctgacctcatgaaacttgcaatggtgcgcctttttccacaattgcgtgaagttggtgcccgcatgctcttgcaggtccacgatgaactcttgttagaagcgccaaaagagcgtgcggaagaggtggcagccctcgcgaaagaagttatggaaggcgtgtggcccttagcggtgcctcttgaagtcgaagttggtattggcgaggattggctggctgccaaagga

SEQ ID NO: 4916 - protein, 841 aa, synthetic construct
  REGION 1..841: note = Variant of DNA polymerase I from Thermus sp. strain 2.9
MHHHHHHGGSGVLPVFEPKGRVLLVDGHHLAYRNFFALKGLTTSLGEPVQGVYGFAKSLLKALKEDGDVVIVVFDAKAPSFRHEAYEAYKAGRAPTPEDFPRQLALMKELVDLLGLERLEVPGFEADDVLATLAKKAEREGYEVQILTADRDLFQLLSPRISVLHPEGHRITPEWLWEKYGLRPEQWVDFRALAGDPSDNIPGVKGIGEKTALKLLKEWGSLENLLKNLDQVKPESVREKILAHLEDLKLSRELSRVRTDLPLEVDFGRRREPDWEGLKAFLERLEFGSLLHEFGLLESPLLAEEAPWPPPEGAFLGYRLSRPEPMWAELLALAASAQGRVYRAEDPHGALRGLFEVRGLLAKDLAVVALREGLDLPPTDDPMLLAYLLDPSNTTPEGVARRYGGEWTEDAAKRALLAERLHANLLGRLQGEERLLWLYEEVEKPLSRVLAHMEATGVKLDVAYLENLSLEVAAHMRRLEEEVFRLAGRSFRLNSRDQLERVLFDELGLPPIGKTEKTGKRSTSAAVLEALREVHPIVDKILQYRELAKLKGTYIDRLPALVHPKTGRLHTRFNQTATATGRLSSSDPNLQNIPVRVPLGQKIRRAFVAEEGWRLVALDYRQIELRVLAHLSGDENLIRVFQEGKDIHTQTASWMFGLSAEAIDPLMRRAAKTINFGVLYGMSAFRLSQELGIPYEEAQAFIQKYFQSYPKVKAWIEKTLREGRTRGYVETLFGRRRYVPDLNARVKGKREAAERMAFNMPVQGTAADLMKLAMVRLFPQLREVGARMLLQVHDELLLEAPKERAEEVAALAKEVMEGVWPLAVPLEVEVGIGEDWLAAKG

SEQ ID NO: 4917 - DNA, 2523 bp, synthetic construct
  misc_feature 1..2523: note = Variant of DNA polymerase I from Thermus sp. strain 2.9
  source 1..2523: mol_type = other DNA
atgcaccatcatcatcatcatggcggtagcggcgtgttaccggtgttcgagcataaaggtcgcgtgcttctggttgatggccatcatctcgcgtatcgtaacttctttgccctgaaaggattaaccaccagcctgggcgagccggtacagggtgtctacggctttgcaaagtcgctcctgaaagctctgaaagaagacggtgatgtggtgattgttgtctttgatgcgaaagcgccaagttttcgccacgaagcgtacgaagcttacaaagccgggcgtgctccaacgccggaagactttcctcgccaattggcgcttatgaaggaattagtggatttgcttggcctcgaacgcttggaagttcccggtttcgaggcagacgacgtattagcgactctcgcaaagaaagccgaacgtgagggctatgaagtccagatcttgacagcagatcgcgatcttttccagcttttatctccgcgcatctcggtgttacacccggaagggcatcgtatcaccccggaatggctctgggagaaatatggtttgcgtcccgaacaatgggtggattttcgcgccttagcaggcgataagagcgacaatattccgggagttaaaggtatcggcgagaagacggcgctcaagctccttaaagaatgggggtcgttggagaacttgcttaagaatttagatcaggtcaaaccagagtcagtgcgtgagaagattcttgctcacctcgaagacctcgagttaagccgcgaattgtcccgtgtacgcaccgatttgccgctcgaagttgatttcggtcgccgccgcgaacctgactgggagggtcttaaagcgtttttagagcgtcttgaatttggttcgctccagcatgaattcggccttttagaaagcccgttactggccgaagaagcaccttggccaccgcccgagggcgcgtttttaggttaccgtttgagtcgcccggaaccgatgtgggccgaattactggctcttgcagcgtctgcccagggacgtgtgtatcgcgcggaagaccctcatggtgcgctccgcggcctcttcgaagtccgtggactccttgccaaagacttagctgttgttgcattgcgcgaaggtcttgatttacctccgactgatgatccaatgcttcttgcgtacctcttggacccgtcaaacacgacgcccgaaggcgtagcccgtcgttacggcggcgagtggaccgaagatgcagcgaaacgcgcgttattggccgaacgtttgcacgccaatttattaggacgtttgcaaggcgaggaacgtctcctctggctttacgaagaagtggagaaaccattgagtcgtgtgctcgctcatatggaagctaccggtgtcaaattagacgtggcgtatttggagaatctcagccttgaagttgctgcccacatgcgccgcttggaggaagaagtagtccgtttagcaggccgttcctttcgccttaactctcgcgatcagttagaacgtgtgttgttcgatgaacttggtctccctcctatcggcaagacagagaagaccggtaaacgtagcacttcagcggcggttttagaagctcttcgcgaagtccatcccattgtggacaagatcttgcagtaccgcgaactcgcgaaattgaaaggcacctatattgaccgtcttccggcattagtccacccgaaaacgggacgcctccatacccgcttcaaccaaacagccacggcgaccggtcgtttgtcctcctctgatccaaaccttcagaatattccagtacgtaccccattgggccagaagatccgccgtgcgtttgtagctgaggagggttggcgtttagtggccctcgattatcgtcaaattgaattacgtgtccttgcccatctttctggcgatgagaacctcatccgcgtgtttcaggaaggcaaagacattcacactcaaacggcaagctggatgtttggattatcagctgaagcgatcgatcctttgatgcgtcgtgcagcgaagaccatcaatttcggtgttctctacggtatgagtgcctttcgtttgtcgcaggaattaggcattccctatgaagaagctcaggcgttcattcagaaatactttcaaagctatcccaaagttaaagcatggatcgagaagactctccgtgaaggccgcacacgtggttacgtagagaccttatttggacgtcgccgctatgttcccgatttaaacgctcgcgtgaaaggcaagcgtgaagccgccgaacgcatggcgttcaacatgcctgtacagggcacggcagctgacctcatgaaacttgcaatggtgcgcctttttccacaattgcgtgaagttggtgcccgcatgctcttgcaggtccacgatgaactcttgttagaagcgccaaaagagcgtgcggaagaggtggcagccctcgcgaaagaagttatggaaggcgtgtggcccttagcggtgcctcttgaagtcgaagttggtattggcgaggattggctggctgccaaagga

SEQ ID NO: 4918 - protein, 841 aa, synthetic construct
  REGION 1..841: note = Variant of DNA polymerase I from Thermus sp. strain 2.9
MHHHHHHGGSGVLPVFEHKGRVLLVDGHHLAYRNFFALKGLTTSLGEPVQGVYGFAKSLLKALKEDGDVVIVVFDAKAPSFRHEAYEAYKAGRAPTPEDFPRQLALMKELVDLLGLERLEVPGFEADDVLATLAKKAEREGYEVQILTADRDLFQLLSPRISVLHPEGHRITPEWLWEKYGLRPEQWVDFRALAGDKSDNIPGVKGIGEKTALKLLKEWGSLENLLKNLDQVKPESVREKILAHLEDLELSRELSRVRTDLPLEVDFGRRREPDWEGLKAFLERLEFGSLQHEFGLLESPLLAEEAPWPPPEGAFLGYRLSRPEPMWAELLALAASAQGRVYRAEDPHGALRGLFEVRGLLAKDLAVVALREGLDLPPTDDPMLLAYLLDPSNTTPEGVARRYGGEWTEDAAKRALLAERLHANLLGRLQGEERLLWLYEEVEKPLSRVLAHMEATGVKLDVAYLENLSLEVAAHMRRLEEEVVRLAGRSFRLNSRDQLERVLFDELGLPPIGKTEKTGKRSTSAAVLEALREVHPIVDKILQYRELAKLKGTYIDRLPALVHPKTGRLHTRFNQTATATGRLSSSDPNLQNIPVRTPLGQKIRRAFVAEEGWRLVALDYRQIELRVLAHLSGDENLIRVFQEGKDIHTQTASWMFGLSAEAIDPLMRRAAKTINFGVLYGMSAFRLSQELGIPYEEAQAFIQKYFQSYPKVKAWIEKTLREGRTRGYVETLFGRRRYVPDLNARVKGKREAAERMAFNMPVQGTAADLMKLAMVRLFPQLREVGARMLLQVHDELLLEAPKERAEEVAALAKEVMEGVWPLAVPLEVEVGIGEDWLAAKG

SEQ ID NO: 4919 - DNA, 2523 bp, synthetic construct
  misc_feature 1..2523: note = Variant of DNA polymerase I from Thermus sp. strain 2.9
  source 1..2523: mol_type = other DNA
atgcaccatcatcatcatcatggcggtagcggcgtgttaccggtgttcgagcataaaggtcgcgtgcttctggttgatggccatcatctcgcgtatcgtaacttctttgccctgaaaggattaaccaccagcctgggcgagccggtacagggtgtctacggctttgcaaagtcgctcctgaaagctctgaaagaagacggtgatgtggtgattgttgtctttgatgcgaaagcgccaagttttcgccacgaagcgtacgaagcttacaaagccgggcgtgctccaacgccggaagactttcctcgccaattggcgcttatgaaggaattagtggatttgcttggcctcgaacgcttggaagttcccggtttcgaggcagacgacgtattagcgactctcgcaaagaaagccgaacgtgagggctatgaagtccagatcttgacagcagatcgcgatcttttccagcttttatctccgcgcatctcggtgttacacccggaagggcatcgtatcaccccggaatggctctgggagaaatatggtttgcgtcccgaacaatgggtggattttcgcgccttagcaggcgatccgagcgacaatattccgggagttaaaggtatcggcgagaagacggcgctcaagctccttaaagaatgggggtcgttggagaacttgcttaagaatttagatcaggtcaaaccagagtcagtgcgtgagaagattcttgctcacctcgaagacctcaaattaagccgcgaattgtcccgtgtacgcaccgatttgccgctcgaagttgatttcggtcgccgccgcgaacctgactgggagggtcttaaagcgtttttagagcgtcttgaatttggttcgctcctgcatgaattcggccttttagaaagcccgttagtggccgaagaagcaccttggccaccgcccgagggcgcgtttttaggttaccgtttgagtcgcccggaaccgatgtgggccgaattactggctcttgcagcgtctgcccagggacgtgtgtatcgcgcggaagaccctcatggtgcgctccgcggcctcttcgaagtccgtggactccttgccaaagacttagctgttgttgcattgcgcgaaggtcttgatttacctccgactgatgatccaatgcttcttgcgtacctcttggacccgtcaaacacgacgcccgaaggcgtagcccgtcgttacggcggcgagtggaccgaagatgcagcgaaacgcgcgttattggccgaacgtttgcacgcaaatttattaggacgtttgcaaggcgagaaacgtctcctctggctttacgaagaagtggagaaaccattgagtcgcgtgctcgcgcatatggaagctaccggtgtcaaattagacgtggcgtatttggagaatctcagccttgaagttgctgcccacatgcgccgcttggaggaagaagtattccgtttagcaggccgttcctttcgccttaactctcgcgatcagttagaacgtgtgttgttcgatgaacttggtctccctcctatcggcaagacagagaagaccggtaaacgtagcacttcagcggcggttttagaagctcttcgcgaagtccatcccattgtggacaagatcttgcagtaccgcgaaatggcgaaattgaaaggcacctatattgaccgtcttccggcattagtccacccgaaaacgggacgcctccatacccgcttcaaccaaacagccacggcgaccggtcgtttgtcctcctctgatccaaaccttcagaatattccagtacgtaccccattgggccagaagatccgccgtgcgtttgtagctgaggagggttggcgtttagtggccctcgattatcgtcaaattgaattacgtgtccttgcccatctttctggcgatgagaacctcatccgcgtgtttcaggaaggcaaagacattcacactcaaacggcaagctggatgtttggattaagtgctgaagcgatcgatcctttgatgcgtcgtgcagcgaagaccatcaatttcggtgttctctacggtatgagtccatttcgtttgtcgcaggaattaggcattccctatgaagaagctcaggcgttcattcagaaatactttcaaagctatcccaaagttaaagcatggatcgagaagactctccgtgaaggccgcacacgtggttacgtagagaccttatttggacgtcgccgctatgttcccgatttaaacgctcgcgtgaaaggcaagcgtgaagccgccgaacgcatggcgttcaacatgcctgtacagggcacggcagctgacctcatgaaacttgcaatggtgcgcctttttccacaattgcgtgaagttggtgcccgcatgctcttgcaggtccacgatgaactcttgttagaagcgccaaaagagcgtgcggaagaggtggcagccctcgcgaaagaagttatggaaggcgtgtggcccttagcggtgcctcttgaagtcgaagttggtattggcgaggattggctggctgccaaagga

SEQ ID NO: 4920 - protein, 841 aa, synthetic construct
  REGION 1..841: note = Variant of DNA polymerase I from Thermus sp. strain 2.9
MHHHHHHGGSGVLPVFEHKGRVLLVDGHHLAYRNFFALKGLTTSLGEPVQGVYGFAKSLLKALKEDGDVVIVVFDAKAPSFRHEAYEAYKAGRAPTPEDFPRQLALMKELVDLLGLERLEVPGFEADDVLATLAKKAEREGYEVQILTADRDLFQLLSPRISVLHPEGHRITPEWLWEKYGLRPEQWVDFRALAGDPSDNIPGVKGIGEKTALKLLKEWGSLENLLKNLDQVKPESVREKILAHLEDLKLSRELSRVRTDLPLEVDFGRRREPDWEGLKAFLERLEFGSLLHEFGLLESPLVAEEAPWPPPEGAFLGYRLSRPEPMWAELLALAASAQGRVYRAEDPHGALRGLFEVRGLLAKDLAVVALREGLDLPPTDDPMLLAYLLDPSNTTPEGVARRYGGEWTEDAAKRALLAERLHANLLGRLQGEKRLLWLYEEVEKPLSRVLAHMEATGVKLDVAYLENLSLEVAAHMRRLEEEVFRLAGRSFRLNSRDQLERVLFDELGLPPIGKTEKTGKRSTSAAVLEALREVHPIVDKILQYREMAKLKGTYIDRLPALVHPKTGRLHTRFNQTATATGRLSSSDPNLQNIPVRTPLGQKIRRAFVAEEGWRLVALDYRQIELRVLAHLSGDENLIRVFQEGKDIHTQTASWMFGLSAEAIDPLMRRAAKTINFGVLYGMSPFRLSQELGIPYEEAQAFIQKYFQSYPKVKAWIEKTLREGRTRGYVETLFGRRRYVPDLNARVKGKREAAERMAFNMPVQGTAADLMKLAMVRLFPQLREVGARMLLQVHDELLLEAPKERAEEVAALAKEVMEGVWPLAVPLEVEVGIGEDWLAAKG

SEQ ID NO: 4921 - DNA, 2523 bp, synthetic construct
  misc_feature 1..2523: note = Variant of DNA polymerase I from Thermus sp. strain 2.9
  source 1..2523: mol_type = other DNA
atgcaccatcatcatcatcatggcggtagcggcgtgttaccggtgttcgagcctaaaggtcgcgtgcttctggttgatggccatcatctcgcgtatcgtaacttctttgccctgaaaggattaaccaccagcctgggcgagccggtacagggtgtctacggctttgcaaagtcgctcctgaaagctctgaaagaagacggtgatgtggtgattgttgtctttgatgcgaaagcgccaagttttcgccacgaagcgtacgaagcttacaaagccgggcgtgctccaacgccggaagactttcctcgccaattggcgcttatgaaggaattagtggatttgcttggcctcgaacgcttggaagttcccggtttcgaggcagacgacgtattagcgactctcgcaaagaaagccgaacgtgagggctatgaagtccagatcttgacagcagatcgcgatcttttccagcttttatctccgcgcatctcggtgttacacccggaagggcatcgtatcaccccggaatggctctgggagaaatatggtttgcgtcccgaacaatgggtggattttcgcgccttagcaggcgatccgagcgacaatattccgggagttaaaggtatcggcgagaagacggcgctcaagctccttaaagaatgggggtcgttggagaacttgcttaagaatttagatcaggtcaaaccagagtcagtgcgtgagaagattcttgctcacctcgaagacctcaaattaagccgcgaattgtcccgtgtacgcaccgatttgccgctcgaagttgatttcggtcgccgccgcgaacctgactgggagggtcttaaagcgtttttagagcgtcttgaatttggttcgctccagcatgaattcggccttttagaaagcccgttactggccgaagaagcaccttggccaccgcccgagggcgcgtttttaggttaccgtttgagtcgcccggaaccgatgtgggccgaattactggctcttgcagcgtctgcccagggacgtgtgtatcgcgcggaagaccctcatggtgcgctccgcggcctcttcgaagtccgtggactccttgccaaagacttagctgttgttgcattgcgcgaaggtcttgatttacctccgactgatgatccaatgcttcttgcgtacctcttggacccgtcaaacacgacgcccgaaggcgtagcccgtcgttacggcggcgagtggaccgaagatgcagcgaaacgcgcgttattggccgaacgtttgcacgcaaatttattaggacgtttgcaaggcgaggaacgtctcctctggctttacgaagaagtggagaaaccattgagtcgcgtgctcgcgcatatggaagctaccggtgtcaaattagacgtggcgtatttggagaatctcagccttgaagttgctgcccacatgcgccgcttggaggaagaagtattccgtttagcaggccgttcctttcgccttaactctcgcgatcagttagaacgtgtgttgttcgatgaacttggtctccctcctatcggcaagacagagaagaccggtaaacgtagcacttcacgcgcggttttagaggctcttcgcgaagtccatcccattgtggacaagatcttgcagtaccgcgaactggcgaaattgaaaggcacctatattgaccgtcttccggcattagtccacccgaaaacgggacgcctccatacccgcttcaaccaaacagccacggcgaccggtcgtttgtcctcctctgatccaaaccttcagaatattccagtacgtaccccattgggccagaagatccgccgtgcgtttgtagctgaggagggttggcgtttagtggccctcgattatcgtcaaattgaattacgtgtccttgcccatctttctggcgatgagaacctcatccgcgtgtttcaggaaggcaaagacattcacactcaaacggcaagctggatgtttggattatcagctgaagcgatcgatcctttgatgcgtcgtgcagcgaagaccatcaatttcggtgttctctacggtatgagtgcatttcgtttgtcgcaggaattaggcattccctatgaagaagctcaggcgttcattcagaaatactttcaaagctatcccaaagttaaagcatggatcgagaagactctccgtgaaggccgcacacgtggttacgtagagaccttatttggacgtcgccgctatgttcccgatttaaacgctcgcgtgaaaggcaagcgtgaagccgccgaacgcatggcgttcaacatgcctgtacagggcacggcagctgacctcatgaaacttgcaatggtgcgcctttttccacaattgcgtgaagttggtgcccgcatgctcttgcaggtccacgatgaactcttgttagaagcgccaaaagagcgtgcggaagaggtggcagccctcgcgaaagaagttatggaaggcgtgtggcccttagcggtgcctcttgaagtcgaagttggtattggcgaggattggctggctgccaaagga

SEQ ID NO: 4922 - protein, 841 aa, synthetic construct
  REGION 1..841: note = Variant of DNA polymerase I from Thermus sp. strain 2.9
MHHHHHHGGSGVLPVFEPKGRVLLVDGHHLAYRNFFALKGLTTSLGEPVQGVYGFAKSLLKALKEDGDVVIVVFDAKAPSFRHEAYEAYKAGRAPTPEDFPRQLALMKELVDLLGLERLEVPGFEADDVLATLAKKAEREGYEVQILTADRDLFQLLSPRISVLHPEGHRITPEWLWEKYGLRPEQWVDFRALAGDPSDNIPGVKGIGEKTALKLLKEWGSLENLLKNLDQVKPESVREKILAHLEDLKLSRELSRVRTDLPLEVDFGRRREPDWEGLKAFLERLEFGSLQHEFGLLESPLLAEEAPWPPPEGAFLGYRLSRPEPMWAELLALAASAQGRVYRAEDPHGALRGLFEVRGLLAKDLAVVALREGLDLPPTDDPMLLAYLLDPSNTTPEGVARRYGGEWTEDAAKRALLAERLHANLLGRLQGEERLLWLYEEVEKPLSRVLAHMEATGVKLDVAYLENLSLEVAAHMRRLEEEVFRLAGRSFRLNSRDQLERVLFDELGLPPIGKTEKTGKRSTSRAVLEALREVHPIVDKILQYRELAKLKGTYIDRLPALVHPKTGRLHTRFNQTATATGRLSSSDPNLQNIPVRTPLGQKIRRAFVAEEGWRLVALDYRQIELRVLAHLSGDENLIRVFQEGKDIHTQTASWMFGLSAEAIDPLMRRAAKTINFGVLYGMSAFRLSQELGIPYEEAQAFIQKYFQSYPKVKAWIEKTLREGRTRGYVETLFGRRRYVPDLNARVKGKREAAERMAFNMPVQGTAADLMKLAMVRLFPQLREVGARMLLQVHDELLLEAPKERAEEVAALAKEVMEGVWPLAVPLEVEVGIGEDWLAAKG

SEQ ID NO: 4923 - DNA, 2523 bp, synthetic construct
  misc_feature 1..2523: note = Variant of DNA polymerase I from Thermus sp. strain 2.9
  source 1..2523: mol_type = other DNA
atgcaccatcatcatcatcatggcggtagcggcgtgttaccggtgttcgagcctaaaggtcgcgtgcttctggttgatggccatcatctcgcgtatcgtaacttctttgccctgaaaggattaaccaccagcctgggcgagccggtacagggtgtctacggctttgcaaagtcgctcctgaaagctctgaaagaagacggtgatgtggtgattgttgtctttgatgcgaaagcgccaagttttcgccacgaagcgtacgaagcttacaaagccgggcgtgctccaacgccggaagactttcctcgccaattggcgcttatgaaggaattagtggatttgcttggcctcgaacgcttggaagttcccggtttcgaggcagacgacgtattagcgactctcgcaaagaaagccgaacgtgagggctatgaagtccagatcttgacagcagatcgcgatcttttccagcttttatctccgcgcatctcggtgttacacccggaagggcatcgtatcaccccggaatggctctgggagaaatatggtttgcgtcccgaacaatgggtggattttcgcgccttagcaggcgatccgagcgacaatattccgggagttaaaggtatcggcgagaagacggcgctcaagctccttaaagaatgggggtcgttggagaacttgcttaagaatttagatcaggtcaaaccagagtcagtgcgtgagaagattcttgctcacctcgaagacctcaaattaagccgcgaattgtcccgtgtacgcaccgatttgccgctcgaagttgatttcggtcgccgccgcgaacctgactgggagggtcttaaagcgtttttagagcgtcttgaatttggttcgctcttgcatgaattcggccttttagaaagcccgttactggccgaagaagcaccttggccaccgcccgagggcgcgtttttaggttaccgtttgagtcgcccggaaccgatgtgggccgaattactggctcttgcagcgtctgcccagggacgtgtgtatcgcgcggaagaccctcatggtgcgctccgcggcctcttcgaagtccgtggactccttgccaaagacttagctgttgttgcattgcgcgaaggtcttgatttacctccgactgatgatccaatgcttcttgcgtacctcttggacccgtcaaacacgacgcccgaaggcgtagcccgtcgttacggcggcgagtggaccgaagatgcagcgaaacgcgcgttattggccgaacgtttgcacgccaatttattaggacgtttgcaaggcgaggaacgtctcctctggctttacgaagaagtggagaaaccattgagtcgcgtgctcgcgcatatggaagctaccggtgtcaaattagacgtggcgtatttggagaatctcagccttgaagttgctgcccacatgcgccgcttggaggaagaagtattccgtttagcaggccgttcctttcgccttaactctcgcgatcagttagaacgtgtgttgttcgatgaacttggtctcggtcctatcggcaagacagagaagaccggtaaacgtagcacttcagcggcggttttagaagctcttcgcgaagtccatcccattgtggacaagatcttgcagtaccgcgaactcgcgaaattgaaaggcacctatattgaccgtcttccggcattagtccacccgaaaacgggacgcctccatacccgcttcaaccaaacagccacggcgaccggtcgtttgtcctcctctgatccaaaccttcagaatattccagtacgtaccccattgggccagaagatccgccgtgcgtttgtagctgaggagggttggcgtttagtggccctcgattatcgtcaaattgaattacgtgtccttgcccatctttctggcgatgagaacctcatccgcgtgtttcaggaaggcaaagacattcacactcaaacggcaagctggatgtttggattatcagctgaagcgatcgatcctttgatgcgtcgtgcagcgaagaccatcaatttcggtgttctctacggtatgagtgcctttcgtttgtcgcaggaattaggcattccctatgaagaagctcaggcgttcattcagaaatactttcaaagctatcccaaagttaaagcatggatcgagaagactctccgtgaaggccgcacacgtggttacgtagagaccttatttggacgtcgccgctatgttcccgatttaaacgctcgcgtgaaaggcaagcgtgaagccgccgaacgcatggcgttcaacatgcctgtacagggcacggcagctgacctcatgaaacttgcaatggtgcgcctttttccacaattgcgtgaagttggtgcccgcatgctcttgcaggtccacgatgaactcttgttagaagcgccaaaagagcgtgcggaagaggtggcagccctcgcgaaagaagttatggaaggcgtgtggcccttagcggtgcctcttgaagtcgaagttggtattggcgaggattggctggctgccaaagga

SEQ ID NO: 4924 - protein, 841 aa, synthetic construct
  REGION 1..841: note = Variant of DNA polymerase I from Thermus sp. strain 2.9
MHHHHHHGGSGVLPVFEPKGRVLLVDGHHLAYRNFFALKGLTTSLGEPVQGVYGFAKSLLKALKEDGDVVIVVFDAKAPSFRHEAYEAYKAGRAPTPEDFPRQLALMKELVDLLGLERLEVPGFEADDVLATLAKKAEREGYEVQILTADRDLFQLLSPRISVLHPEGHRITPEWLWEKYGLRPEQWVDFRALAGDPSDNIPGVKGIGEKTALKLLKEWGSLENLLKNLDQVKPESVREKILAHLEDLKLSRELSRVRTDLPLEVDFGRRREPDWEGLKAFLERLEFGSLLHEFGLLESPLLAEEAPWPPPEGAFLGYRLSRPEPMWAELLALAASAQGRVYRAEDPHGALRGLFEVRGLLAKDLAVVALREGLDLPPTDDPMLLAYLLDPSNTTPEGVARRYGGEWTEDAAKRALLAERLHANLLGRLQGEERLLWLYEEVEKPLSRVLAHMEATGVKLDVAYLENLSLEVAAHMRRLEEEVFRLAGRSFRLNSRDQLERVLFDELGLGPIGKTEKTGKRSTSAAVLEALREVHPIVDKILQYRELAKLKGTYIDRLPALVHPKTGRLHTRFNQTATATGRLSSSDPNLQNIPVRTPLGQKIRRAFVAEEGWRLVALDYRQIELRVLAHLSGDENLIRVFQEGKDIHTQTASWMFGLSAEAIDPLMRRAAKTINFGVLYGMSAFRLSQELGIPYEEAQAFIQKYFQSYPKVKAWIEKTLREGRTRGYVETLFGRRRYVPDLNARVKGKREAAERMAFNMPVQGTAADLMKLAMVRLFPQLREVGARMLLQVHDELLLEAPKERAEEVAALAKEVMEGVWPLAVPLEVEVGIGEDWLAAKG

SEQ ID NO: 4925 - DNA, 2523 bp, synthetic construct
  misc_feature 1..2523: note = Variant of DNA polymerase I from Thermus sp. strain 2.9
  source 1..2523: mol_type = other DNA
atgcaccatcatcatcatcatggcggtagcggcgtgttaccggtgttcgagcctaaaggtcgcgtgcttctggttgatggccatcatctcgcgtatcgtaacttctttgccctgaaaggattaaccaccagcctgggcgagccggtacagggtgtctacggctttgcaaagtcgctcctgaaagctctgaaagaagacggtgatgtggtgattgttgtctttgatgcgaaagcgccaagttttcgccacgaagcgtacgaagcttacaaagccgggcgtgctccaacgccggaagactttcctcgccaattggcgcttatgaaggaattagtggatttgcttggcctcgaacgcttggaagttcccggtttcgaggcagacgacgtattagcgactctcgcaaagaaagccgaacgtgagggctatgaagtccagatcttgacagcagatcgcgatcttttccagcttttatctccgcgcatctcggtgttacacccggaagggcatcgtatcaccccggaatggctctgggagaaatatggtttgcgtcccgaacaatgggtggattttcgcgccttagcaggcgatccgagcgacaatattccgggagttaaaggtatcggcgagaagacggcgctcaagctccttaaagaatgggggtcgttggagaacttgcttaagaatttagatcaggtcaaaccagagtcagtgcgtgagaagattcttgctcacctcgaagacctcaaattaagccgcgaattgtcccgtgtacgcaccgatttgccgctcgaagttgatttcggtcgccgccgcgaacctgactgggagggtcttaaagcgtttttagagcgtcttgaatttggttcgctcttgcatgaattcggccttttagaaagcccgttactggccgaagaagcaccttggccaccgcccgagggcgcgtttttaggttaccgtttgagtcgcccggaaccgatgtgggccgaattactggctcttgcagcgtctgcccagggacgtgtgtatcgcgcggaagaccctcatggtgcgctccgcggcctcttcgaagtccgtggactccttgccaaagacttagctgttgttgcattgcgcgaaggtcttgataagcctccgactgatgatccaatgcttcttgcgtacctcttggacccgtcaaacacgacgcccgaaggcgtagcccgtcgttacggcggcgagtggaccgaagatgcagcgaaacgcgcgttattggccgaacgtttgcacgccaatttattaggacgtttgcaaggcgaggaacgtctcctctggctttacgaagaagtggagaaaccattgagtcgcgtgctcgcgcatatggaagctaccggtgtcaaattagacgtggcgtatttggagaatctcagccttgaagttgctgcccacatgcgccgcttggaggaagaagtattccgtttagcaggccgttcctttcgccttaactctcgcgatcagttagaacgtgtgttgttcgatgaacttggtctccctcctatcggcaagacagagaagaccggtaaacgtagcacttcagcggcggttttagaagctcttcgcgaagtccatcccattgtggacaagatcttgcagtaccgcgaactcgcgaaattgaaaggcacctatattgaccgtcttccggcattagtccacccgaaaacgggacgcctccatacccgcttcaaccaaacagccacggcgaccggtcgtttgtcctcctctgatccaaaccttcagaatattccagtacgtaccccattgggccagaagatccgccgtgcgtttgtagctgaggagggttggcgtttagtggccctcgattatcgtcaaattgaattacgtgtccttgcccatctttctggcgatgagaacctcatccgcgtgtttcaggaaggcaaagacattcacactcaaacggcaagctggatgtttggattatcagctgaagcgatcgatcctttgatgcgtcgtgcagcgaagaccatcaatttcggtgttctctacggtatgagtgcctttcgtttgtcgcaggaattaggcattccctatgaagaagctcaggcgttcattcagaaatactttcaaagctatcccaaagttaaagcatggatcgagaagactctccgtgaaggccgcacacgtggttacgtagagaccttatttggacgtcgccgctatgttcccgatttaaacgctcgcgtgaaaggcaagcgtgaagccgccgaacgcatggcgttcaacatgcctgtacagggcacggcagctgacctcatgaaacttgcaatggtgcgcctttttccacaattgcgtgaagttggtgcccgcatgctcttgcaggtccacgatgaactcttgttagaagcgccaaaagagcgtgcggaagaggtggcagccctcgcgaaagaagttatggaaggcgtgtggcccttagcggtgcctcttgaagtcgaagttggtattggcgaggattggctggctgccaaagga

SEQ ID NO: 4926 - protein, 841 aa, synthetic construct
  REGION 1..841: note = Variant of DNA polymerase I from Thermus sp. strain 2.9
MHHHHHHGGSGVLPVFEPKGRVLLVDGHHLAYRNFFALKGLTTSLGEPVQGVYGFAKSLLKALKEDGDVVIVVFDAKAPSFRHEAYEAYKAGRAPTPEDFPRQLALMKELVDLLGLERLEVPGFEADDVLATLAKKAEREGYEVQILTADRDLFQLLSPRISVLHPEGHRITPEWLWEKYGLRPEQWVDFRALAGDPSDNIPGVKGIGEKTALKLLKEWGSLENLLKNLDQVKPESVREKILAHLEDLKLSRELSRVRTDLPLEVDFGRRREPDWEGLKAFLERLEFGSLLHEFGLLESPLLAEEAPWPPPEGAFLGYRLSRPEPMWAELLALAASAQGRVYRAEDPHGALRGLFEVRGLLAKDLAVVALREGLDKPPTDDPMLLAYLLDPSNTTPEGVARRYGGEWTEDAAKRALLAERLHANLLGRLQGEERLLWLYEEVEKPLSRVLAHMEATGVKLDVAYLENLSLEVAAHMRRLEEEVFRLAGRSFRLNSRDQLERVLFDELGLPPIGKTEKTGKRSTSAAVLEALREVHPIVDKILQYRELAKLKGTYIDRLPALVHPKTGRLHTRFNQTATATGRLSSSDPNLQNIPVRTPLGQKIRRAFVAEEGWRLVALDYRQIELRVLAHLSGDENLIRVFQEGKDIHTQTASWMFGLSAEAIDPLMRRAAKTINFGVLYGMSAFRLSQELGIPYEEAQAFIQKYFQSYPKVKAWIEKTLREGRTRGYVETLFGRRRYVPDLNARVKGKREAAERMAFNMPVQGTAADLMKLAMVRLFPQLREVGARMLLQVHDELLLEAPKERAEEVAALAKEVMEGVWPLAVPLEVEVGIGEDWLAAKG

SEQ ID NO: 4927 - DNA, 2523 bp, synthetic construct
  misc_feature 1..2523: note = Variant of DNA polymerase I from Thermus sp. strain 2.9
  source 1..2523: mol_type = other DNA
atgcaccatcatcatcatcatggcggtagcggcgtgttaccggtgttcgagcctaaaggtcgcgtgcttctggttgatggccatcatctcgcgtatcgtaacttctttgccctgaaaggattaaccaccagcctgggcgagccggtacagggtgtctacggctttgcaaagtcgctcctgaaagctctgaaagaagacggtgatgtggtgattgttgtctttgatgcgaaagcgccaagttttcgccacgaagcgtacgaagcttacaaagccgggcgtgctccaacgccggaagactttcctcgccaattggcgcttatgaaggaattagtggatttgcttggcctcgaacgcttggaagttcccggtttcgaggcagacgacgtattagcgactctcgcaaagaaagccgaacgtgagggctatgaagtccagatcttgacagcagatcgcgatcttttccagcttttatctccgcgcatctcggtgttacacccggaagggcatcgtatcaccccggaatggctctgggagaaatatggtttgcgtcccgaacaatgggtggattttcgcgccttagcaggcgatccgagcgacaatattccgggagttaaaggtatcggcgagaagacggcgctcaagctccttaaagaatgggggtcgttggagaacttgcttaagaatttagatcaggtcaaaccagagtcagtgcgtgagaagattcttgctcacctcgaagacctcaaattaagccgcgaattgtcccgtgtacgcaccgatttgccgctcgaagttgatttcggtcgccgccgcgaacctgactgggagggtcttaaagcgtttttagagcgtcttgaatttggttcgctcttgcatgaattcggccttttagaaagcccgttactggccgaagaagcaccttggccaccgcccgagggcgcgtttttaggttaccgtttgagtcgcccggaaccgatgtgggccgaattactggctcttgcagcgtctgcccagggacgtgtgtatcgcgcggaagaccctcatggtgcgctccgcggcctcttcgaagtccgtggactccttgccaaagacttagctgttgttgcattgcgcgaaggtcttgatttacctccgactgatgatccaatgcttcttgcgtacctcttggacccgtcaaacacgacgcccgaaggcgtagcccgtcgttacggcggcgagtggaccgaagatgcagcgaaacgcgcgttattggccgaacgtttgcacgccaatttattaggacgtttgcaaggcgaggaacgtctcctctggctttacgaagaagtggagaaaccattgagtcgcgtgctcgcgcatatggaagctaccggtgtcaaattagacgtggcgtatttggagaatctcagccttgaagttgctgcccacatgcgccgcttggaggaagaagtattccgtttagcaggccgttcctttcgccttaactctcgcgatcagttagaacgtgtgttgttcgtggaacttggtctccctcctatcggcaagacagagaagaccggtaaacgtagcacttcagcggcggttttagaagctcttcgcgaagtccatcccattgtggacaagatcttgcagtaccgcgaactcgcgaaattgaaaggcacctatattgaccgtcttccggcattagtccacccgaaaacgggacgcctccatacccgcttcaaccaaacagccacggcgaccggtcgtttgtcctcctctgatccaaaccttcagaatattccagtacgtaccccattgggccagaagatccgccgtgcgtttgtagctgaggagggttggcgtttagtggccctcgattatcgtcaaattgaattacgtgtccttgcccatctttctggcgatgagaacctcatccgcgtgtttcaggaaggcaaagacattcacactcaaacggcaagctggatgtttggattatcagctgaagcgatcgatcctttgatgcgtcgtgcagcgaagaccatcaatttcggtgttctctacggtatgagtgcctttcgtttgtcgcaggaattaggcattccctatgaagaagctcaggcgttcattcagaaatactttcaaagctatcccaaagttaaagcatggatcgagaagactctccgtgaaggccgcacacgtggttacgtagagaccttatttggacgtcgccgctatgttcccgatttaaacgctcgcgtgaaaggcaagcgtgaagccgccgaacgcatggcgttcaacatgcctgtacagggcacggcagctgacctcatgaaacttgcaatggtgcgcctttttccacaattgcgtgaagttggtgcccgcatgctcttgcaggtccacgatgaactcttgttagaagcgccaaaagagcgtgcggaagaggtggcagccctcgcgaaagaagttatggaaggcgtgtggcccttagcggtgcctcttgaagtcgaagttggtattggcgaggattggctggctgccaaagga

SEQ ID NO: 4928 - protein, 841 aa, synthetic construct
  REGION 1..841: note = Variant of DNA polymerase I from Thermus sp. strain 2.9
MHHHHHHGGSGVLPVFEPKGRVLLVDGHHLAYRNFFALKGLTTSLGEPVQGVYGFAKSLLKALKEDGDVVIVVFDAKAPSFRHEAYEAYKAGRAPTPEDFPRQLALMKELVDLLGLERLEVPGFEADDVLATLAKKAEREGYEVQILTADRDLFQLLSPRISVLHPEGHRITPEWLWEKYGLRPEQWVDFRALAGDPSDNIPGVKGIGEKTALKLLKEWGSLENLLKNLDQVKPESVREKILAHLEDLKLSRELSRVRTDLPLEVDFGRRREPDWEGLKAFLERLEFGSLLHEFGLLESPLLAEEAPWPPPEGAFLGYRLSRPEPMWAELLALAASAQGRVYRAEDPHGALRGLFEVRGLLAKDLAVVALREGLDLPPTDDPMLLAYLLDPSNTTPEGVARRYGGEWTEDAAKRALLAERLHANLLGRLQGEERLLWLYEEVEKPLSRVLAHMEATGVKLDVAYLENLSLEVAAHMRRLEEEVFRLAGRSFRLNSRDQLERVLFVELGLPPIGKTEKTGKRSTSAAVLEALREVHPIVDKILQYRELAKLKGTYIDRLPALVHPKTGRLHTRFNQTATATGRLSSSDPNLQNIPVRTPLGQKIRRAFVAEEGWRLVALDYRQIELRVLAHLSGDENLIRVFQEGKDIHTQTASWMFGLSAEAIDPLMRRAAKTINFGVLYGMSAFRLSQELGIPYEEAQAFIQKYFQSYPKVKAWIEKTLREGRTRGYVETLFGRRRYVPDLNARVKGKREAAERMAFNMPVQGTAADLMKLAMVRLFPQLREVGARMLLQVHDELLLEAPKERAEEVAALAKEVMEGVWPLAVPLEVEVGIGEDWLAAKG

SEQ ID NO: 4929 - DNA, 2523 bp, synthetic construct
  misc_feature 1..2523: note = Variant of DNA polymerase I from Thermus sp. strain 2.9
  source 1..2523: mol_type = other DNA
atgcaccatcatcatcatcatggcggtagcggcgtgttaccggtgttcgagcctaaaggtcgcgtgcttctggttgatggccatcatctcgcgtatcgtaacttctttgccctgaaaggattaaccaccagcctgggcgagccggtacagggtgtctacggctttgcaaagtcgctcctgaaagctctgaaagaagacggtgatgtggtgattgttgtctttgatgcgaaagcgccaagttttcgccacgaagcgtacgaagcttacaaagccgggcgtgctccaacgccggaagactttcctcgccaattggcgcttatgaaggaattagtggatttgcttggcctcgaacgcttggaagttcccggtttcgaggcagacgacgtattagcgactctcgcaaagaaagccgaacgtgagggctatgaagtccagatcttgacagcagatcgcgatcttttccagcttttatctccgcgcatctcggtgttacacccggaagggcatcgtatcaccccggaatggctctgggagaaatatggtttgcgtcccgaacaatgggtggattttcgcgccttagcaggcgatccgagcgacaatattccgggagttaaaggtatcggcgagaagacggcgctcaagctccttaaagaatgggggtcgttggagaacttgcttaagaatttagatcaggtcaaaccagagtcagtgcgtgagaagattcttgctcacctcgaagacctcaaattaagccgcgaattgtcccgtgtacgcaccgatttgccgctcgaagttgatttcggtcgccgccgcgaacctgactgggagggtcttaaagcgtttttagagcgtcttgaatttggttcgctcttgcatgaattcggccttttagaaagcccgttactggccgaagaagcaccttggccaccgcccgagggcgcgtttttaggttaccgtttgagtcgcccggaaccgatgtgggccgaattactggctcttgcagcgtctgcccagggacgtgtgtatcgcgcggaagaccctcatggtgcgctccgcggcctcttcgaagtccgtggactccttgccaaagacttagctgttgttgcattgcgcgaaggtcttgatttacctccgactgatgatccaatgcttcttgcgtacctcttggacccgtcaaacacgacgcccgaaggcgtagcccgtcgttacggcggcgagtggaccgaagatgcagcgaaacgcgcgttattggccgaacgtttgcacgccaatttattaggacgtttgcaaggcgaggaacgtctcctctggctttacgaagaagtggagaaaccattgagtcgcgtgctcgcgcatatggaagctaccggtgtcaaattagacgtggcgtatttggagaatctcagccttgaagttgctgcccacatgcgccgcttggaggaagaagtattccgtttagcaggccgttcctttcgccttaactctcgcgatcagttagaacgtgtgttgttcgatgaacttggtctccctcctatcggcaagacagagaagaccggtaaacgtagcacttcagcggcggttttagaagctcttcgcgaagtccatcccattgtggacaagatcttgcagtaccgcgaactcgcgaaattgaaaggcacctatattgaccgtcttccggcattagtccacccgaaaacgggacgcctccatacccgcttcaaccaaacagccacggcgaccggtcgtttgtcctcctctgatccaaaccttcagaatattccagtacgtggtccattgggccagaagatccgccgtgcgtttgtagctgaggagggttggcgtttagtggccctcgattatcgtcaaattgaattacgtgtccttgcccatctttctggcgatgagaacctcatccgcgtgtttcaggaaggcaaagacattcacactcaaacggcaagctggatgtttggattatcagctgaagcgatcgatcctttgatgcgtcgtgcagcgaagaccatcaatttcggtgttctctacggtatgagtgcctttcgtttgtcgcaggaattaggcattccctatgaagaagctcaggcgttcattcagaaatactttcaaagctatcccaaagttaaagcatggatcgagaagactctccgtgaaggccgcacacgtggttacgtagagaccttatttggacgtcgccgctatgttcccgatttaaacgctcgcgtgaaaggcaagcgtgaagccgccgaacgcatggcgttcaacatgcctgtacagggcacggcagctgacctcatgaaacttgcaatggtgcgcctttttccacaattgcgtgaagttggtgcccgcatgctcttgcaggtccacgatgaactcttgttagaagcgccaaaagagcgtgcggaagaggtggcagccctcgcgaaagaagttatggaaggcgtgtggcccttagcggtgcctcttgaagtcgaagttggtattggcgaggattggctggctgccaaagga

SEQ ID NO: 4930 - protein, 841 aa, synthetic construct
  REGION 1..841: note = Variant of DNA polymerase I from Thermus sp. strain 2.9
MHHHHHHGGSGVLPVFEPKGRVLLVDGHHLAYRNFFALKGLTTSLGEPVQGVYGFAKSLLKALKEDGDVVIVVFDAKAPSFRHEAYEAYKAGRAPTPEDFPRQLALMKELVDLLGLERLEVPGFEADDVLATLAKKAEREGYEVQILTADRDLFQLLSPRISVLHPEGHRITPEWLWEKYGLRPEQWVDFRALAGDPSDNIPGVKGIGEKTALKLLKEWGSLENLLKNLDQVKPESVREKILAHLEDLKLSRELSRVRTDLPLEVDFGRRREPDWEGLKAFLERLEFGSLLHEFGLLESPLLAEEAPWPPPEGAFLGYRLSRPEPMWAELLALAASAQGRVYRAEDPHGALRGLFEVRGLLAKDLAVVALREGLDLPPTDDPMLLAYLLDPSNTTPEGVARRYGGEWTEDAAKRALLAERLHANLLGRLQGEERLLWLYEEVEKPLSRVLAHMEATGVKLDVAYLENLSLEVAAHMRRLEEEVFRLAGRSFRLNSRDQLERVLFDELGLPPIGKTEKTGKRSTSAAVLEALREVHPIVDKILQYRELAKLKGTYIDRLPALVHPKTGRLHTRFNQTATATGRLSSSDPNLQNIPVRGPLGQKIRRAFVAEEGWRLVALDYRQIELRVLAHLSGDENLIRVFQEGKDIHTQTASWMFGLSAEAIDPLMRRAAKTINFGVLYGMSAFRLSQELGIPYEEAQAFIQKYFQSYPKVKAWIEKTLREGRTRGYVETLFGRRRYVPDLNARVKGKREAAERMAFNMPVQGTAADLMKLAMVRLFPQLREVGARMLLQVHDELLLEAPKERAEEVAALAKEVMEGVWPLAVPLEVEVGIGEDWLAAKG

SEQ ID NO: 4931 - DNA, 2523 bp, synthetic construct
  misc_feature 1..2523: note = Variant of DNA polymerase I from Thermus sp. strain 2.9
  source 1..2523: mol_type = other DNA
atgcaccatcatcatcatcatggcggtagcggcgtgttaccggtgttcgagcctaaaggtcgcgtgcttctggttgatggccatcatctcgcgtatcgtaacttctttgccctgaaaggattaaccaccagcctgggcgagccggtacagggtgtctacggctttgcaaagtcgctcctgaaagctctgaaagaagacggtgatgtggtgattgttgtctttgatgcgaaagcgccaagttttcgccacgaagcgtacgaagcttacaaagccgggcgtgctccaacgccggaagactttcctcgccaattggcgcttatgaaggaattagtggatttgcttggcctcgaacgcttggaagttcccggtttcgaggcagacgacgtattagcgactctcgcaaagaaagccgaacgtgagggctatgaagtccagatcttgacagcagatcgcgatcttttccagcttttatctccgttgatctcggtgttacacccggaagggcatcgtatcaccccggaatggctctgggagaaatatggtttgcgtcccgaacaatgggtggattttcgcgccttagcaggcgatccgagcgacaatattccgggagttaaaggtatcggcgagaagacggcgctcaagctccttaaagaatgggggtcgttggagaacttgcttaagaatttagatcaggtcaaaccagagtcagtgcgtgagaagattcttgctcacctcgaagacctcaaattaagccgcgaattgtcccgtgtacgcaccgatttgccgctcgaagttgatttcggtcgccgccgcgaacctgactgggagggtcttaaagcgtttttagagcgtcttgaatttggttcgctcttgcatgaattcggccttttagaaagcccgttactggccgaagaagcaccttggccaccgcccgagggcgcgtttttaggttaccgtttgagtcgcccggaaccgatgtgggccgaattactggctcttgcagcgtctgcccagggacgtgtgtatcgcgcggaagaccctcatggtgcgctccgcggcctcttcgaagtccgtggactccttgccaaagacttagctgttgttgcattgcgcgaaggtcttgatttacctccgactgatgatccaatgcttcttgcgtacctcttggacccgtcaaacacgacgcccgaaggcgtagcccgtcgttacggcggcgagtggaccgaagatgcagcgaaacgcgcgttattggccgaacgtttgcacgccaatttattaggacgtttgcaaggcgaggaacgtctcctctggctttacgaagaagtggagaaaccattgagtcgcgtgctcgcgcatatggaagctaccggtgtcaaattagacgtggcgtatttggagaatctcagccttgaagttgctgcccacatgcgccgcttggaggaagaagtattccgtttagcaggccgttcctttcgccttaactctcgcgatcagttagaacgtgtgttgttcgatgaacttggtctccctcctatcggcaagacagagaagaccggtaaacgtagcacttcagcggcggttttagaagctcttcgcgaagtccatcccattgtggacaagatcttgcagtaccgcgaactcgcgaaattgaaaggcacctatattgaccgtcttccggcattagtccacccgaaaacgggacgcctccatacccgcttcaaccaaacagccacggcgaccggtcgtttgtcctcctctgatccaaaccttcagaatattccagtacgtaccccattgggccagaagatccgccgtgcgtttgtagctgaggagggttggcgtttagtggccctcgattatcgtcaaattgaattacgtgtccttgcccatctttctggcgatgagaacctcatccgcgtgtttcaggaaggcaaagacattcacactcaaacggcaagctggatgtttggattatcagctgaagcgatcgatcctttgatgcgtcgtgcagcgaagaccatcaatttcggtgttctctacggtatgagtgcctttcgtttgtcgcaggaattaggcattccctatgaagaagctcaggcgttcattcagaaatactttcaaagctatcccaaagttaaagcatggatcgagaagactctccgtgaaggccgcacacgtggttacgtagagaccttatttggacgtcgccgctatgttcccgatttaaacgctcgcgtgaaaggcaagcgtgaagccgccgaacgcatggcgttcaacatgcctgtacagggcacggcagctgacctcatgaaacttgcaatggtgcgcctttttccacaattgcgtgaagttggtgcccgcatgctcttgcaggtccacgatgaactcttgttagaagcgccaaaagagcgtgcggaagaggtggcagccctcgcgaaagaagttatggaaggcgtgtggcccttagcggtgcctcttgaagtcgaagttggtattggcgaggattggctggctgccaaagga

SEQ ID NO: 4932 - protein, 841 aa, synthetic construct
  REGION 1..841: note = Variant of DNA polymerase I from Thermus sp. strain 2.9
MHHHHHHGGSGVLPVFEPKGRVLLVDGHHLAYRNFFALKGLTTSLGEPVQGVYGFAKSLLKALKEDGDVVIVVFDAKAPSFRHEAYEAYKAGRAPTPEDFPRQLALMKELVDLLGLERLEVPGFEADDVLATLAKKAEREGYEVQILTADRDLFQLLSPLISVLHPEGHRITPEWLWEKYGLRPEQWVDFRALAGDPSDNIPGVKGIGEKTALKLLKEWGSLENLLKNLDQVKPESVREKILAHLEDLKLSRELSRVRTDLPLEVDFGRRREPDWEGLKAFLERLEFGSLLHEFGLLESPLLAEEAPWPPPEGAFLGYRLSRPEPMWAELLALAASAQGRVYRAEDPHGALRGLFEVRGLLAKDLAVVALREGLDLPPTDDPMLLAYLLDPSNTTPEGVARRYGGEWTEDAAKRALLAERLHANLLGRLQGEERLLWLYEEVEKPLSRVLAHMEATGVKLDVAYLENLSLEVAAHMRRLEEEVFRLAGRSFRLNSRDQLERVLFDELGLPPIGKTEKTGKRSTSAAVLEALREVHPIVDKILQYRELAKLKGTYIDRLPALVHPKTGRLHTRFNQTATATGRLSSSDPNLQNIPVRTPLGQKIRRAFVAEEGWRLVALDYRQIELRVLAHLSGDENLIRVFQEGKDIHTQTASWMFGLSAEAIDPLMRRAAKTINFGVLYGMSAFRLSQELGIPYEEAQAFIQKYFQSYPKVKAWIEKTLREGRTRGYVETLFGRRRYVPDLNARVKGKREAAERMAFNMPVQGTAADLMKLAMVRLFPQLREVGARMLLQVHDELLLEAPKERAEEVAALAKEVMEGVWPLAVPLEVEVGIGEDWLAAKG

SEQ ID NO: 4933 - DNA, 2523 bp, synthetic construct
  misc_feature 1..2523: note = Variant of DNA polymerase I from Thermus sp. strain 2.9
  source 1..2523: mol_type = other DNA
atgcaccatcatcatcatcatggcggtagcggcgtgttaccggtgttcgagcctaaaggtcgcgtgcttctggttgatggccatcatctcgcgtatcgtaacttctttgccctgaaaggattaaccaccagcctgggcgagccggtacagggtgtctacggctttgcaaagtcgctcctgaaagctctgaaagaagacggtgatgtggtgattgttgtctttgatgcgaaagcgccaagttttcgccacgaagcgtacgaagcttacaaagccgggcgtgctccaacgccggaagactttcctcgccaattggcgcttatgaaggaattagtggatttgcttggcctcgaacgcttggaagttcccggtttcgaggcagacgacgtattagcgactctcgcaaagaaagccgaacgtgagggctatgaagtccagatcttgacagcagatcgcgatcttttccagcttttatctccgcgcatctcggtgttacacccggaagggcatcgtatcaccccggaatggctctgggagaaatatggtttgcgtcccgaacaatgggtggattttcgcgccttagcaggcgatccgagcgacaatattccgggagttaaaggtatcggcgagaagacggcgctcaagctccttaaagaatgggggtcgttggagaacttgcttaagaatttagatcaggtcaaaccagagtcagtgcgtgagaagattcttgctcacctcgaagacctcaaattaagccgcgaattgtcccgtgtacgcaccgatttgccgctcgaagttgatttcggtcgccgccgcgaacctgactgggagggtcttaaagcgtttttagagcgtcttgaatttggttcgctcttgcatgaattcggccttttagaaagcccgttactggccgaagaagcaccttggccaccgcccgagggcgcgtttttaggttaccgtttgagtcgcccggaaccgatgtgggccgaattactggctcttgcagcgtctgcccagggacgtgtgtatcgcgcggaagaccctcatggtgcgctccgcggcctcttcgaagtccgtggactccttgccaaagacttagctgttgttgcattgcgcgaaggtcttgatttacctccgactgatgatccaatgcttcttgcgtacctcttggacccgtcaaacacgacgcccgaaggcgtagcccgtcgttacggcggcgagtggaccgaagatgcagcgaaacgcgcgttattggccgaacgtttgcacgccaatttattaggacgtttgcaaggcgaggaacgtctcctctggctttacgaagaagtggagaaaccattgagtcgcgtgctcgcgcatatggaagctaccggtgtcaaattagacgtggcgtatttggagaatctcagccttgaagttgctgcccacatgcgccgcttggaggaagaagtattccgtttagcaggccgttcctttcgccttaactctcgcgatcagttagaacgtgtgttgttcgatgaacttggtctccctcctatcggcaagacagagaagaccggtaaacgtagcacttcagcggcggttttagaagctcttcgcgaagtccatcccattgtggacaagatcttgcagtaccgcgaactcgcgaaattgaaaggcacctatattgaccgtcttccggcattagtccacccgaaaacgggatgtctccatacccgcttcaaccaaacagccacggcgaccggtcgtttgtcctcctctgatccaaaccttcagaatattccagtacgtaccccattgggccagaagatccgccgtgcgtttgtagctgaggagggttggcgtttagtggccctcgattatcgtcaaattgaattacgtgtccttgcccatctttctggcgatgagaacctcatccgcgtgtttcaggaaggcaaagacattcacactcaaacggcaagctggatgtttggattatcagctgaagcgatcgatcctttgatgcgtcgtgcagcgaagaccatcaatttcggtgttctctacggtatgagtgcctttcgtttgtcgcaggaattaggcattccctatgaagaagctcaggcgttcattcagaaatactttcaaagctatcccaaagttaaagcatggatcgagaagactctccgtgaaggccgcacacgtggttacgtagagaccttatttggacgtcgccgctatgttcccgatttaaacgctcgcgtgaaaggcaagcgtgaagccgccgaacgcatggcgttcaacatgcctgtacagggcacggcagctgacctcatgaaacttgcaatggtgcgcctttttccacaattgcgtgaagttggtgcccgcatgctcttgcaggtccacgatgaactcttgttagaagcgccaaaagagcgtgcggaagaggtggcagccctcgcgaaagaagttatggaaggcgtgtggcccttagcggtgcctcttgaagtcgaagttggtattggcgaggattggctggctgccaaagga

SEQ ID NO: 4934 - protein, 841 aa, synthetic construct
  REGION 1..841: note = Variant of DNA polymerase I from Thermus sp. strain 2.9
MHHHHHHGGSGVLPVFEPKGRVLLVDGHHLAYRNFFALKGLTTSLGEPVQGVYGFAKSLLKALKEDGDVVIVVFDAKAPSFRHEAYEAYKAGRAPTPEDFPRQLALMKELVDLLGLERLEVPGFEADDVLATLAKKAEREGYEVQILTADRDLFQLLSPRISVLHPEGHRITPEWLWEKYGLRPEQWVDFRALAGDPSDNIPGVKGIGEKTALKLLKEWGSLENLLKNLDQVKPESVREKILAHLEDLKLSRELSRVRTDLPLEVDFGRRREPDWEGLKAFLERLEFGSLLHEFGLLESPLLAEEAPWPPPEGAFLGYRLSRPEPMWAELLALAASAQGRVYRAEDPHGALRGLFEVRGLLAKDLAVVALREGLDLPPTDDPMLLAYLLDPSNTTPEGVARRYGGEWTEDAAKRALLAERLHANLLGRLQGEERLLWLYEEVEKPLSRVLAHMEATGVKLDVAYLENLSLEVAAHMRRLEEEVFRLAGRSFRLNSRDQLERVLFDELGLPPIGKTEKTGKRSTSAAVLEALREVHPIVDKILQYRELAKLKGTYIDRLPALVHPKTGCLHTRFNQTATATGRLSSSDPNLQNIPVRTPLGQKIRRAFVAEEGWRLVALDYRQIELRVLAHLSGDENLIRVFQEGKDIHTQTASWMFGLSAEAIDPLMRRAAKTINFGVLYGMSAFRLSQELGIPYEEAQAFIQKYFQSYPKVKAWIEKTLREGRTRGYVETLFGRRRYVPDLNARVKGKREAAERMAFNMPVQGTAADLMKLAMVRLFPQLREVGARMLLQVHDELLLEAPKERAEEVAALAKEVMEGVWPLAVPLEVEVGIGEDWLAAKG

SEQ ID NO: 4935 - DNA, 2523 bp, synthetic construct
  misc_feature 1..2523: note = Variant of DNA polymerase I from Thermus sp. strain 2.9
  source 1..2523: mol_type = other DNA
atgcaccatcatcatcatcatggcggtagcggcgtgttaccggtgttcgagcataaaggtcgcgtgcttctggttgatggccatcatctcgcgtatcgtaacttctttgccctgaaaggattaaccaccagcctgggcgagccggtacagggtgtctacggctttgcaaagtcgctcctgaaagctctgaaagaagacggtgatgtggtgattgttgtctttgatgcgaaagcgccaagttttcgccacgaagcgtacgaagcttacaaagccgggcgtgctccaacgccggaagactttcctcgccaattggcgcttatgaaggaattagtggatttgcttggcctcgaacgcttggaagttcccggtttcgaggcagacgacgtattagcgactctcgcaaagaaagccgaacgtgagggctatgaagtccagatcttgacagcagatcgcgatcttttccagcttttatctccgcgcatctcggtgttacacccggaagggcatcgtatcaccccggaatggctctgggagaaatatggtttgcgtcccgaacaatgggtggattttcgcgccttagcaggcgatccgagcgacaatattccgggagttaaaggtatcggcgagaagacggcgctcaagctccttaaagaatgggggtcgttggagaacttgcttaagaatttagatcaggtcaaaccagagtcagtgcgtgagaagattcttgctcacctcgaagacctcaaattaagccgcgaattgtcccgtgtacgcaccgatttgccgctcgaagttgatttcggtcgccgccgcgaacctgactgggagggtcttaaagcgtttttagagcgtcttgaatttggttcgctcttgcatgaattcggccttttagaaaacccgttagtggccgaagaagcaccttggccaccgcccgagggcgcgtttttaggttaccgtttgagtcgcccggaaccgatgtgggccgaattactggctcttgcagcgtctgcccagggacgtgtgtatcgcgcggaagaccctcatggtgcgctccgcggcctcttcgaagtccgtggactccttgccaaagacttagctgttgttgcattgcgcgaaggtcttgatttacctccgactgatgatccaatgcttcttgcgtacctcttggacccgtcaaacacgacgcccgaaggcgtagcccgtcgttacggcggcgagtggaccgaagatgcagcgaaacgcgcgttattggccgaacgtttgcacgagaatttacgtggacgtttgcaaggcgaggaacgtctcctctggctttacgaagaagtggagaaaccattgagtcgcgtgctcgcgcatatggaagctaccggtgtcaaattagacgtggcgtatttggagaatctcagccttgaagttgctgcccacatgcgccgcttggaggaagaagtattccgtttagcaggccgttcctttcgccttaactctcgcgatcagttagaacgtgtgttgttcgatgaacttggtctccctcctatcggcaagacagagaagaccggtaaacgtagcacttcacgtgcggttttagatgctcttcgcgaagtccatcccattgtggacaagatcttgcagtaccgcgaactcgcgaaattgaaaggcacctatattgaccgtcttccggcattagtccacccgaaaacgggacgcctccatacccgcttcaaccaaacagccacggcgaccggtcgtttgtcctcctctgatccaaaccttcagaatattccagtacgtaccccattgggccagaagatccgccgtgcgtttgtagctgaggagggttggcgtttagtggccctcgattatcgtcaaattgaattacgtgtccttgcccatctttctggcgatgagaacctcatccgcgtgtttcaggaaggcaaagacattcacactcaaacggcaagctggatgtttggattatcagctgaagcgatcgatcctttgatgcgtcgtgcagcgaagaccatcaatttcggtgttctctacggtatgagtgcctttcgtttgtcgcaggaattaggcattccctatgaagaagctcaggcgttcattcagaaatactttcaaagctatcccaaagttaaagcatggatcgagaagactctccgtgaaggccgcacccgtggttacgtagagaccttatttggacgtcgccgctatgttcccgatttaaacgctcgcgtgaaaggcaagcgtgaagccgccgaacgcatggcgttcaacatgcctgtacagggcacggcagctgacctcatgaaacttgcaatggtgcgcctttttccacaattgcgtgaagttggtgcccgcatgctcttgcaggtccacgatgaactcttgttagaagcgccaaaagagcgtgcggaagaggtggcagccctcgcgaaagaagttatggaaggcgtgtggcccttagcggtgcctcttgaagtcgaagttggtattggcgaggattggctggctgccaaagga

SEQ ID NO: 4936 - protein, 841 aa, synthetic construct
  REGION 1..841: note = Variant of DNA polymerase I from Thermus sp. strain 2.9
MHHHHHHGGSGVLPVFEHKGRVLLVDGHHLAYRNFFALKGLTTSLGEPVQGVYGFAKSLLKALKEDGDVVIVVFDAKAPSFRHEAYEAYKAGRAPTPEDFPRQLALMKELVDLLGLERLEVPGFEADDVLATLAKKAEREGYEVQILTADRDLFQLLSPRISVLHPEGHRITPEWLWEKYGLRPEQWVDFRALAGDPSDNIPGVKGIGEKTALKLLKEWGSLENLLKNLDQVKPESVREKILAHLEDLKLSRELSRVRTDLPLEVDFGRRREPDWEGLKAFLERLEFGSLLHEFGLLENPLVAEEAPWPPPEGAFLGYRLSRPEPMWAELLALAASAQGRVYRAEDPHGALRGLFEVRGLLAKDLAVVALREGLDLPPTDDPMLLAYLLDPSNTTPEGVARRYGGEWTEDAAKRALLAERLHENLRGRLQGEERLLWLYEEVEKPLSRVLAHMEATGVKLDVAYLENLSLEVAAHMRRLEEEVFRLAGRSFRLNSRDQLERVLFDELGLPPIGKTEKTGKRSTSRAVLDALREVHPIVDKILQYRELAKLKGTYIDRLPALVHPKTGRLHTRFNQTATATGRLSSSDPNLQNIPVRTPLGQKIRRAFVAEEGWRLVALDYRQIELRVLAHLSGDENLIRVFQEGKDIHTQTASWMFGLSAEAIDPLMRRAAKTINFGVLYGMSAFRLSQELGIPYEEAQAFIQKYFQSYPKVKAWIEKTLREGRTRGYVETLFGRRRYVPDLNARVKGKREAAERMAFNMPVQGTAADLMKLAMVRLFPQLREVGARMLLQVHDELLLEAPKERAEEVAALAKEVMEGVWPLAVPLEVEVGIGEDWLAAKG

SEQ ID NO: 4937 - DNA, 2523 bp, synthetic construct
  misc_feature 1..2523: note = Variant of DNA polymerase I from Thermus sp. strain 2.9
  source 1..2523: mol_type = other DNA
atgcaccatcatcatcatcatggcggtagcggcgtgttaccggtgttcgagcctaaaggtcgcgtgcttctggttgatggccatcatctcgcgtatcgtaacttctttgccctgaaaggattaaccaccagcctgggcgagccggtacagggtgtctacggctttgcaaagtcgctcctgaaagctctgaaagaagacggtgatgtggtgattgttgtctttgatgcgaaagcgccaagttttcgccacgaagcgtacgaagcttacaaagccgggcgtgctccaacgccggaagactttcctcgccaattggcgcttatgaaggaattagtggatttgcttggcctcgaacgcttggaagttcccggtttcgaggcagacgacgtattagcgactctcgcaaagaaagccgaacgtgagggctatgaagtccagatcttgacagcagatcgcgatcttttccagcttttatctccgcgcatctcggtgttacacccggaagggcatcgtatcaccccggaatggctctgggagaaatatggtttgcgtcccgaacaatgggtggattttcgcgccttagcaggcgatccgagcgacaatattccgggagttaaaggtatcggcgagaagacggcgctcaagctccttaaagaatgggggtcgttggagaacttgcttaagaatttagatcaggtcaaaccagagtcagtgcgtgagaagattcttgctcacctcgaagacctcaaattaagccgcgaattgtcccgtgtacgcaccgatttgccgctcgaagttgatttcggtcgccgccgcgaacctgactgggagggtcttaaagcgtttttagagcgtcttgaatttggttcgctcttgcatgaattcggccttttagaaagcccgttactggccgaagaagcaccttggccaccgcccgagggcgcgtttttaggttaccgtttgagtcgcccggaaccgatgtgggccgaattactggctcttgcagcgtctgcccagggacgtgtgtatcgcgcggaagaccctcatggtgcgctccgcggcctcttcgaagtccgtggactccttgccaaagacttagctgttgttgcattgcgcgaaggtcttgatttacctccgactgatgatccaatgcttcttgcgtacctcttggacccgtcaaacacgacgcccgaaggcgtagcccgtcgttacggcggcgagtggaccgaagatgcagcgaaacgcgcgttattggccgaacgtttgcacgccaatttattaggacgtttgcaaggcgaggaacgtctcctctggctttacgaagaagtggagaaaccattgagtcgcgtgctcgcgcatatggaagctaccggtgtcaaattagacgtgacgtatttggagaatctcagccttgaagttgctgcccacatgcgccgcttggaggaagaagtattccgtttagcaggccgttcctttcgccttaactctcgcgatcagttagaacgtgtgttgttcgatgaacttggtctccctcctatcggcaagacagagaagaccggtaaacgtagcacttcagcggcggttttagaagctcttcgcgaagtccatcccattgtggacaagatcttgcagtaccgcgaactcgcgaaattgaaaggcacctatattgaccgtcttccggcattagtccacccgaaaacgggacgcctccatacccgcttcaaccaaacagccacggcgaccggtcgtttgtcctcctctgatccaaaccttcagaatattccagtacgtaccccattgggccagaagatccgccgtgcgtttgtagctgaggagggttggcgtttagtggccctcgattatcgtcaaattgaattacgtgtccttgcccatctttctggcgatgagaacctcatccgcgtgtttcaggaaggcaaagacattcacactcaaacggcaagctggatgtttggattatcagctgaagcgatcgatcctttgatgcgtcgtgcagcgaagaccatcaatttcggtgttctctacggtatgagtgcctttcgtttgtcgcaggaattaggcattccctatgaagaagctcaggcgttcattcagaaatactttcaaagctatcccaaagttaaagcatggatcgagaagactctccgtgaaggccgcacacgtggttacgtagagaccttatttggacgtcgccgctatgttcccgatttaaacgctcgcgtgaaaggcaagcgtgaagccgccgaacgcatggcgttcaacatgcctgtacagggcacggcagctgacctcatgaaacttgcaatggtgcgcctttttccacaattgcgtgaagttggtgcccgcatgctcttgcaggtccacgatgaactcttgttagaagcgccaaaagagcgtgcggaagaggtggcagccctcgcgaaagaagttatggaaggcgtgtggcccttagcggtgcctcttgaagtcgaagttggtattggcgaggattggctggctgccaaagga

SEQ ID NO: 4938 - protein, 841 aa, synthetic construct
  REGION 1..841: note = Variant of DNA polymerase I from Thermus sp. strain 2.9
MHHHHHHGGSGVLPVFEPKGRVLLVDGHHLAYRNFFALKGLTTSLGEPVQGVYGFAKSLLKALKEDGDVVIVVFDAKAPSFRHEAYEAYKAGRAPTPEDFPRQLALMKELVDLLGLERLEVPGFEADDVLATLAKKAEREGYEVQILTADRDLFQLLSPRISVLHPEGHRITPEWLWEKYGLRPEQWVDFRALAGDPSDNIPGVKGIGEKTALKLLKEWGSLENLLKNLDQVKPESVREKILAHLEDLKLSRELSRVRTDLPLEVDFGRRREPDWEGLKAFLERLEFGSLLHEFGLLESPLLAEEAPWPPPEGAFLGYRLSRPEPMWAELLALAASAQGRVYRAEDPHGALRGLFEVRGLLAKDLAVVALREGLDLPPTDDPMLLAYLLDPSNTTPEGVARRYGGEWTEDAAKRALLAERLHANLLGRLQGEERLLWLYEEVEKPLSRVLAHMEATGVKLDVTYLENLSLEVAAHMRRLEEEVFRLAGRSFRLNSRDQLERVLFDELGLPPIGKTEKTGKRSTSAAVLEALREVHPIVDKILQYRELAKLKGTYIDRLPALVHPKTGRLHTRFNQTATATGRLSSSDPNLQNIPVRTPLGQKIRRAFVAEEGWRLVALDYRQIELRVLAHLSGDENLIRVFQEGKDIHTQTASWMFGLSAEAIDPLMRRAAKTINFGVLYGMSAFRLSQELGIPYEEAQAFIQKYFQSYPKVKAWIEKTLREGRTRGYVETLFGRRRYVPDLNARVKGKREAAERMAFNMPVQGTAADLMKLAMVRLFPQLREVGARMLLQVHDELLLEAPKERAEEVAALAKEVMEGVWPLAVPLEVEVGIGEDWLAAKG

SEQ ID NO: 4939 - DNA, 2523 bp, synthetic construct
  misc_feature 1..2523: note = Variant of DNA polymerase I from Thermus sp. strain 2.9
  source 1..2523: mol_type = other DNA
atgcaccatcatcatcatcatggcggtagcggcgtgttaccggtgttcgagcctaaaggtcgcgtgcttctggttgatggccatcatctcgcgtatcgtaacttctttgccctgaaaggattaaccaccagcctgggcgagccggtacagggtgtctacggctttgcaaagtcgctcctgaaagctctgaaagaagacggtgatgtggtgattgttgtctttgatgcgaaagcgccaagttttcgccacgaagcgtacgaagcttacaaagccgggcgtgctccaacgccggaagactttcctcgccaattggcgcttatgaaggaattagtggatttgcttggcctcgaacgcttggaagttcccggtttcgaggcagacgacgtattagcgactctcgcaaagaaagccgaacgtgagggctatgaagtccagatcttgacagcagatcgcgatcttttccagcttttatctccgcgcatctcggtgttacacccggaagggcatcgtatcaccccggaatggctctgggagaaatatggtttgcgtcccgaacaatgggtggattttcgcgccttagcaggcgatccgagcgacaatattccgggagttaaaggtatcggcgagaagacggcgctcaagctccttaaagaatgggggtcgttggagaacttgcttaagaatttagatcaggtcaaaccagagtcagtgcgtgagaagattcttgctcacctcgaagacctcaaattaagccgcgaattgtcccgtgtacgcaccgatttgccgctcgaagttgatttcggtcgccgccgcgaacctgactgggagggtcttaaagcgtttttagagcgtcttgaatttggttcgctcttgcatgaattcggccttttagaaagcccgttactggccgaagaagcaccttggccaccgcccgagggcgcgtttttaggttaccgtttgagtcgcccggaaccgatgtgggccgaattactggctcttgcagcgtctgcccagggacgtgtgtatcgcgcggaagaccctcatggtgcgctccgcggcctcttcgaagtccgtggactccttgccaaagacttagctgttgttgcattgcgcgaaggtcttgatttacctccgactgatgatccaatgcttcttgcgtacctcttggacccgtcaaacacgacgcccgaaggcgtagcccgtcgttacggcggcgagtggaccgaagatgcagcgaaacgcgcgttattggccgaacgtttgcacgccaatttattaggacgtttgcaaggcgaggaacgtctcctctggctttacgaagaagtggagaaaccattgagtcgcgtgctcgcgcatatggaagctaccggtgtcaaattagacgtggcgtatttggagaatctcagccttgaagttgctgcccacatgcgccgcttggaggaagaagtattccgtttagcaggccgttcctttcgccttaactctcgcgatcagttagaacgtgtgttgttcgatgaacttggtctccctcctatcggcaagacagagaagaccggtaaacgtagcacttcagcggcggttttagaagctcttcgcgaagtccatcccattgtggacaagatcttgcagtaccgcgaactcgcgaaattgaaaggcacctatattgaccgtcttccggcattagtccacccgaaaacgggacgcctccatacccgcttcaaccaaacagccacggcgaccggtcgtttgtcctcctctgatccaaaccttcagaatattccagtacgtaccccattgggccagaagatccgccgtgcgtttgtagctgaggagggttggcgtttagtggccctcgattatcgtcaaattgaattacgtgtccttgcccatctttctggcgatgagaacctcatccgcgtgtttcaggaaggcaaagacattcacactcaaacggcaagctggatgtttggattatcagctgaagcgatcgatcctttgatgcgtcgtgcagcgaagaccatcaatttcggtgttctctacggtatgagtgcctttcgtttgtcgcaggaattaggcattccctatgaagaagctcaggcgttcattcagaaatactttcaaagctatcccaaagttaaagcatggatcgagaagactctccgtgaaggccgcacacgtggttacgtagagaccttatttggacgtcgccgctatgttcccgatttaggggctcgcgtgaaaggcaagcgtgaagccgccgaacgcatggcgttcaacatgcctgtacagggcacggcagctgacctcatgaaacttgcaatggtgcgcctttttccacaattgcgtgaagttggtgcccgcatgctcttgcaggtccacgatgaactcttgttagaagcgccaaaagagcgtgcggaagaggtggcagccctcgcgaaagaagttatggaaggcgtgtggcccttagcggtgcctcttgaagtcgaagttggtattggcgaggattggctggctgccaaagga

SEQ ID NO: 4940 - protein, 841 aa, synthetic construct
  REGION 1..841: note = Variant of DNA polymerase I from Thermus sp. strain 2.9
MHHHHHHGGSGVLPVFEPKGRVLLVDGHHLAYRNFFALKGLTTSLGEPVQGVYGFAKSLLKALKEDGDVVIVVFDAKAPSFRHEAYEAYKAGRAPTPEDFPRQLALMKELVDLLGLERLEVPGFEADDVLATLAKKAEREGYEVQILTADRDLFQLLSPRISVLHPEGHRITPEWLWEKYGLRPEQWVDFRALAGDPSDNIPGVKGIGEKTALKLLKEWGSLENLLKNLDQVKPESVREKILAHLEDLKLSRELSRVRTDLPLEVDFGRRREPDWEGLKAFLERLEFGSLLHEFGLLESPLLAEEAPWPPPEGAFLGYRLSRPEPMWAELLALAASAQGRVYRAEDPHGALRGLFEVRGLLAKDLAVVALREGLDLPPTDDPMLLAYLLDPSNTTPEGVARRYGGEWTEDAAKRALLAERLHANLLGRLQGEERLLWLYEEVEKPLSRVLAHMEATGVKLDVAYLENLSLEVAAHMRRLEEEVFRLAGRSFRLNSRDQLERVLFDELGLPPIGKTEKTGKRSTSAAVLEALREVHPIVDKILQYRELAKLKGTYIDRLPALVHPKTGRLHTRFNQTATATGRLSSSDPNLQNIPVRTPLGQKIRRAFVAEEGWRLVALDYRQIELRVLAHLSGDENLIRVFQEGKDIHTQTASWMFGLSAEAIDPLMRRAAKTINFGVLYGMSAFRLSQELGIPYEEAQAFIQKYFQSYPKVKAWIEKTLREGRTRGYVETLFGRRRYVPDLGARVKGKREAAERMAFNMPVQGTAADLMKLAMVRLFPQLREVGARMLLQVHDELLLEAPKERAEEVAALAKEVMEGVWPLAVPLEVEVGIGEDWLAAKG

SEQ ID NO: 4941 - DNA, 2523 bp, synthetic construct
  misc_feature 1..2523: note = Variant of DNA polymerase I from Thermus sp. strain 2.9
  source 1..2523: mol_type = other DNA
atgcaccatcatcatcatcatggcggtagcggcgtgttaccggtgttcgagcctaaaggtcgcgtgcttctggttgatggccatcatctcgcgtatcgtaacttctttgccctgaaaggattaaccaccagcctgggcgagccggtacagggtgtctacggctttgcaaagtcgctcctgaaagctctgaaagaagacggtgatgtggtgattgttgtctttgatgcgaaagcgccaagttttcgccacgaagcgtacgaagcttacaaagccgggcgtgctccaacgccggaagactttcctcgccaattggcgcttatgaaggaattagtggatttgcttggcctcgaacgcttggaagttcccggtttcgaggcagacgacgtattagcgactctcgcaaagaaagccgaacgtgagggctatgaagtccagatcttgacagcagatcgcgatcttttccagcttttatctccgcgcatctcggtgttacacccggaagggcatcgtatcaccccggaatggctctgggagaaatatggtttgcgtcccgaacaatgggtggattttcgcgccttagcaggcgatccgagcgacaatattccgggagttaaaggtatcggcgagaagacggcgctcaagctccttaaagaatgggggtcgttggagaacttgcttaagaatttagatcaggtcaaaccagagtcagtgcgtgagaagattcttgctcacctcgaagacctcaaattaagccgcgaattgtcccgtgtacgcaccgatttgccgctcgaagttgatttcggtcgccgccgcgaacctgactgggagggtcttaaagcgtttttagagcgtcttgaatttggttcgctcttgcatgaattcggccttttagaaagcccgttactggccgaagaagcaccttggccaccgcccgagggcgcgtttttaggttaccgtttgagtcgcccggaaccgatgtgggccgaattactggctcttgcagcgtctgcccagggacgtgtgtatcgcgcggaagaccctcatggtgcgctccgcggcctcttcgaagtccgtggactccttgccaaagacttagctgttgttgcattgcgcgaaggtcttgatttacctccgactgatgatccaatgcttcttgcgtacctcttggacccgtcaaacacgacgcccgaaggcgtagcccgtcgttacggcggcgagtggaccgaagatgcagcgaaacgcgcgttattggccgaacgtttgcacgccaatttattaggacgtttgcaaggcgaggaacgtctcctctggctttacgaagaagtggagaaaccattgagtcgcgtgctcgcgcatatggaagctaccggtgtcaaattagacgtggcgtatttggagaatctcagccttgaagttgctgcccacatgcgccgcttggaggaagaagtattccgtttagcaggccgttcctttcgccttaactctcgcgatcagttagaaagtgtgttgttcgatgaacttggtctccctcctatcggcaagacagagaagaccggtaaacgtagcacttcagcggcggttttagaagctcttcgcgaagtccatcccattgtggacaagatcttgcagtaccgcgaactcgcgaaattgaaaggcacctatattgaccgtcttccggcattagtccacccgaaaacgggacgcctccatacccgcttcaaccaaacagccacggcgaccggtcgtttgtcctcctctgatccaaaccttcagaatattccagtacgtaccccattgggccagaagatccgccgtgcgtttgtagctgaggagggttggcgtttagtggccctcgattatcgtcaaattgaattacgtgtccttgcccatctttctggcgatgagaacctcatccgcgtgtttcaggaaggcaaagacattcacactcaaacggcaagctggatgtttggattatcagctgaagcgatcgatcctttgatgcgtcgtgcagcgaagaccatcaatttcggtgttctctacggtatgagtgcctttcgtttgtcgcaggaattaggcattccctatgaagaagctcaggcgttcattcagaaatactttcaaagctatcccaaagttaaagcatggatcgagaagactctccgtgaaggccgcacacgtggttacgtagagaccttatttggacgtcgccgctatgttcccgatttaaacgctcgcgtgaaaggcaagcgtgaagccgccgaacgcatggcgttcaacatgcctgtacagggcacggcagctgacctcatgaaacttgcaatggtgcgcctttttccacaattgcgtgaagttggtgcccgcatgctcttgcaggtccacgatgaactcttgttagaagcgccaaaagagcgtgcggaagaggtggcagccctcgcgaaagaagttatggaaggcgtgtggcccttagcggtgcctcttgaagtcgaagttggtattggcgaggattggctggctgccaaagga

SEQ ID NO: 4942 - protein, 841 aa, synthetic construct
  REGION 1..841: note = Variant of DNA polymerase I from Thermus sp. strain 2.9
MHHHHHHGGSGVLPVFEPKGRVLLVDGHHLAYRNFFALKGLTTSLGEPVQGVYGFAKSLLKALKEDGDVVIVVFDAKAPSFRHEAYEAYKAGRAPTPEDFPRQLALMKELVDLLGLERLEVPGFEADDVLATLAKKAEREGYEVQILTADRDLFQLLSPRISVLHPEGHRITPEWLWEKYGLRPEQWVDFRALAGDPSDNIPGVKGIGEKTALKLLKEWGSLENLLKNLDQVKPESVREKILAHLEDLKLSRELSRVRTDLPLEVDFGRRREPDWEGLKAFLERLEFGSLLHEFGLLESPLLAEEAPWPPPEGAFLGYRLSRPEPMWAELLALAASAQGRVYRAEDPHGALRGLFEVRGLLAKDLAVVALREGLDLPPTDDPMLLAYLLDPSNTTPEGVARRYGGEWTEDAAKRALLAERLHANLLGRLQGEERLLWLYEEVEKPLSRVLAHMEATGVKLDVAYLENLSLEVAAHMRRLEEEVFRLAGRSFRLNSRDQLESVLFDELGLPPIGKTEKTGKRSTSAAVLEALREVHPIVDKILQYRELAKLKGTYIDRLPALVHPKTGRLHTRFNQTATATGRLSSSDPNLQNIPVRTPLGQKIRRAFVAEEGWRLVALDYRQIELRVLAHLSGDENLIRVFQEGKDIHTQTASWMFGLSAEAIDPLMRRAAKTINFGVLYGMSAFRLSQELGIPYEEAQAFIQKYFQSYPKVKAWIEKTLREGRTRGYVETLFGRRRYVPDLNARVKGKREAAERMAFNMPVQGTAADLMKLAMVRLFPQLREVGARMLLQVHDELLLEAPKERAEEVAALAKEVMEGVWPLAVPLEVEVGIGEDWLAAKG

SEQ ID NO: 4943 - DNA, 2523 bp, synthetic construct
  misc_feature 1..2523: note = Variant of DNA polymerase I from Thermus sp. strain 2.9
  source 1..2523: mol_type = other DNA
atgcaccatcatcatcatcatggcggtagcggcgtgttaccggtgttcgagcctaaaggtcgcgtgcttctggttgatggccatcatctcgcgtatcgtaacttctttgccctgaaaggattaaccaccagcctgggcgagccggtacagggtgtctacggctttgcaaagtcgctcctgaaagctctgaaagaagacggtgatgtggtgattgttgtctttgatgcgaaagcgccaagttttcgccacgaagcgtacgaagcttacaaagccgggcgtgctccaacgccggaagactttcctcgccaattggcgcttatgaaggaattagtggatttgcttggcctcgaacgcttggaagttcccggtttcgaggcagacgacgtattagcgactctcgcaaagaaagccgaacgtgagggctatgaagtccagatcttgacagcagatcgcgatcttttccagcttttatctccgcgcatctcggtgttacacccggaagggcatcgtatcaccccggaatggctctgggagaaatatggtttgcgtcccgaacaatgggtggattttcgcgccttagcaggcgatccgagcgacaatattccgggagttaaaggtatcggcgagaagacggcgctcaagctccttaaagaatgggggtcgttggagaacttgcttaagaatttagatcaggtcaaaccagagtcagtgcgtgagaagattcttgctcacctcgaagacctcaaattaagccgcgaattgtcccgtgtacgcaccgatttgccgctcgaagttgatttcggtcgccgccgcgaacctgactgggagggtcttaaagcgtttttagagcgtcttgaatttggttcgctcttgcatgaattcggccttttagaaagcccgttactggccgaagaagcaccttggccaccgcccgagggcgcgtttttaggttaccgtttgagtcgcccggaaccgatgtgggccgaattactggctcttgcagcgtctgcccagggacgtgtgtatcgcgcggaagaccctcatggtgcgctccgcggcctcttcgaagtccgtggactccttgccaaagacttagctgttgttgcattgcgcgaaggtcttgatttacctccgactgatgatccaatgcttcttgcgtacctcttggacccgtcaaacacgacgcccgaaggcgtagcccgtcgttacggcggcgagtggaccgaagatgcagcgaaacgcgcgttattggccgaacgtttgcaggccaatttattaggacgtttgcaaggcgaggaacgtctcctctggctttacgaagaagtggagaaaccattgagtcgcgtgctcgcgcatatggaagctaccggtgtcaaattagacgtggcgtatttggagaatctcagccttgaagttgctgcccacatgcgccgcttggaggaagaagtattccgtttagcaggccgttcctttcgccttaactctcgcgatcagttagaacgtgtgttgttcgatgaacttggtctccctcctatcggcaagacagagaagaccggtaaacgtagcacttcagcggcggttttagaagctcttcgcgaagtccatcccattgtggacaagatcttgcagtaccgcgaactcgcgaaattgaaaggcacctatattgaccgtcttccggcattagtccacccgaaaacgggacgcctccatacccgcttcaaccaaacagccacggcgaccggtcgtttgtcctcctctgatccaaaccttcagaatattccagtacgtaccccattgggccagaagatccgccgtgcgtttgtagctgaggagggttggcgtttagtggccctcgattatcgtcaaattgaattacgtgtccttgcccatctttctggcgatgagaacctcatccgcgtgtttcaggaaggcaaagacattcacactcaaacggcaagctggatgtttggattatcagctgaagcgatcgatcctttgatgcgtcgtgcagcgaagaccatcaatttcggtgttctctacggtatgagtgcctttcgtttgtcgcaggaattaggcattccctatgaagaagctcaggcgttcattcagaaatactttcaaagctatcccaaagttaaagcatggatcgagaagactctccgtgaaggccgcacacgtggttacgtagagaccttatttggacgtcgccgctatgttcccgatttaaacgctcgcgtgaaaggcaagcgtgaagccgccgaacgcatggcgttcaacatgcctgtacagggcacggcagctgacctcatgaaacttgcaatggtgcgcctttttccacaattgcgtgaagttggtgcccgcatgctcttgcaggtccacgatgaactcttgttagaagcgccaaaagagcgtgcggaagaggtggcagccctcgcgaaagaagttatggaaggcgtgtggcccttagcggtgcctcttgaagtcgaagttggtattggcgaggattggctggctgccaaagga

SEQ ID NO: 4944 - protein, 841 aa, synthetic construct
  REGION 1..841: note = Variant of DNA polymerase I from Thermus sp. strain 2.9
MHHHHHHGGSGVLPVFEPKGRVLLVDGHHLAYRNFFALKGLTTSLGEPVQGVYGFAKSLLKALKEDGDVVIVVFDAKAPSFRHEAYEAYKAGRAPTPEDFPRQLALMKELVDLLGLERLEVPGFEADDVLATLAKKAEREGYEVQILTADRDLFQLLSPRISVLHPEGHRITPEWLWEKYGLRPEQWVDFRALAGDPSDNIPGVKGIGEKTALKLLKEWGSLENLLKNLDQVKPESVREKILAHLEDLKLSRELSRVRTDLPLEVDFGRRREPDWEGLKAFLERLEFGSLLHEFGLLESPLLAEEAPWPPPEGAFLGYRLSRPEPMWAELLALAASAQGRVYRAEDPHGALRGLFEVRGLLAKDLAVVALREGLDLPPTDDPMLLAYLLDPSNTTPEGVARRYGGEWTEDAAKRALLAERLQANLLGRLQGEERLLWLYEEVEKPLSRVLAHMEATGVKLDVAYLENLSLEVAAHMRRLEEEVFRLAGRSFRLNSRDQLERVLFDELGLPPIGKTEKTGKRSTSAAVLEALREVHPIVDKILQYRELAKLKGTYIDRLPALVHPKTGRLHTRFNQTATATGRLSSSDPNLQNIPVRTPLGQKIRRAFVAEEGWRLVALDYRQIELRVLAHLSGDENLIRVFQEGKDIHTQTASWMFGLSAEAIDPLMRRAAKTINFGVLYGMSAFRLSQELGIPYEEAQAFIQKYFQSYPKVKAWIEKTLREGRTRGYVETLFGRRRYVPDLNARVKGKREAAERMAFNMPVQGTAADLMKLAMVRLFPQLREVGARMLLQVHDELLLEAPKERAEEVAALAKEVMEGVWPLAVPLEVEVGIGEDWLAAKG

SEQ ID NO: 4945 - DNA, 2523 bp, synthetic construct
  misc_feature 1..2523: note = Variant of DNA polymerase I from Thermus sp. strain 2.9
  source 1..2523: mol_type = other DNA
atgcaccatcatcatcatcatggcggtagcggcgtgttaccggtgttcgagcctaaaggtcgcgtgcttctggttgatggccatcatctcgcgtatcgtaacttctttgccctgaaaggattaaccaccagcctgggcgagccggtacagggtgtctacggctttgcaaagtcgctcctgaaagctctgaaagaagacggtgatgtggtgattgttgtctttgatgcgaaagcgccaagttttcgccacgaagcgtacgaagcttacaaagccgggcgtgctccaacgccggaagactttcctcgccaattggcgcttatgaaggaattagtggatttgcttggcctcgaacgcttggaagttcccggtttcgaggcagacgacgtattagcgactctcgcaaagaaagccgaacgtgagggctatgaagtccagatcttgacagcagatcgcgatcttttccagcttttatctccgcgcatctcggtgttacacccggaagggcatcgtatcaccccggaatggctctgggagaaatatggtttgcgtcccgaacaatgggtggattttcgcgccttagcaggcgatccgagcgacaatattccgggagttaaaggtatcggcgagaagacggcgctcaagctccttaaagaatgggggtcgttggagaacttgcttaagaatttagatcaggtcaaaccagagtcagtgcgtgagaagattcttgctcacctcgaagacctcaaattaagccgcgaattgtcccgtgtacgcaccgatttgccgctcgaagttgatttcggtcgccgccgcgaacctgactgggagggtcttaaagcgtttttagagcgtcttgaatttggttcgctcttgcatgaattcggccttttagaaagcccgttactggccgaagaagcaccttggccaccgcccgagggcgcgtttttaggttaccgtttgagtcgcccggaaccgatgtgggccgaattactggctcttgcagcgtctgcccagggacgtgtgtatcgcgcggaagaccctcatggtgcgctccgcggcctcttcgaagtccgtggactccttgccaaagacttagctgttgttgcattgcgcgaaggtcttgatttacctccgactgatgatccaatgcttcttgcgtacctcttggacccgtcaaacacgacgcccgaaggcgtagcccgtcgttacggcggcgagtggaccgaagatgcagcgaaacgcgcgttattggccgaacgtttgcacgccaatttattaggacgtttgcaaggcgaggaacgtctcctctggctttacgaagaagtggagaaaccattgagtcgcgtgctcgcgcatatggaagctaccggtgtcaaattagacgtggcgtatttggagaatctcagccttgaagttgctgcccacatgcgccgcttggaggaagaagtattccgtttagcaggccgttcctttcgccttaactctcgcgatcagttagaacgtgtgttgttcgatgaacttggtctccctcctatcggcaagacagagaagaccggtaaacgtagcacttcagcggcggttttagaagctcttcgcgaagtccatcccattgtggacaagatcttgcagtaccgcgaactcgcgaaattgaaaggcacctatattgaccgtcttccggcattagtccacccgaaaacgggacgcctccatacccgcttcaaccaaacagccacggcgaccggtcgtttgtcctcctctgatccaaaccttcagaatattccagtacgtaccccattgggccagaagatccgccgtgcgtttgtagctgaggagggttggcgtttagtggccctcgattatcgtcaaattgaattacgtgtccttgcccatctttctggcgatgagaacctcatccgcgtgtttcaggaaggcaaagacattcacactcaaacggcaagctggatgtttggattatcagctgaagcgatcgatcctttgatgcgtcgtgcagcgaagaccatcaatttcggtgttctctacggtatgagtgcctttcgtttgtcgcaggaattaggcattccctatgaagaagctcaggcgttcattcagaaatactttcaaagctatcccaaagttaaagcatggatcgagaagactctccgtgaaggccgcacacgtggtgtggtagagaccttatttggacgtcgccgctatgttcccgatttaaacgctcgcgtgaaaggcaagcgtgaagccgccgaacgcatggcgttcaacatgcctgtacagggcacggcagctgacctcatgaaacttgcaatggtgcgcctttttccacaattgcgtgaagttggtgcccgcatgctcttgcaggtccacgatgaactcttgttagaagcgccaaaagagcgtgcggaagaggtggcagccctcgcgaaagaagttatggaaggcgtgtggcccttagcggtgcctcttgaagtcgaagttggtattggcgaggattggctggctgccaaagga

SEQ ID NO: 4946 - protein, 841 aa, synthetic construct
  REGION 1..841: note = Variant of DNA polymerase I from Thermus sp. strain 2.9
MHHHHHHGGSGVLPVFEPKGRVLLVDGHHLAYRNFFALKGLTTSLGEPVQGVYGFAKSLLKALKEDGDVVIVVFDAKAPSFRHEAYEAYKAGRAPTPEDFPRQLALMKELVDLLGLERLEVPGFEADDVLATLAKKAEREGYEVQILTADRDLFQLLSPRISVLHPEGHRITPEWLWEKYGLRPEQWVDFRALAGDPSDNIPGVKGIGEKTALKLLKEWGSLENLLKNLDQVKPESVREKILAHLEDLKLSRELSRVRTDLPLEVDFGRRREPDWEGLKAFLERLEFGSLLHEFGLLESPLLAEEAPWPPPEGAFLGYRLSRPEPMWAELLALAASAQGRVYRAEDPHGALRGLFEVRGLLAKDLAVVALREGLDLPPTDDPMLLAYLLDPSNTTPEGVARRYGGEWTEDAAKRALLAERLHANLLGRLQGEERLLWLYEEVEKPLSRVLAHMEATGVKLDVAYLENLSLEVAAHMRRLEEEVFRLAGRSFRLNSRDQLERVLFDELGLPPIGKTEKTGKRSTSAAVLEALREVHPIVDKILQYRELAKLKGTYIDRLPALVHPKTGRLHTRFNQTATATGRLSSSDPNLQNIPVRTPLGQKIRRAFVAEEGWRLVALDYRQIELRVLAHLSGDENLIRVFQEGKDIHTQTASWMFGLSAEAIDPLMRRAAKTINFGVLYGMSAFRLSQELGIPYEEAQAFIQKYFQSYPKVKAWIEKTLREGRTRGVVETLFGRRRYVPDLNARVKGKREAAERMAFNMPVQGTAADLMKLAMVRLFPQLREVGARMLLQVHDELLLEAPKERAEEVAALAKEVMEGVWPLAVPLEVEVGIGEDWLAAKG

SEQ ID NO: 4947 - DNA, 2523 bp, synthetic construct
  misc_feature 1..2523: note = Variant of DNA polymerase I from Thermus sp. strain 2.9
  source 1..2523: mol_type = other DNA
atgcaccatcatcatcatcatggcggtagcggcgtgttaccggtgttcgagcctaaaggtcgcgtgcttctggttgatggccatcatctcgcgtatcgtaacttctttgccctgaaaggattaaccaccagcctgggcgagccggtacagggtgtctacggctttgcaaagtcgctcctgaaagctctgaaagaagacggtgatgtggtgattgttgtctttgatgcgaaagcgccaagttttcgccacgaagcgtacgaagcttacaaagccgggcgtgctccaacgccggaagactttcctcgccaattggcgcttatgaaggaattagtggatttgcttggcctcgaacgcttggaagttcccggtttcgaggcagacgacgtattagcgactctcgcaaagaaagccgaacgtgagggctatgaagtccagatcttgacagcagatcgcgatcttttccagcttttatctccgcgcatctcggtgttacacccggaagggcatcgtatcaccccggaatggctctgggagaaatatggtttgcgtcccgaacaatgggtggattttcgcgccttagcaggcgatccgagcgacaatattccgggagttaaaggtatcggcgagaagacggcgctcaagctccttaaagaatgggggtcgttggagaacttgcttaagaatttagatcaggtcaaaccagagtcagtgcgtgagaagattcttgctcacctcgaagacctcaaattaagccgcgaattgtcccgtgtacgcaccgatttgccgctcgaagttgatttcggtcgccgccgcgaacctgactgggagggtcttaaagcgtttttagagcgtcttgaatttggttcgctcttgcatgaattcggccttttagaaagcccgttactggccgaagaagcaccttggccaccgcccgagggcgcgtttttaggttaccgtttgagtcgcccggaaccgatgtgggccgaattactggctcttgcagcgtctgcccagggacgtgtgtatcgcgcggaagaccctcatggtgcgctccgcggcctcttcgaagtccgtggactccttgccaaagacttagctgttgttgcattgcgcgaaggtcttgatttacctccgactgatgatccaatgcttcttgcgtacctcttggacccgtcaaacacgacgcccgaaggcgtagcccgtcgttacggcggcgagtggaccgaagatgcagcgaaacgcgcgttattggccgaacgtttgcacgccaatttattaggacgtttgcaaggcgaggaacgtctcctctggctttacgaagaagtggagaaaccattgagtcgcgtgctcgcgcatatggaagctaccggtgtcaaattagacgtggcgtatttggagaatctcagccttgaagttgctgcccacatgcgccgcttggaggaagaagtattccgtttagcaggccgttcctttcgccttaactctcgcgatcagttagaacgtgtgttgttcgatgaacttggtctccctcctatcggcaagacagagaagaccggtaaacgtagcacttcagcggcggttttagaagctcttcgcgaagtccatcccattgtggacaagatcttgcagtaccgcgaactcgcgaaattgaaaggcacctatattgaccgtcttccggcattagtccacccgaaaacgggacgcctccatacccgcttcaaccaaacagccacggcgaccggtcgtcagtcctcctctgatccaaaccttcagaatattccagtacgtaccccattgggccagaagatccgccgtgcgtttgtagctgaggagggttggcgtttagtggccctcgattatcgtcaaattgaattacgtgtccttgcccatctttctggcgatgagaacctcatccgcgtgtttcaggaaggcaaagacattcacactcaaacggcaagctggatgtttggattatcagctgaagcgatcgatcctttgatgcgtcgtgcagcgaagaccatcaatttcggtgttctctacggtatgagtgcctttcgtttgtcgcaggaattaggcattccctatgaagaagctcaggcgttcattcagaaatactttcaaagctatcccaaagttaaagcatggatcgagaagactctccgtgaaggccgcacacgtggttacgtagagaccttatttggacgtcgccgctatgttcccgatttaaacgctcgcgtgaaaggcaagcgtgaagccgccgaacgcatggcgttcaacatgcctgtacagggcacggcagctgacctcatgaaacttgcaatggtgcgcctttttccacaattgcgtgaagttggtgcccgcatgctcttgcaggtccacgatgaactcttgttagaagcgccaaaagagcgtgcggaagaggtggcagccctcgcgaaagaagttatggaaggcgtgtggcccttagcggtgcctcttgaagtcgaagttggtattggcgaggattggctggctgccaaagga

SEQ ID NO: 4948 - protein, 841 aa, synthetic construct
  REGION 1..841: note = Variant of DNA polymerase I from Thermus sp. strain 2.9
MHHHHHHGGSGVLPVFEPKGRVLLVDGHHLAYRNFFALKGLTTSLGEPVQGVYGFAKSLLKALKEDGDVVIVVFDAKAPSFRHEAYEAYKAGRAPTPEDFPRQLALMKELVDLLGLERLEVPGFEADDVLATLAKKAEREGYEVQILTADRDLFQLLSPRISVLHPEGHRITPEWLWEKYGLRPEQWVDFRALAGDPSDNIPGVKGIGEKTALKLLKEWGSLENLLKNLDQVKPESVREKILAHLEDLKLSRELSRVRTDLPLEVDFGRRREPDWEGLKAFLERLEFGSLLHEFGLLESPLLAEEAPWPPPEGAFLGYRLSRPEPMWAELLALAASAQGRVYRAEDPHGALRGLFEVRGLLAKDLAVVALREGLDLPPTDDPMLLAYLLDPSNTTPEGVARRYGGEWTEDAAKRALLAERLHANLLGRLQGEERLLWLYEEVEKPLSRVLAHMEATGVKLDVAYLENLSLEVAAHMRRLEEEVFRLAGRSFRLNSRDQLERVLFDELGLPPIGKTEKTGKRSTSAAVLEALREVHPIVDKILQYRELAKLKGTYIDRLPALVHPKTGRLHTRFNQTATATGRQSSSDPNLQNIPVRTPLGQKIRRAFVAEEGWRLVALDYRQIELRVLAHLSGDENLIRVFQEGKDIHTQTASWMFGLSAEAIDPLMRRAAKTINFGVLYGMSAFRLSQELGIPYEEAQAFIQKYFQSYPKVKAWIEKTLREGRTRGYVETLFGRRRYVPDLNARVKGKREAAERMAFNMPVQGTAADLMKLAMVRLFPQLREVGARMLLQVHDELLLEAPKERAEEVAALAKEVMEGVWPLAVPLEVEVGIGEDWLAAKG

SEQ ID NO: 4949 - DNA, 2523 bp, synthetic construct
  misc_feature 1..2523: note = Variant of DNA polymerase I from Thermus sp. strain 2.9
  source 1..2523: mol_type = other DNA
atgcaccatcatcatcatcatggcggtagcggcgtgttaccggtgttcgagcctaaaggtcgcgtgcttctggttgatggccatcatctcgcgtatcgtaacttctttgccctgaaaggattaaccaccagcctgggcgagccggtacagggtgtctacggctttgcaaagtcgctcctgaaagctctgaaagaagacggtgatgtggtgattgttgtctttgatgcgaaagcgccaagttttcgccacgaagcgtacgaagcttacaaagccgggcgtgctccaacgccggaagactttcctcgccaattggcgcttatgaaggaattagtggatttgcttggcctcgaacgcttggaagttcccggtttcgaggcagacgacgtattagcgactctcgcaaagaaagccgaacgtgagggctatgaagtccagatcttgacagcagatcgcgatcttttccagcttttatctccgcgcatctcggtgttacacccggaagggcatcgtatcaccccggaatggctctgggagaaatatggtttgcgtcccgaacaatgggtggattttcgcgccttagcaggcgatccgagcgacaatattccgggagttaaaggtatcggcgagaagacggcgctcaagctccttaaagaatgggggtcgttggagaacttgcttaagaatttagatcaggtcaaaccagagtcagtgcgtgagaagattcttgctcacctcgaagacctcaaattaagccgcgaattgtcccgtgtacgcaccgatttgccgctcgaagttgatttcggtcgccgccgcgaacctgactgggagggtcttaaagcgtttttagagcgtcttgaatttggttcgctcttgcatgaattcggccttttagaaagcccgttactggccgaagaagcaccttggccaccgcccgagggcgcgtttttaggttaccgtttgagtcgcccggaaccgatgtgggccgaattactggctcttgcagcgtctgcccagggacgtgtgtatcgcgcggaagaccctcatggtgcgctccgcggcctcttcgaagtccgtggactccttgccaaagacttagctgttgttgcattgcgcgaaggtcttgatttacctccgactgatgatccaatgcttcttgcgtacctcttggacccgtcaaacacgacgcccgaaggcgtagcccgtcgttacggcggcgagtggaccgaagatgcagcgaaacgcgcgttattggccgaacgtttgcacgccaatttattaggacgtttgcaaggcgaggaacgtctcctctggctttacgaagaagtggagaaaccattgagtcgcgtgctcgcgcatatggaagctaccggtgtcaaattagacgtggcgtatttggagaatctcagccttgaagttgctgcccacatgcgccgcttggaggaagaagtattccgtttagcaggccgttcctttcgccttaactctcgcgatcagttagaacgtgtgttgttcgatgaacttggtctccctcctatcggcaagacagagaagaccggtaaacgtagcacttcagcggcggttttagaagctcttcgcgaagtccatcccattgtggacaagatcttgcagtaccgcgaactcgcgaaattgaaaggcacctatattgaccgtcttccggcattagtccacccgaaaacgggacgcctccatacccgcttcaaccaaacagccacggcgaccggtcgtttgtcctcctctgatccaaaccttcagaatattccagtacgtaccccattgggccagaagatccgccgtgcgtttgtagctgaggagggttggcgtttagtggccctcgattatcgtcaaattgaattacgtgtccttgcccatctttctggcgatgagaacctcatccgcgtgtttcaggaaggcaaagacattcacactcaaacggcaagctggatgtttggattatcagctgaagcgatcgatcctttgatgcgtcgtgcagcgaagaccatcaatttcggtgttctctacggtatgagtgcctttcgtttgtcgcaggaattaggcattccctatgaagaagctcaggcgttcattcagaaatactttcaaagctatcccaaagttaaagcatggatcgagaagactctccgtgaaggccgcacacgtggttacgtagagaccttatttggacgtcgccgctgggttcccgatttaaacgctcgcgtgaaaggcaagcgtgaagccgccgaacgcatggcgttcaacatgcctgtacagggcacggcagctgacctcatgaaacttgcaatggtgcgcctttttccacaattgcgtgaagttggtgcccgcatgctcttgcaggtccacgatgaactcttgttagaagcgccaaaagagcgtgcggaagaggtggcagccctcgcgaaagaagttatggaaggcgtgtggcccttagcggtgcctcttgaagtcgaagttggtattggcgaggattggctggctgccaaagga

SEQ ID NO: 4950 - protein, 841 aa, synthetic construct
  REGION 1..841: note = Variant of DNA polymerase I from Thermus sp. strain 2.9
MHHHHHHGGSGVLPVFEPKGRVLLVDGHHLAYRNFFALKGLTTSLGEPVQGVYGFAKSLLKALKEDGDVVIVVFDAKAPSFRHEAYEAYKAGRAPTPEDFPRQLALMKELVDLLGLERLEVPGFEADDVLATLAKKAEREGYEVQILTADRDLFQLLSPRISVLHPEGHRITPEWLWEKYGLRPEQWVDFRALAGDPSDNIPGVKGIGEKTALKLLKEWGSLENLLKNLDQVKPESVREKILAHLEDLKLSRELSRVRTDLPLEVDFGRRREPDWEGLKAFLERLEFGSLLHEFGLLESPLLAEEAPWPPPEGAFLGYRLSRPEPMWAELLALAASAQGRVYRAEDPHGALRGLFEVRGLLAKDLAVVALREGLDLPPTDDPMLLAYLLDPSNTTPEGVARRYGGEWTEDAAKRALLAERLHANLLGRLQGEERLLWLYEEVEKPLSRVLAHMEATGVKLDVAYLENLSLEVAAHMRRLEEEVFRLAGRSFRLNSRDQLERVLFDELGLPPIGKTEKTGKRSTSAAVLEALREVHPIVDKILQYRELAKLKGTYIDRLPALVHPKTGRLHTRFNQTATATGRLSSSDPNLQNIPVRTPLGQKIRRAFVAEEGWRLVALDYRQIELRVLAHLSGDENLIRVFQEGKDIHTQTASWMFGLSAEAIDPLMRRAAKTINFGVLYGMSAFRLSQELGIPYEEAQAFIQKYFQSYPKVKAWIEKTLREGRTRGYVETLFGRRRWVPDLNARVKGKREAAERMAFNMPVQGTAADLMKLAMVRLFPQLREVGARMLLQVHDELLLEAPKERAEEVAALAKEVMEGVWPLAVPLEVEVGIGEDWLAAKG

SEQ ID NO: 4951 - DNA, 2523 bp, synthetic construct
  misc_feature 1..2523: note = Variant of DNA polymerase I from Thermus sp. strain 2.9
  source 1..2523: mol_type = other DNA
atgcaccatcatcatcatcatggcggtagcggcgtgttaccggtgttcgagcctaaaggtcgcgtgcttctggttgatggccatcatctcgcgtatcgtaacttctttgccctgaaaggattaaccaccagcctgggcgagccggtacagggtgtctacggctttgcaaagtcgctcctgaaagctctgaaagaagacggtgatgtggtgattgttgtctttgatgcgaaagcgccaagttttcgccacgaagcgtacgaagcttacaaagccgggcgtgctccaacgccggaagactttcctcgccaattggcgcttatgaaggaattagtggatttgcttggcctcgaacgcttggaagttcccggtttcgaggcagacgacgtattagcgactctcgcaaagaaagccgaacgtgagggctatgaagtccagatcttgacagcagatcgcgatcttttccagcttttatctccgcgcatctcggtgttacacccggaagggcatcgtatcaccccggaatggctctgggagaaatatggtttgcgtcccgaacaatgggtggattttcgcgccttagcaggcgatccgagcgacaatattccgggagttaaaggtatcggcgagaagacggcgctcaagctccttaaagaatgggggtcgttggagaacttgcttaagaatttagatcaggtcaaaccagagtcagtgcgtgagaagattcttgctcacctcgaagacctcaaattaagccgcgaattgtcccgtgtacgcaccgatttgccgctcgaagttgatttcggtcgccgccgcgaacctgactgggagggtcttaaagcgtttttagagcgtcttgaatttggttcgctcttgcatgaattcggccttttagaaagcccgttactggccgaagaagcaccttggccaccgcccgagggcgcgtttttaggttaccgtttgagtcgcccggaaccgatgtgggccgaattactggctcttgcagcgtctgcccagggacgtgtgtatcgcgcggaagaccctcatggtgcgctccgcggcctcttcgaagtccgtggactccttgccaaagacttagctgttgttgcattgcgcgaaggtcttgatttacctccgactgatgatccaattcttcttgcgtacctcttggacccgtcaaacacgacgcccgaaggcgtagcccgtcgttacggcggcgagtggaccgaagatgcagcgaaacgcgcgttattggccgaacgtttgcacgccaatttattaggacgtttgcaaggcgaggaacgtctcctctggctttacgaagaagtggagaaaccattgagtcgcgtgctcgcgcatatggaagctaccggtgtcaaattagacgtggcgtatttggagaatctcagccttgaagttgctgcccacatgcgccgcttggaggaagaagtattccgtttagcaggccgttcctttcgccttaactctcgcgatcagttagaacgtgtgttgttcgatgaacttggtctccctcctatcggcaagacagagaagaccggtaaacgtagcacttcagcggcggttttagaagctcttcgcgaagtccatcccattgtggacaagatcttgcagtaccgcgaactcgcgaaattgaaaggcacctatattgaccgtcttccggcattagtccacccgaaaacgggacgcctccatacccgcttcaaccaaacagccacggcgaccggtcgtttgtcctcctctgatccaaaccttcagaatattccagtacgtaccccattgggccagaagatccgccgtgcgtttgtagctgaggagggttggcgtttagtggccctcgattatcgtcaaattgaattacgtgtccttgcccatctttctggcgatgagaacctcatccgcgtgtttcaggaaggcaaagacattcacactcaaacggcaagctggatgtttggattatcagctgaagcgatcgatcctttgatgcgtcgtgcagcgaagaccatcaatttcggtgttctctacggtatgagtgcctttcgtttgtcgcaggaattaggcattccctatgaagaagctcaggcgttcattcagaaatactttcaaagctatcccaaagttaaagcatggatcgagaagactctccgtgaaggccgcacacgtggttacgtagagaccttatttggacgtcgccgctatgttcccgatttaaacgctcgcgtgaaaggcaagcgtgaagccgccgaacgcatggcgttcaacatgcctgtacagggcacggcagctgacctcatgaaacttgcaatggtgcgcctttttccacaattgcgtgaagttggtgcccgcatgctcttgcaggtccacgatgaactcttgttagaagcgccaaaagagcgtgcggaagaggtggcagccctcgcgaaagaagttatggaaggcgtgtggcccttagcggtgcctcttgaagtcgaagttggtattggcgaggattggctggctgccaaagga

SEQ ID NO: 4952 - protein, 841 aa, synthetic construct
  REGION 1..841: note = Variant of DNA polymerase I from Thermus sp. strain 2.9
MHHHHHHGGSGVLPVFEPKGRVLLVDGHHLAYRNFFALKGLTTSLGEPVQGVYGFAKSLLKALKEDGDVVIVVFDAKAPSFRHEAYEAYKAGRAPTPEDFPRQLALMKELVDLLGLERLEVPGFEADDVLATLAKKAEREGYEVQILTADRDLFQLLSPRISVLHPEGHRITPEWLWEKYGLRPEQWVDFRALAGDPSDNIPGVKGIGEKTALKLLKEWGSLENLLKNLDQVKPESVREKILAHLEDLKLSRELSRVRTDLPLEVDFGRRREPDWEGLKAFLERLEFGSLLHEFGLLESPLLAEEAPWPPPEGAFLGYRLSRPEPMWAELLALAASAQGRVYRAEDPHGALRGLFEVRGLLAKDLAVVALREGLDLPPTDDPILLAYLLDPSNTTPEGVARRYGGEWTEDAAKRALLAERLHANLLGRLQGEERLLWLYEEVEKPLSRVLAHMEATGVKLDVAYLENLSLEVAAHMRRLEEEVFRLAGRSFRLNSRDQLERVLFDELGLPPIGKTEKTGKRSTSAAVLEALREVHPIVDKILQYRELAKLKGTYIDRLPALVHPKTGRLHTRFNQTATATGRLSSSDPNLQNIPVRTPLGQKIRRAFVAEEGWRLVALDYRQIELRVLAHLSGDENLIRVFQEGKDIHTQTASWMFGLSAEAIDPLMRRAAKTINFGVLYGMSAFRLSQELGIPYEEAQAFIQKYFQSYPKVKAWIEKTLREGRTRGYVETLFGRRRYVPDLNARVKGKREAAERMAFNMPVQGTAADLMKLAMVRLFPQLREVGARMLLQVHDELLLEAPKERAEEVAALAKEVMEGVWPLAVPLEVEVGIGEDWLAAKG

SEQ ID NO: 4953 - DNA, 2523 bp, synthetic construct
  misc_feature 1..2523: note = Variant of DNA polymerase I from Thermus sp. strain 2.9
  source 1..2523: mol_type = other DNA
atgcaccatcatcatcatcatggcggtagcggcgtgttaccggtgttcgagcataaaggtcgcgtgcttctggttgatggccatcatctcgcgtatcgtaacttctttgccctgaaaggattaaccaccagcctgggcgagccggtacagggtgtctacggctttgcaaagtcgctcctgaaagctctgaaagaagacggtgatgtggtgattgttgtctttgatgcgaaagcgccaagttttcgccacgaagcgtacgaagcttacaaagccgggcgtgctccaacgccggaagactttcctcgccaattgtttcttatgaaggaattagtggatttgcttggcctcgaacgcttggaagttcccggtttcgaggcagacgacgtattagcgactctcgcaaagaaagccgaacgtgagggctatgaagtccagatcttgacagcagatcgcgatcttttccagcttttatctccgcgcatctcggtgttacacccggaagggcatcgtatcaccccggaatggctctgggagaaatatggtttgcgtcccgaacaatgggtggattttcgcgccttagcaggcgatccgagcgacaatattccgggagttaaaggtatcggcgagaagacggcgctcaagctccttaaagaatgggggtcgttggagaacttgcttaagaatttagatcaggtcaaaccagagtcagtgcgtgagaagattcttgctcacctcgaagacctcgagttaagccgcgaattgtcccgtgtacgcaccgatttgccgctcgaagttgatttcggtcgccgccgcgaacctgactgggagggtcttaaagcgtttttagagtgtcttgaatttggttcgctcctgcatgaattcggccttttagaaagcccgttagtggccgaagaagcaccttggccaccgcccgagggcgcgtttttaggttaccgtttgagtcgcccggaaccgatgtgggccgaattactggctcttgcagcgtctgcccagggacgtgtgtatcgcgcggaagaccctcatggtgcgctccgcggcctcttcgaagtccgtggactccttgccaaagacttagctgttgttgcattgcgcgaaggtcttgatttacctccgactgatgatccaatgcttcttgcgtacctcttggacccgtcaaacacgacgcccgaaggcgtagcccgtcgttacggcggcgagtggaccgaagatgcagcgaaacgcgcgttattggccgaacgtttgcacgagaatttacgtggacgtttgcaaggcgaggagcgtctcctctggctttacgaagaagtggagaaaccattgagtcgcgtgctcgctcatatggaagctaccggtgtcaaattagacgtggcgtatttggagaatctcagccttgaagttgctgcccacatgcgccgcttggaggaagaagtattccgtttagcaggccgttcctttcgccttaactctcgcgatcagttagaaaaagtgttgttcgatgaacttggtctccctcctatcggcaagacagagaagaccggtaaacgtagcacttcagcggcggttttagaggctcttcgcgaagtccatcccattgtggacaagatcttgcagtaccgcgaactggcgaaattgaaaggcacctatattgaccgtcttccggcattagtccacccgaaaacgggacgcctccatacccgcttcaaccaaacagccacggcgaccggtcgtttgtcctcctctgatccaaaccttcagaatattccagtacgtacccctttgggccagaagatccgccgtgcgtttgtagctgaggagggttggcgtttagtggccctcgattatcgtcaaattgaattacgtgtccttgcccatctttctggcgatgagaacctcatccgcgtgtttcaggaaggcaaagacattcacactcaaacggcaagctggatgtttggattatcagctgaagcgatcgatcctttgatgcgtcgtgcagcgaagaagatcaatttcggtgttctctacggtatgagtccatttcgtttgtcgcaggaattaggcattccctatgaagaagctcaggcgttcattcagaaatactttcaaagctatcccaaagttaaagcatggatcgagaagactctccgtgaaggccgcacccgtggttacgtagagaccttatttggacgtcgccgctatgttcccgatttaaacgctcgcgtgaaaggcaagcgtgaagccgccgaacgcatggcgttcaacatgcctgtacagggcacggcagctgacctcatgaaacttgcaatggtgcgcctttttccacaattgcgtgaagttggtgcccgcatgctcttgcaggtccatgatgaactcttgttcgaagcgccaaaagagcgtgcggaagaggtggcagccctcgcgaaagaagttatggaaggcgtgtggcccttagcggtgcctcttgaagtcgaagttggtattggcgaggattggctggctgccaaagga

SEQ ID NO: 4954 - protein, 841 aa, synthetic construct
  REGION 1..841: note = Variant of DNA polymerase I from Thermus sp. strain 2.9
MHHHHHHGGSGVLPVFEHKGRVLLVDGHHLAYRNFFALKGLTTSLGEPVQGVYGFAKSLLKALKEDGDVVIVVFDAKAPSFRHEAYEAYKAGRAPTPEDFPRQLFLMKELVDLLGLERLEVPGFEADDVLATLAKKAEREGYEVQILTADRDLFQLLSPRISVLHPEGHRITPEWLWEKYGLRPEQWVDFRALAGDPSDNIPGVKGIGEKTALKLLKEWGSLENLLKNLDQVKPESVREKILAHLEDLELSRELSRVRTDLPLEVDFGRRREPDWEGLKAFLECLEFGSLLHEFGLLESPLVAEEAPWPPPEGAFLGYRLSRPEPMWAELLALAASAQGRVYRAEDPHGALRGLFEVRGLLAKDLAVVALREGLDLPPTDDPMLLAYLLDPSNTTPEGVARRYGGEWTEDAAKRALLAERLHENLRGRLQGEERLLWLYEEVEKPLSRVLAHMEATGVKLDVAYLENLSLEVAAHMRRLEEEVFRLAGRSFRLNSRDQLEKVLFDELGLPPIGKTEKTGKRSTSAAVLEALREVHPIVDKILQYRELAKLKGTYIDRLPALVHPKTGRLHTRFNQTATATGRLSSSDPNLQNIPVRTPLGQKIRRAFVAEEGWRLVALDYRQIELRVLAHLSGDENLIRVFQEGKDIHTQTASWMFGLSAEAIDPLMRRAAKKINFGVLYGMSPFRLSQELGIPYEEAQAFIQKYFQSYPKVKAWIEKTLREGRTRGYVETLFGRRRYVPDLNARVKGKREAAERMAFNMPVQGTAADLMKLAMVRLFPQLREVGARMLLQVHDELLFEAPKERAEEVAALAKEVMEGVWPLAVPLEVEVGIGEDWLAAKG

SEQ ID NO: 4955 - DNA, 2523 bp, synthetic construct
  misc_feature 1..2523: note = Variant of DNA polymerase I from Thermus sp. strain 2.9
  source 1..2523: mol_type = other DNA
atgcaccatcatcatcatcatggcggtagcggcgtgttaccggtgttcgagcctaaaggtcgcgtgcttctggttgatggccatcatctcgcgtatcgtaacttctttgccctgaaaggattaaccaccagcctgggcgagccggtacagggtgtctacggctttgcaaagtcgctcctgaaagctctgaaagaagacggtgatgtggtgattgttgtctttgatgcgaaagcgccaagttttcgccacgaagcgtacgaagcttacaaagccgggcgtgctccaacgccggaagactttcctcgccaattggcgcttatgaaggaattagtggatttgcttggcctcgaacgcttggaagttcccggtttcgaggcagacgacgtattagcgactctcgcaaagaaagccgaacgtgagggctatgaagtccagatcttgacagcagatcgcgatcttttccagcttttatctccgcgcatctcggtgttacacccggaagggcatcgtatcaccccggaatggctctgggagaaatatggtttgcgtcccgaacaatgggtggattttcgcgccttagcaggcgatccgagcgacaatattccgggagttaaaggtatcggcgagaagacggcgctcaagctccttaaagaatgggggtcgttggagaacttgcttaagaatttagatcaggtcaaaccagagtcagtgcgtgagaagattcttgctcacctcgaagacctcaaattaagccgcgaattgtcccgtgtacgcaccgatttgccgctcgaagttgatttcggtcgccgccgcgaacctgactgggagggtcttaaagcgtttttagagcgtcttgaatttggttcgctcttgcatgaattcggccttttagaaagcccgttactggccgaagaagcaccttggccaccgcccgagggcgcgtttttaggttaccgtttgagtcgcccggaaccgatgtgggccgaattactggctcttgcagcgtctgcccagggacgtgtgtatcgcgcggaagaccctcatggtgcgctccgcggcctcttcgaagtccgtggactccttgccaaagacttagctgttgttgcattgcgcgaaggtcttgatttacctccgactgatgatccaatgcttcttgcgtacctcttggacccgtcaaacacgacgcccgaaggcgtagcccgtcgttacggcggcgagtggaccgaagatgcagcgaaacgcgcgttattggccgaacgtttgcacgccaatttattaggacgtttgcaaggcgaggaacgtctcctctggctttacgaagaagtggagaaaccattgagtcgcgtgctcgcgcatatggaagctaccggtgtcaaattagacgtggcgtatttggagaatctcagccttgaagttgctgcccacatgcgccgcttggaggaagaagtattccgtttagcaggccgttcctttcgccttaactctcgcgatcagttagaacgtgtgttgttcgatgaacttggtctccctcctatcggcaagacagagaagaccggtaaacgtagcacttcagcggcggttttagaagctcttcgcgaagtccatcccattgtggacaagatcttgcagtaccgcgaactcgcgaaattgaaaggcacctatattgaccgtcttccggcattagtccacccgaaaacgggacgcctccatacccgcttcaaccaaacagccacggcgaccggtcgtttgtcctcctctgatccaaaccttcagaatattccagtacgtaccccattgggccagaagatccgccgtgcgtttgtagctgaggagggttggcgtttagtggccctcgattatcgtcaaattgaattacgtgtccttgcccatctttctggcgatgagaacctcatccgcgtgtttcaggaaggcaaagacattcacactcaaacggcaagctggatgtttggattatcagctgaagcgatcttgcctttgatgcgtcgtgcagcgaagaccatcaatttcggtgttctctacggtatgagtgcctttcgtttgtcgcaggaattaggcattccctatgaagaagctcaggcgttcattcagaaatactttcaaagctatcccaaagttaaagcatggatcgagaagactctccgtgaaggccgcacacgtggttacgtagagaccttatttggacgtcgccgctatgttcccgatttaaacgctcgcgtgaaaggcaagcgtgaagccgccgaacgcatggcgttcaacatgcctgtacagggcacggcagctgacctcatgaaacttgcaatggtgcgcctttttccacaattgcgtgaagttggtgcccgcatgctcttgcaggtccacgatgaactcttgttagaagcgccaaaagagcgtgcggaagaggtggcagccctcgcgaaagaagttatggaaggcgtgtggcccttagcggtgcctcttgaagtcgaagttggtattggcgaggattggctggctgccaaagga

SEQ ID NO: 4956 - protein, 841 aa, synthetic construct
  REGION 1..841: note = Variant of DNA polymerase I from Thermus sp. strain 2.9
MHHHHHHGGSGVLPVFEPKGRVLLVDGHHLAYRNFFALKGLTTSLGEPVQGVYGFAKSLLKALKEDGDVVIVVFDAKAPSFRHEAYEAYKAGRAPTPEDFPRQLALMKELVDLLGLERLEVPGFEADDVLATLAKKAEREGYEVQILTADRDLFQLLSPRISVLHPEGHRITPEWLWEKYGLRPEQWVDFRALAGDPSDNIPGVKGIGEKTALKLLKEWGSLENLLKNLDQVKPESVREKILAHLEDLKLSRELSRVRTDLPLEVDFGRRREPDWEGLKAFLERLEFGSLLHEFGLLESPLLAEEAPWPPPEGAFLGYRLSRPEPMWAELLALAASAQGRVYRAEDPHGALRGLFEVRGLLAKDLAVVALREGLDLPPTDDPMLLAYLLDPSNTTPEGVARRYGGEWTEDAAKRALLAERLHANLLGRLQGEERLLWLYEEVEKPLSRVLAHMEATGVKLDVAYLENLSLEVAAHMRRLEEEVFRLAGRSFRLNSRDQLERVLFDELGLPPIGKTEKTGKRSTSAAVLEALREVHPIVDKILQYRELAKLKGTYIDRLPALVHPKTGRLHTRFNQTATATGRLSSSDPNLQNIPVRTPLGQKIRRAFVAEEGWRLVALDYRQIELRVLAHLSGDENLIRVFQEGKDIHTQTASWMFGLSAEAILPLMRRAAKTINFGVLYGMSAFRLSQELGIPYEEAQAFIQKYFQSYPKVKAWIEKTLREGRTRGYVETLFGRRRYVPDLNARVKGKREAAERMAFNMPVQGTAADLMKLAMVRLFPQLREVGARMLLQVHDELLLEAPKERAEEVAALAKEVMEGVWPLAVPLEVEVGIGEDWLAAKG

SEQ ID NO: 4957 - DNA, 2523 bp, synthetic construct
  misc_feature 1..2523: note = Variant of DNA polymerase I from Thermus sp. strain 2.9
  source 1..2523: mol_type = other DNA
atgcaccatcatcatcatcatggcggtagcggcgtgttaccggtgttcgagcataaaggtcgcgtgcttctggttgatggccatcatctcgcgtatcgtaacttctttgccctgaaaggattaaccaccagcctgggcgagccggtacagggtgtctacggctttgcaaagtcgctcctgaaagctctgaaagaagacggtgatgtggtgattgttgtctttgatgcgaaagcgccaagttttcgccacgaagcgtacgaagcttacaaagccgggcgtgctccaacgccggaagactttcctcgccaattggcgcttatgaaggaattagtggatttgcttggcctcgaacgcttggaagttcccggtttcgaggcagacgacgtattagcgactctcgcaaagaaagccgaacgtgagggctatgaagtccagatcttgacagcagatcgcgatcttttccagcttttatctccgcgcatctcggtgttacacccggaagggcatcgtatcaccccggaatggctctgggagaaatatggtttgcgtcccgaacaatgggtggattttcgcgccttagcaggcgataagagcgacaatattccgggagttaaaggtatcggcgagaagacggcgctcaagctccttaaagaatgggggtcgttggagaacttgcttaagaatttagatcaggtcaaaccagagtcagtgcgtgagaagattcttgctcacctcgaagacctcaaattaagccgcgaattgtcccgtgtacgcaccgatttgccgctcgaagttgatttcggtcgccgccgcgaacctgactgggagggtcttaaagcgtttttagagcgtcttgaatttggttcgctcttgcatgaattcggccttttagaaagcccgttactggccgaagaagcaccttggccaccgcccgagggcgcgtttttaggttaccgtttgacccgcccggaaccgatgtgggccgaattactggctcttgcagcgtctgcccagggacgtgtgtatcgcgcggaagaccctcatggtgcgctccgcggcctcttcgaagtccgtggactccttgccaaagacttagctgttgttgcattgcgcgaaggtcttgatttacctccgactgatgatccaatgcttcttgcgtacctcttggacccgtcaaacacgacgcccgaaggcgtagcccgtcgttacggcggcgagtggaccgaagatgcagcgaaacgcgcgttattggccgaacgtttgcacgcgaatttacgtggacgtttgcaaggcgaggaacgtctcctctggctttacgaagaagtggagaaaccattgagtgtggtgctcggtcatatggaagctaccggtgtcaaattagacgtggcgtatttggagaatctcagccttgaagttgctgcccacatgcgccgcttggaggaagaagtattccgtttagcaggccgttcctttcgccttaactctcgcgatcagttagaacgtgtgttgttcgatgaacttggtctccctcctatcggcaagacagagaagaccggtaaacgtagcacttcagcggcggttttagaagctcttcgcgaagtccatcccattgtggacaagatcttgcagtaccgcgaactcgcgaaattgaaaggcacctatattgaccgtcttccggcattagtccacccgaaaacgggacgcctccatacccgcttcaaccaaacagccacggcgaccggtcgtttgtcctcctctgatccaaaccttcagaatattccagtacgtaccccattgggccagaagatccgccgtgcgtttgtagctgaggagggttggcgtttagtggccctcgattatcgtcaaattgaattacgtgtccttgcccatctttctggcgatgagaacctcatccgcgtgtttcaagaaggcaaagacattcacactcaaacggcaagctggatgtttggattaggcgctgaagcgatcgatcctttgatgcgtcgtgcagcgaagaagatcaatttcggtgttctctacggtatgagtgcatttcgtttgtcgcaggaattaggcattccctatgaagaagctcaggcgttcattcagaaatactttcaaagctatcccaaagttaaagcatggatcgagaagactctccgtgaaggccgcacacgtggttacgtagagaccttatttggacgtcgccgctatgttcccgatttaaacggccgcgtgaaaggcaagcgtgaagccgccgaacgcatggcgttcaacatgcctgtacagggcacggcagctgacctcatgaaacttgcaatggtgcgcctttttccacaattgcgtgaagttggtgcccgcatgctcttgcaggtccacgatgaactcttgttagaagcgccaaaagagcgtgcggaagaggtggcagccctcgcgaaagaagttatggaaggcgtgtggcccttagcggtgcctcttgaagtcgaagttggtattggcgaggattggctggctgccaaagga

SEQ ID NO: 4958 - protein, 841 aa, synthetic construct
  REGION 1..841: note = Variant of DNA polymerase I from Thermus sp. strain 2.9
MHHHHHHGGSGVLPVFEHKGRVLLVDGHHLAYRNFFALKGLTTSLGEPVQGVYGFAKSLLKALKEDGDVVIVVFDAKAPSFRHEAYEAYKAGRAPTPEDFPRQLALMKELVDLLGLERLEVPGFEADDVLATLAKKAEREGYEVQILTADRDLFQLLSPRISVLHPEGHRITPEWLWEKYGLRPEQWVDFRALAGDKSDNIPGVKGIGEKTALKLLKEWGSLENLLKNLDQVKPESVREKILAHLEDLKLSRELSRVRTDLPLEVDFGRRREPDWEGLKAFLERLEFGSLLHEFGLLESPLLAEEAPWPPPEGAFLGYRLTRPEPMWAELLALAASAQGRVYRAEDPHGALRGLFEVRGLLAKDLAVVALREGLDLPPTDDPMLLAYLLDPSNTTPEGVARRYGGEWTEDAAKRALLAERLHANLRGRLQGEERLLWLYEEVEKPLSVVLGHMEATGVKLDVAYLENLSLEVAAHMRRLEEEVFRLAGRSFRLNSRDQLERVLFDELGLPPIGKTEKTGKRSTSAAVLEALREVHPIVDKILQYRELAKLKGTYIDRLPALVHPKTGRLHTRFNQTATATGRLSSSDPNLQNIPVRTPLGQKIRRAFVAEEGWRLVALDYRQIELRVLAHLSGDENLIRVFQEGKDIHTQTASWMFGLGAEAIDPLMRRAAKKINFGVLYGMSAFRLSQELGIPYEEAQAFIQKYFQSYPKVKAWIEKTLREGRTRGYVETLFGRRRYVPDLNGRVKGKREAAERMAFNMPVQGTAADLMKLAMVRLFPQLREVGARMLLQVHDELLLEAPKERAEEVAALAKEVMEGVWPLAVPLEVEVGIGEDWLAAKG

SEQ ID NO: 4959 - DNA, 2523 bp, synthetic construct
  misc_feature 1..2523: note = Variant of DNA polymerase I from Thermus sp. strain 2.9
  source 1..2523: mol_type = other DNA
atgcaccatcatcatcatcatggcggtagcggcgtgttaccggtgttcgagcataaaggtcgcgtgcttctggttgatggccatcatctcgcgtatcgtaacttctttgccctgaaaggattaaccaccagcctgggcgagccggtacagggtgtctacggctttgcaaagtcgctcctgaaagctctgaaagaagacggtgatgtggtgattgttgtctttgatgcgaaagcgccaagttttcgccacgaagcgtacgaagcttacaaagccgggcgtgctccaacgccggaagactttcctcgccaattggcgcttatgaaggaattagtggatttgcttggcctcgaacgcttggaagttcccggtttcgaggcagacgacgtattagcgactctcgcaaagaaagccgaacgtgagggctatgaagtccagatcttgacagcagatcgcgatcttttccagcttttatctccgcgcatctcggtgttacacccggaagggcatcgtatcaccccggaatggctctgggagaaatatggtttgcgtcccgaacaatgggtggattttcgcgccttagcaggcgatccgagcgacaatattccgggagttaaaggtatcggcgagaagacggcgctcaagctccttaaagaatgggggtcgttggagaacttgcttaagaatttagatcaggtcaaaccagagtcagtgcgtgagaagattcttgctcacctcgaagacctcaaattaagccgcgaattgtcccgtgtacgcaccgatttgccgctcgaagttgatttcggtcgccgccgcgaacctgactgggagggtcttaaagcgtttttagagcgtcttgaatttggttcgctcttgcatgaattcggccttttagaaagcccgttagtggccgaagaagcaccttggccaccgcccgagggcgcgtttttaggttaccgtttgagtcgcccggaaccgatgtgggccgaattactggctcttgcagcgtctgcccagggacgtgtgtatcgcgcggaagaccctcatggtgcgctccgcggcctcttcgaagtccgtggactccttgccaaagacttagctgttgttgcattgcgcgaaggtcttgatttacctccgactgatgatccaatgcttcttgcgtacctcttggacccgtcaaacacgacgcccgaaggcgtagcccgtcgttacggcggcgagtggaccgaagatgcagcgaaacgcgcgttattggccgaacgtttgcacgcaaatttattaggacgtttgcaaggcgaggaacgtctcctctggctttacgaagaagtggagaaaccattgagtcgcgtgctcgcgcatatggaagctaccggtgtcaaattagacgtggcgtatttggagaatctcagccttgaagttgctgcccacatgcgccgcttggaggaagaagtattccgtttagcaggccgttcctttcgccttaactctcgcgatcagttagaacgtgtgttgttcgatgaacttggtctccctcctatcggcaagacagagaagaccggtaaacgtagcacttcagcagcggttttagacgctcttcgcgaagtccatcccattgtggacaagatcttgcagtaccgcgaactggcgaaattgaaaggcacctatattgaccgtcttccggcattagtccacccgaaaacgggacgcctccatacccgcttcaaccaaacagccacggcgaccggtcgtttgtcctcctctgatccaaaccttcagaatattccagtacgtaccccattgggccagaagatccgccgtgcgtttgtagctgaggagggttggcgtttagtggccctcgattatcgtcaaattgaattacgtgtccttgcccatctttctggcgatgagaacctcatccgcgtgtttcaggaaggcaaagacattcacactcaaacggcaagctggatgtttggattaggtgctgaagcgatcgatcctttgatgcgtcgtgcagcgaagaccatcaatttcggtgttctctacggtatgagtgcatttcgtttgtcgcaggaattaggcattcccaaggaagaagctcaggcgttcattcagaaatactttcaaagctatcccaaagttaaagcatggatcgagaagactctccgtgaaggccgcacacgtggttacgtagagaccttatttggacgtcgccgctatgttcccgatttaaacgctcgcgtgaaaggcaagcgtgaagccgccgaacgcatggcgttcaacatgcctgtacagggcacggcagctgacctcatgaaacttgcaatggtgcgcctttttccacaattgcgtgaagttggtgcccgcatgctcttgcaggtccacgatgaactcttgttagaagcgccaaaagagcgtgcggaagaggtggcagccctcgcgaaagaagttatggaaggcgtgtggcccttagcggtgcctcttgaagtcgaagttggtattggcgaggattggctggctgccaaagga

SEQ ID NO: 4960 - protein, 841 aa, synthetic construct
  REGION 1..841: note = Variant of DNA polymerase I from Thermus sp. strain 2.9
MHHHHHHGGSGVLPVFEHKGRVLLVDGHHLAYRNFFALKGLTTSLGEPVQGVYGFAKSLLKALKEDGDVVIVVFDAKAPSFRHEAYEAYKAGRAPTPEDFPRQLALMKELVDLLGLERLEVPGFEADDVLATLAKKAEREGYEVQILTADRDLFQLLSPRISVLHPEGHRITPEWLWEKYGLRPEQWVDFRALAGDPSDNIPGVKGIGEKTALKLLKEWGSLENLLKNLDQVKPESVREKILAHLEDLKLSRELSRVRTDLPLEVDFGRRREPDWEGLKAFLERLEFGSLLHEFGLLESPLVAEEAPWPPPEGAFLGYRLSRPEPMWAELLALAASAQGRVYRAEDPHGALRGLFEVRGLLAKDLAVVALREGLDLPPTDDPMLLAYLLDPSNTTPEGVARRYGGEWTEDAAKRALLAERLHANLLGRLQGEERLLWLYEEVEKPLSRVLAHMEATGVKLDVAYLENLSLEVAAHMRRLEEEVFRLAGRSFRLNSRDQLERVLFDELGLPPIGKTEKTGKRSTSAAVLDALREVHPIVDKILQYRELAKLKGTYIDRLPALVHPKTGRLHTRFNQTATATGRLSSSDPNLQNIPVRTPLGQKIRRAFVAEEGWRLVALDYRQIELRVLAHLSGDENLIRVFQEGKDIHTQTASWMFGLGAEAIDPLMRRAAKTINFGVLYGMSAFRLSQELGIPKEEAQAFIQKYFQSYPKVKAWIEKTLREGRTRGYVETLFGRRRYVPDLNARVKGKREAAERMAFNMPVQGTAADLMKLAMVRLFPQLREVGARMLLQVHDELLLEAPKERAEEVAALAKEVMEGVWPLAVPLEVEVGIGEDWLAAKG

SEQ ID NO: 4961 - DNA, 2523 bp, synthetic construct
  misc_feature 1..2523: note = Variant of DNA polymerase I from Thermus sp. strain 2.9
  source 1..2523: mol_type = other DNA
atgcaccatcatcatcatcatggcggtagcggcgtgttaccggtgttcgagcctaaaggtcgcgtgcttctggttgatggccatcatctcgcgtatcgtaacttctttgccctgaaaggattaaccaccagcctgggcgagccggtacagggtgtctacggctttgcaaagtcgctcctgaaagctctgaaagaagacggtgatgtggtgattgttgtctttgatgcgaaagcgccaagttttcgccacgaagcgtacgaagcttacaaagccgggcgtgctccaacgccggaagactttcctcgccaattggcgcttatgaaggaattagtggatttgcttggcctcgaacgcttggaagttcccggtttcgaggcagacgacgtattagcgactctcgcaaagaaagccgaacgtgagggctatgaagtccagatcttgacagcagatcgcgatcttttccagcttttatctccgcgcatctcggtgttacacccggaagggcatcgtatcaccccggaatggctctgggagaaatatggtttgcgtcccgaacaatgggtggattttcgcgccttagcaggcgatccgagcgacaatattccgggagttaaaggtatcggcgagaagacggcgctcaagctccttaaagaatgggggtcgttggagaacttgcttaagaatttagatcaggtcaaaccagagtcagtgcgtgagaagattcttgctcacctcgaagacctcaaattaagccgcgaattgtcccgtgtacgcaccgatttgccgctcgaagttgatttcggtcgccgccgcgaacctgactgggagggtcttaaagcgtttttagagcgtcttgaatttggttcgctccagcatgaattcggccttttagaaagcccgttagtggccgaagaagcaccttggccaccgcccgagggcgcgtttttaggttaccgtttgagtcgcccggaaccgatgtgggccgaattactggctcttgcagcgtctgcccagggacgtgtgtatcgcgcggaagaccctcatggtgcgctccgcggcctcttcgaagtccgtggactccttgccaaagacttagctgttgttgcattgcgcgaaggtcttgatttacctccgactgatgatccaatgcttcttgcgtacctcttggacccgtcaaacacgacgcccgaaggcgtagcccgtcgttacggcggcgagtggaccgaagatgcagcgaaacgcgcgttattggccgaacgtttgcacgaaaatttattaggacgtttgcaaggcgaggaacgtctcctctggctttacgaagaagtggagaaaccattgagtcgcgtgctcgcgcatatggaagctaccggtgtcaaattagacgtggcgtatttggagaatctcagccttgaagttgctgcccacatgcgccgcttggaggaagaagtattccgtttagcaggccgttcctttcgccttaactctcgcgatcagttagaacgtgtgttgttcgatgaacttggtctccctcctatcggcaagacagagaagaccggtaaacgtagcacttcagcggcggttttagaagctcttcgcgaagtccatcccattgtggacaagatcttgcagtaccgcgaactggcgaaattgaaaggcacctatattgaccgtcttccggcattagtccacccgaaaacgggacgcctccatacccgcttcaaccaaacagccacggcgaccggtcgtttgtcctcctctgatccaaaccttcagaatattccagtacgtaccccattgggccagaagatccgccgtgcgtttgtagctgaggagggttggcgtttagtggccctcgattatcgtcaaattgaattacgtgtccttgcccatctttctggcgatgagaacctcatccgcgtgtttcaggaaggcaaagacattcacactcaaacggcaagctggatgtttggattatcagctgaagcgatcgatcctttgatgcgtcgtgcagcgaagaccatcaatttcggtgttctctacggtatgagtgcctttcgtttgtcgcaggaattaggcattccctatgaagaagctcaggcgttcattcagaaatactttcaaagctatcccaaagttaaagcatggatcgagaagactctccgtgaaggccgcacacgtggttacgtagagaccttatttggacgtcgccgctatgttcccgatttaaacgctcgcgtgaaaggcaagcgtgaagccgccgaacgcatggcgttcaacatgcctgtacagggcacggcagctgacctcatgaaacttgcaatggtgcgcctttttccacaattgcgtgaagttggtgcccgcatgctcttgcaggtccacgatgaactcttgttagaagcgccaaaagagcgtgcggaagaggtggcagccctcgcgaaagaagttatggaaggcgtgtggcccttagcggtgcctcttgaagtcgaagttggtattggcgaggattggctggctgccaaagga

SEQ ID NO: 4962 - protein, 841 aa, synthetic construct
  REGION 1..841: note = Variant of DNA polymerase I from Thermus sp. strain 2.9
MHHHHHHGGSGVLPVFEPKGRVLLVDGHHLAYRNFFALKGLTTSLGEPVQGVYGFAKSLLKALKEDGDVVIVVFDAKAPSFRHEAYEAYKAGRAPTPEDFPRQLALMKELVDLLGLERLEVPGFEADDVLATLAKKAEREGYEVQILTADRDLFQLLSPRISVLHPEGHRITPEWLWEKYGLRPEQWVDFRALAGDPSDNIPGVKGIGEKTALKLLKEWGSLENLLKNLDQVKPESVREKILAHLEDLKLSRELSRVRTDLPLEVDFGRRREPDWEGLKAFLERLEFGSLQHEFGLLESPLVAEEAPWPPPEGAFLGYRLSRPEPMWAELLALAASAQGRVYRAEDPHGALRGLFEVRGLLAKDLAVVALREGLDLPPTDDPMLLAYLLDPSNTTPEGVARRYGGEWTEDAAKRALLAERLHENLLGRLQGEERLLWLYEEVEKPLSRVLAHMEATGVKLDVAYLENLSLEVAAHMRRLEEEVFRLAGRSFRLNSRDQLERVLFDELGLPPIGKTEKTGKRSTSAAVLEALREVHPIVDKILQYRELAKLKGTYIDRLPALVHPKTGRLHTRFNQTATATGRLSSSDPNLQNIPVRTPLGQKIRRAFVAEEGWRLVALDYRQIELRVLAHLSGDENLIRVFQEGKDIHTQTASWMFGLSAEAIDPLMRRAAKTINFGVLYGMSAFRLSQELGIPYEEAQAFIQKYFQSYPKVKAWIEKTLREGRTRGYVETLFGRRRYVPDLNARVKGKREAAERMAFNMPVQGTAADLMKLAMVRLFPQLREVGARMLLQVHDELLLEAPKERAEEVAALAKEVMEGVWPLAVPLEVEVGIGEDWLAAKG

SEQ ID NO: 4963 - DNA, 2523 bp, synthetic construct
  misc_feature 1..2523: note = Variant of DNA polymerase I from Thermus sp. strain 2.9
  source 1..2523: mol_type = other DNA
atgcaccatcatcatcatcatggcggtagcggcgtgttaccggtgttcgagcctaaaggtcgcgtgcttctggttgatggccatcatctcgcgtatcgtaacttctttgccctgaaaggattaaccaccagcctgggcgagccggtacagggtgtctacggctttgcaaagtcgctcctgaaagctctgaaagaagacggtgatgtggtgattgttgtctttgatgcgaaagcgccaagttttcgccacgaagcgtacgaagcttacaaagccgggcgtgctccaacgccggaagactttcctcgccaattggcgcttatgaaggaattagtggatttgcttggcctcgaacgcttggaagttcccggtttcgaggcagacgacgtattagcgactctcgcaaagaaagccgaacgtgagggctatgaagtccagatcttgacagcagatcgcgatcttttccagcttttatctccgcgcatctcggtgttacacccggaagggcatcgtatcaccccggaatggctctgggagaaatatggtttgcgtcccgaacaatgggtggattttcgcgccttagcaggcgatccgagcgacaatattccgggagttaaaggtatcggcgagaagacggcgctcaagctccttaaagaatgggggtcgttggagaacttgcttaagaatttagatcaggtcaaaccagagtcagtgcgtgagaagattcttgctcacctcgaagacctcaaattaagccgcgaattgtcccgtgtacgcaccgatttgccgctcgaagttgatttcggtcgccgccgcgaacctgactgggagggtcttaaagcgtttttagagcgtcttgaatttggttcgctcttgcatgaattcggccttttagaaagcccgttactggccgaagaagcaccttggccaccgcccgagggcgcgtttttaggttaccgtttgagtcgcccggaaccgatgtgggccgaattactggctcttgcagcgtctgcccagggacgtgtgtatcgcgcggaagaccctcatggtgcgctccgcggcctcttcgaagtccgtggactccttgccaaagacttagctgttgttgcattgcgcgaaggtcttgatttacctccgactgatgatccaatgcttcttgcgtacctcttggacccgtcaaacacgacgcccgaaggcgtagcccgtcgttacggcggcgagtggaccgaagatgcagcgaaacgcgcgttattggccgaacgtttgcacgccaatttattaggacgtttgcaaggcgaggaacgtctcctctggctttacgaagaagtggagaaaccattgagtcgcgtgctcgcgcatatggaagctaccggtgtcaaattagacgtggcgtatttggagaatctcagccttgaagttgctgcccacatgcgccgcttggaggaagaagtattccgtttagcaggccgttcctttcgccttaactctcgcgatcagttagaacgtgtgttgttcgatgaacttggtctccctcctatcggcaagacagagaagaccggtaaacgtagcacttcagcggcggttttagaagctcttcgcgaagtccatcccattgtggacaagatcttgcagtaccgcgaactcgcgaaattgaaaggcacctatattgaccgtcttccggcattagtccacccgaaaacgggacgcctccatacccgcttcaaccaaaaggccacggcgaccggtcgtttgtcctcctctgatccaaaccttcagaatattccagtacgtaccccattgggccagaagatccgccgtgcgtttgtagctgaggagggttggcgtttagtggccctcgattatcgtcaaattgaattacgtgtccttgcccatctttctggcgatgagaacctcatccgcgtgtttcaggaaggcaaagacattcacactcaaacggcaagctggatgtttggattatcagctgaagcgatcgatcctttgatgcgtcgtgcagcgaagaccatcaatttcggtgttctctacggtatgagtgcctttcgtttgtcgcaggaattaggcattccctatgaagaagctcaggcgttcattcagaaatactttcaaagctatcccaaagttaaagcatggatcgagaagactctccgtgaaggccgcacacgtggttacgtagagaccttatttggacgtcgccgctatgttcccgatttaaacgctcgcgtgaaaggcaagcgtgaagccgccgaacgcatggcgttcaacatgcctgtacagggcacggcagctgacctcatgaaacttgcaatggtgcgcctttttccacaattgcgtgaagttggtgcccgcatgctcttgcaggtccacgatgaactcttgttagaagcgccaaaagagcgtgcggaagaggtggcagccctcgcgaaagaagttatggaaggcgtgtggcccttagcggtgcctcttgaagtcgaagttggtattggcgaggattggctggctgccaaagga

SEQ ID NO: 4964 - protein, 841 aa, synthetic construct
  REGION 1..841: note = Variant of DNA polymerase I from Thermus sp. strain 2.9
MHHHHHHGGSGVLPVFEPKGRVLLVDGHHLAYRNFFALKGLTTSLGEPVQGVYGFAKSLLKALKEDGDVVIVVFDAKAPSFRHEAYEAYKAGRAPTPEDFPRQLALMKELVDLLGLERLEVPGFEADDVLATLAKKAEREGYEVQILTADRDLFQLLSPRISVLHPEGHRITPEWLWEKYGLRPEQWVDFRALAGDPSDNIPGVKGIGEKTALKLLKEWGSLENLLKNLDQVKPESVREKILAHLEDLKLSRELSRVRTDLPLEVDFGRRREPDWEGLKAFLERLEFGSLLHEFGLLESPLLAEEAPWPPPEGAFLGYRLSRPEPMWAELLALAASAQGRVYRAEDPHGALRGLFEVRGLLAKDLAVVALREGLDLPPTDDPMLLAYLLDPSNTTPEGVARRYGGEWTEDAAKRALLAERLHANLLGRLQGEERLLWLYEEVEKPLSRVLAHMEATGVKLDVAYLENLSLEVAAHMRRLEEEVFRLAGRSFRLNSRDQLERVLFDELGLPPIGKTEKTGKRSTSAAVLEALREVHPIVDKILQYRELAKLKGTYIDRLPALVHPKTGRLHTRFNQKATATGRLSSSDPNLQNIPVRTPLGQKIRRAFVAEEGWRLVALDYRQIELRVLAHLSGDENLIRVFQEGKDIHTQTASWMFGLSAEAIDPLMRRAAKTINFGVLYGMSAFRLSQELGIPYEEAQAFIQKYFQSYPKVKAWIEKTLREGRTRGYVETLFGRRRYVPDLNARVKGKREAAERMAFNMPVQGTAADLMKLAMVRLFPQLREVGARMLLQVHDELLLEAPKERAEEVAALAKEVMEGVWPLAVPLEVEVGIGEDWLAAKG

SEQ ID NO: 4965 - DNA, 2523 bp, synthetic construct
  misc_feature 1..2523: note = Variant of DNA polymerase I from Thermus sp. strain 2.9
  source 1..2523: mol_type = other DNA
atgcaccatcatcatcatcatggcggtagcggcgtgttaccggtgttcgagcctaaaggtcgcgtgcttctggttgatggccatcatctcgcgtatcgtaacttctttgccctgaaaggattaaccaccagcctgggcgagccggtacagggtgtctacggctttgcaaagtcgctcctgaaagctctgaaagaagacggtgatgtggtgattgttgtctttgatgcgaaagcgccaagttttcgccacgaagcgtacgaagcttacaaagccgggcgtgctccaacgccggaagactttcctcgccaattggcgcttatgaaggaattagtggatttgcttggcctcgaacgcttggaagttcccggtttcgaggcagacgacgtattagcgactctcgcaaagaaagccgaacgtgagggctatgaagtccagatcttgacagcagatcgcgatcttttccagcttttatctccgcgcatctcggtgttacacccggaagggcatcgtatcaccccggaatggctctgggagaaatatggtttgcgtcccgaacaatgggtggattttcgcgccttagcaggcgatccgagcgacaatattccgggagttaaaggtatcggcgagaagacggcgctcaagctccttaaagaatgggggtcgttggagaacttgcttaagaatttagatcaggtcaaaccagagtcagtgcgtgagaagattcttgctcacctcgaagacctcaaattaagccgcgaattgtcccgtgtacgcaccgatttgccgctcgaagttgatttcggtcgccgccgcgaacctgactgggagggtcttaaagcgtttttagagcgtcttgaatttggttcgctcttgcatgaattcggccttttagaaagcccgttactggccgaagaagcaccttggccaccgcccgagggcgcgtttttaggttaccgtttgagtcgcccggaaccgatgtgggccgaattactggctcttgcagcgtctgcccagggacgtgtgtatcgcgcggaagaccctcatggtgcgctccgcggcctcttcgaagtccgtggactccttgccaaagacttagctgttgttgcattgcgccgtggtcttgatttacctccgactgatgatccaatgcttcttgcgtacctcttggacccgtcaaacacgacgcccgaaggcgtagcccgtcgttacggcggcgagtggaccgaagatgcagcgaaacgcgcgttattggccgaacgtttgcacgccaatttattaggacgtttgcaaggcgaggaacgtctcctctggctttacgaagaagtggagaaaccattgagtcgcgtgctcgcgcatatggaagctaccggtgtcaaattagacgtggcgtatttggagaatctcagccttgaagttgctgcccacatgcgccgcttggaggaagaagtattccgtttagcaggccgttcctttcgccttaactctcgcgatcagttagaacgtgtgttgttcgatgaacttggtctccctcctatcggcaagacagagaagaccggtaaacgtagcacttcagcggcggttttagaagctcttcgcgaagtccatcccattgtggacaagatcttgcagtaccgcgaactcgcgaaattgaaaggcacctatattgaccgtcttccggcattagtccacccgaaaacgggacgcctccatacccgcttcaaccaaacagccacggcgaccggtcgtttgtcctcctctgatccaaaccttcagaatattccagtacgtaccccattgggccagaagatccgccgtgcgtttgtagctgaggagggttggcgtttagtggccctcgattatcgtcaaattgaattacgtgtccttgcccatctttctggcgatgagaacctcatccgcgtgtttcaggaaggcaaagacattcacactcaaacggcaagctggatgtttggattatcagctgaagcgatcgatcctttgatgcgtcgtgcagcgaagaccatcaatttcggtgttctctacggtatgagtgcctttcgtttgtcgcaggaattaggcattccctatgaagaagctcaggcgttcattcagaaatactttcaaagctatcccaaagttaaagcatggatcgagaagactctccgtgaaggccgcacacgtggttacgtagagaccttatttggacgtcgccgctatgttcccgatttaaacgctcgcgtgaaaggcaagcgtgaagccgccgaacgcatggcgttcaacatgcctgtacagggcacggcagctgacctcatgaaacttgcaatggtgcgcctttttccacaattgcgtgaagttggtgcccgcatgctcttgcaggtccacgatgaactcttgttagaagcgccaaaagagcgtgcggaagaggtggcagccctcgcgaaagaagttatggaaggcgtgtggcccttagcggtgcctcttgaagtcgaagttggtattggcgaggattggctggctgccaaagga

SEQ ID NO: 4966 - protein, 841 aa, synthetic construct
  REGION 1..841: note = Variant of DNA polymerase I from Thermus sp. strain 2.9
MHHHHHHGGSGVLPVFEPKGRVLLVDGHHLAYRNFFALKGLTTSLGEPVQGVYGFAKSLLKALKEDGDVVIVVFDAKAPSFRHEAYEAYKAGRAPTPEDFPRQLALMKELVDLLGLERLEVPGFEADDVLATLAKKAEREGYEVQILTADRDLFQLLSPRISVLHPEGHRITPEWLWEKYGLRPEQWVDFRALAGDPSDNIPGVKGIGEKTALKLLKEWGSLENLLKNLDQVKPESVREKILAHLEDLKLSRELSRVRTDLPLEVDFGRRREPDWEGLKAFLERLEFGSLLHEFGLLESPLLAEEAPWPPPEGAFLGYRLSRPEPMWAELLALAASAQGRVYRAEDPHGALRGLFEVRGLLAKDLAVVALRRGLDLPPTDDPMLLAYLLDPSNTTPEGVARRYGGEWTEDAAKRALLAERLHANLLGRLQGEERLLWLYEEVEKPLSRVLAHMEATGVKLDVAYLENLSLEVAAHMRRLEEEVFRLAGRSFRLNSRDQLERVLFDELGLPPIGKTEKTGKRSTSAAVLEALREVHPIVDKILQYRELAKLKGTYIDRLPALVHPKTGRLHTRFNQTATATGRLSSSDPNLQNIPVRTPLGQKIRRAFVAEEGWRLVALDYRQIELRVLAHLSGDENLIRVFQEGKDIHTQTASWMFGLSAEAIDPLMRRAAKTINFGVLYGMSAFRLSQELGIPYEEAQAFIQKYFQSYPKVKAWIEKTLREGRTRGYVETLFGRRRYVPDLNARVKGKREAAERMAFNMPVQGTAADLMKLAMVRLFPQLREVGARMLLQVHDELLLEAPKERAEEVAALAKEVMEGVWPLAVPLEVEVGIGEDWLAAKG

SEQ ID NO: 4967 - DNA, 2523 bp, synthetic construct
  misc_feature 1..2523: note = Variant of DNA polymerase I from Thermus sp. strain 2.9
  source 1..2523: mol_type = other DNA
atgcaccatcatcatcatcatggcggtagcggcgtgttaccggtgttcgagcctaaaggtcgcgtgcttctggttgatggccatcatctcgcgtatcgtaacttctttgccctgaaaggattaaccaccagcctgggcgagccggtacagggtgtctacggctttgcaaagtcgctcctgaaagctctgaaagaagacggtgatgtggtgattgttgtctttgatgcgaaagcgccaagttttcgccacgaagcgtacgaagcttacaaagccgggcgtgctccaacgccggaagactttcctcgccaattggcgcttatgaaggaattagtggatttgcttggcctcgaacgcttggaagttcccggtttcgaggcagacgacgtattagcgactctcgcaaagaaagccgaacgtgagggctatgaagtccagatcttgacagcagatcgcgatcttttccagcttttatctccgcgcatctcggtgttacacccggaagggcatcgtatcaccccggaatggctctgggagaaatatggtttgcgtcccgaacaatgggtggattttcgcgccttagcaggcgatccgagcgacaatattccgggagttaaaggtatcggcgagaagacggcgctcaagctccttaaagaatgggggtcgttggagaacttgcttaagaatttagatcaggtcaaaccagagtcagtgcgtgagaagattcttgctcacctcgaagacctcaaattaagccgcgaattgtcccgtgtacgcaccgatttgccgctcgaagttgatttcggtcgccgccgcgaacctgactgggagggtcttaaagcgtttttagagcgtcttgaatttggttcgctcttgcatgaattcggccttttagaaagcccgttactggccgaagaagcaccttggccaccgcccgagggcgcgtttttaggttaccgtttgagtcgcccggaaccgatgtgggccgaattactggctcttgcagcgtctgcccagggacgtgtgtatcgcgcggaagaccctcatggtgcgctccgcggcctcttcgaagtccgtggactccttgccaaagacttagctgttgttgcattgcgcgaaggtcttgatttacctccgactgatgatccaatgcttcttgcgtacctcttggacccgtcaaacacgacgcccgaaggcgtagcccgtcgttacggcggcgagtggaccgaagatgcagcgaaacgcgcgttattggccgaacgtttgcacgccaatttattaggacgtttgcaaggcgaggaacgtctcctctggctttacgaagaagtggagaaaccattgagtcgcgtgctcgcgcatatggaagctaccggtgtcaaattagacgtggcgtatttggagaatctcagccttgaagttgctgcccacatgcgccgcttggaggaagaagtattccgtttagcaggccgttcctttcgccttaactctcgcgatcagttagaacgtgtgttgttcgatgaacttggtctccctcctatcggcaagacagagaagaccggtaaacgtagcacttcagcggcggttttagaagctcttcgcgaagtccatcccattgtggacaagatcttgcagtaccgcgaactcgcgaaattgaaaggcacctatattgaccgtcttccggcattagtccacccgaaaacgggacgcctccatacccgcttcaaccaaacagccacggcgaccggtcgtttgtcctcctctgatccaaaccttcagaatattccagtacgtaccccattgggccagaagatccgccgtgcgtttgtagctgaggagacgtggcgtttagtggccctcgattatcgtcaaattgaattacgtgtccttgcccatctttctggcgatgagaacctcatccgcgtgtttcaggaaggcaaagacattcacactcaaacggcaagctggatgtttggattatcagctgaagcgatcgatcctttgatgcgtcgtgcagcgaagaccatcaatttcggtgttctctacggtatgagtgcctttcgtttgtcgcaggaattaggcattccctatgaagaagctcaggcgttcattcagaaatactttcaaagctatcccaaagttaaagcatggatcgagaagactctccgtgaaggccgcacacgtggttacgtagagaccttatttggacgtcgccgctatgttcccgatttaaacgctcgcgtgaaaggcaagcgtgaagccgccgaacgcatggcgttcaacatgcctgtacagggcacggcagctgacctcatgaaacttgcaatggtgcgcctttttccacaattgcgtgaagttggtgcccgcatgctcttgcaggtccacgatgaactcttgttagaagcgccaaaagagcgtgcggaagaggtggcagccctcgcgaaagaagttatggaaggcgtgtggcccttagcggtgcctcttgaagtcgaagttggtattggcgaggattggctggctgccaaagga

SEQ ID NO: 4968 - protein, 841 aa, synthetic construct
  REGION 1..841: note = Variant of DNA polymerase I from Thermus sp. strain 2.9
MHHHHHHGGSGVLPVFEPKGRVLLVDGHHLAYRNFFALKGLTTSLGEPVQGVYGFAKSLLKALKEDGDVVIVVFDAKAPSFRHEAYEAYKAGRAPTPEDFPRQLALMKELVDLLGLERLEVPGFEADDVLATLAKKAEREGYEVQILTADRDLFQLLSPRISVLHPEGHRITPEWLWEKYGLRPEQWVDFRALAGDPSDNIPGVKGIGEKTALKLLKEWGSLENLLKNLDQVKPESVREKILAHLEDLKLSRELSRVRTDLPLEVDFGRRREPDWEGLKAFLERLEFGSLLHEFGLLESPLLAEEAPWPPPEGAFLGYRLSRPEPMWAELLALAASAQGRVYRAEDPHGALRGLFEVRGLLAKDLAVVALREGLDLPPTDDPMLLAYLLDPSNTTPEGVARRYGGEWTEDAAKRALLAERLHANLLGRLQGEERLLWLYEEVEKPLSRVLAHMEATGVKLDVAYLENLSLEVAAHMRRLEEEVFRLAGRSFRLNSRDQLERVLFDELGLPPIGKTEKTGKRSTSAAVLEALREVHPIVDKILQYRELAKLKGTYIDRLPALVHPKTGRLHTRFNQTATATGRLSSSDPNLQNIPVRTPLGQKIRRAFVAEETWRLVALDYRQIELRVLAHLSGDENLIRVFQEGKDIHTQTASWMFGLSAEAIDPLMRRAAKTINFGVLYGMSAFRLSQELGIPYEEAQAFIQKYFQSYPKVKAWIEKTLREGRTRGYVETLFGRRRYVPDLNARVKGKREAAERMAFNMPVQGTAADLMKLAMVRLFPQLREVGARMLLQVHDELLLEAPKERAEEVAALAKEVMEGVWPLAVPLEVEVGIGEDWLAAKG

SEQ ID NO: 4969 - DNA, 2523 bp, synthetic construct
  misc_feature 1..2523: note = Variant of DNA polymerase I from Thermus sp. strain 2.9
  source 1..2523: mol_type = other DNA
atgcaccatcatcatcatcatggcggtagcggcgtgttaccggtgttcgagcctaaaggtcgcgtgcttctggttgatggccatcatctcgcgtatcgtaacttctttgccctgaaaggattaaccaccagcctgggcgagccggtacagggtgtctacggctttgcaaagtcgctcctgaaagctctgaaagaagacggtgatgtggtgattgttgtctttgatgcgaaagcgccaagttttcgccacgaagcgtacgaagcttacaaagccgggcgtgctccaacgccggaagactttcctcgccaattggcgcttatgaaggaattagtggatttgcttggcctcgaacgcttggaagttcccggtttcgaggcagacgacgtattagcgactctcgcaaagaaagccgaacgtgagggctatgaagtccagatcttgacagcagatcgcgatcttttccagcttttatctccgcgcatctcggtgttacacccggaagggcatcgtatcaccccggaatggctctgggagaaatatggtttgcgtcccgaacaatgggtggattttcgcgccttagcaggcgatccgagcgacaatattccgggagttaaaggtatcggcgagaagacggcgctcaagctccttaaagaatgggggtcgttggagaacttgcttaagaatttagatcaggtcaaaccagagtcagtgcgtgagaagattcttgctcacctcgaagacctcaaattaagccgcgaattgtcccgtgtacgcaccgatttgccgctcgaagttgatttcggtcgccgccgcgaacctgactgggagggtcttaaagcgtttttagagcgtcttgaatttggttcgctcttgcatgaattcggccttttagaaagcccgttactggccgaagaagcaccttggccaccgcccgagggcgcgtttttaggttaccgtttgagtcgcccggaaccgatgtgggccgaattactggctcttgcagcgtctgcccagggacgtgtgtatcgcgcggaagaccctcatggtgcgctccgcggcctcttcgaagtccgtggactccttgccaaagacttagctgttgttgcattgcgcgaaggtcttgatttacctccgactgatgatccaatgcttcttgcgtacctcttggacccgtcaaacacgacgcccgaaggcgtagcccgtcgttacggcggcgagtggaccgaagatgcagcgaaacgcgcgttattggccgaacgtttgcacgccaatttattaggacgtttgcaaggcgaggaacgtctcctctggctttacgaagaagtggagaaaccattgagtcgcgtgctcgcgcatatggaagctaccggtgtcaaattagacgtggcgtatttggagaatctcagccttgaagttgctgcccacatgcgccgcttggaggaagaagtattccgtttagcaggccgttcctttcgccttaactctcgcgatcagttagaacgtgtgttgttcgatgaacttggtctccctcctatcggcaagacagagaagaccggtaaacgtagcacttcagcggcggttttagaagctcttcgcgaagtccatcccattgtggacaagatcttgcagtaccgcgaactcgcgaaattgaaaggcacctatattgaccgtcttccggcattagtccacccgaaaacgggacgcctccatacccgcttcaaccaaacagccacggcgaccggtcgtttgtcctcctctgatccaaaccttcagaatattccagtacgtaccccattgggccagaagatccgccgtgcgtttgtagctgaggagggttggcgtttagtggccctcgattatcgtcaaggtgaattacgtgtccttgcccatctttctggcgatgagaacctcatccgcgtgtttcaggaaggcaaagacattcacactcaaacggcaagctggatgtttggattatcagctgaagcgatcgatcctttgatgcgtcgtgcagcgaagaccatcaatttcggtgttctctacggtatgagtgcctttcgtttgtcgcaggaattaggcattccctatgaagaagctcaggcgttcattcagaaatactttcaaagctatcccaaagttaaagcatggatcgagaagactctccgtgaaggccgcacacgtggttacgtagagaccttatttggacgtcgccgctatgttcccgatttaaacgctcgcgtgaaaggcaagcgtgaagccgccgaacgcatggcgttcaacatgcctgtacagggcacggcagctgacctcatgaaacttgcaatggtgcgcctttttccacaattgcgtgaagttggtgcccgcatgctcttgcaggtccacgatgaactcttgttagaagcgccaaaagagcgtgcggaagaggtggcagccctcgcgaaagaagttatggaaggcgtgtggcccttagcggtgcctcttgaagtcgaagttggtattggcgaggattggctggctgccaaagga

SEQ ID NO: 4970 - protein, 841 aa, synthetic construct
  REGION 1..841: note = Variant of DNA polymerase I from Thermus sp. strain 2.9
MHHHHHHGGSGVLPVFEPKGRVLLVDGHHLAYRNFFALKGLTTSLGEPVQGVYGFAKSLLKALKEDGDVVIVVFDAKAPSFRHEAYEAYKAGRAPTPEDFPRQLALMKELVDLLGLERLEVPGFEADDVLATLAKKAEREGYEVQILTADRDLFQLLSPRISVLHPEGHRITPEWLWEKYGLRPEQWVDFRALAGDPSDNIPGVKGIGEKTALKLLKEWGSLENLLKNLDQVKPESVREKILAHLEDLKLSRELSRVRTDLPLEVDFGRRREPDWEGLKAFLERLEFGSLLHEFGLLESPLLAEEAPWPPPEGAFLGYRLSRPEPMWAELLALAASAQGRVYRAEDPHGALRGLFEVRGLLAKDLAVVALREGLDLPPTDDPMLLAYLLDPSNTTPEGVARRYGGEWTEDAAKRALLAERLHANLLGRLQGEERLLWLYEEVEKPLSRVLAHMEATGVKLDVAYLENLSLEVAAHMRRLEEEVFRLAGRSFRLNSRDQLERVLFDELGLPPIGKTEKTGKRSTSAAVLEALREVHPIVDKILQYRELAKLKGTYIDRLPALVHPKTGRLHTRFNQTATATGRLSSSDPNLQNIPVRTPLGQKIRRAFVAEEGWRLVALDYRQGELRVLAHLSGDENLIRVFQEGKDIHTQTASWMFGLSAEAIDPLMRRAAKTINFGVLYGMSAFRLSQELGIPYEEAQAFIQKYFQSYPKVKAWIEKTLREGRTRGYVETLFGRRRYVPDLNARVKGKREAAERMAFNMPVQGTAADLMKLAMVRLFPQLREVGARMLLQVHDELLLEAPKERAEEVAALAKEVMEGVWPLAVPLEVEVGIGEDWLAAKG

SEQ ID NO: 4971 - DNA, 2523 bp, synthetic construct
  misc_feature 1..2523: note = Variant of DNA polymerase I from Thermus sp. strain 2.9
  source 1..2523: mol_type = other DNA
atgcaccatcatcatcatcatggcggtagcggcgtgttaccggtgttcgagcctaaaggtcgcgtgcttctggttgatggccatcatctcgcgtatcgtaacttctttgccctgaaaggattaaccaccagcctgggcgagccggtacagggtgtctacggctttgcaaagtcgctcctgaaagctctgaaagaagacggtgatgtggtgattgttgtctttgatgcgaaagcgccaagttttcgccacgaagcgtacgaagcttacaaagccgggcgtgctccaacgccggaagactttcctcgccaattggcgcttatgaaggaattagtggatttgcttggcctcgaacgcttggaagttcccggtttcgaggcagacgacgtattagcgactctcgcaaagaaagccgaacgtgagggctatgaagtccagatcttgacagcagatcgcgatcttttccagcttttatctccgcgcatctcggtgttacacccggaagggcatcgtatcaccccggaatggctctgggagaaatatggtttgcgtcccgaacaatgggtggattttcgcgccttagcaggcgatccgagcgacaatattccgggagttaaaggtatcggcgagaagacggcgctcaagctccttaaagaatgggggtcgttggagaacttgcttaagaatttagatcaggtcaaaccagagtcagtgcgtgagaagattcttgctcacctcgaagacctcaaattaagccgcatgttgtcccgtgtacgcaccgatttgccgctcgaagttgatttcggtcgccgccgcgaacctgactgggagggtcttaaagcgtttttagagcgtcttgaatttggttcgctcttgcatgaattcggccttttagaaagcccgttactggccgaagaagcaccttggccaccgcccgagggcgcgtttttaggttaccgtttgagtcgcccggaaccgatgtgggccgaattactggctcttgcagcgtctgcccagggacgtgtgtatcgcgcggaagaccctcatggtgcgctccgcggcctcttcgaagtccgtggactccttgccaaagacttagctgttgttgcattgcgcgaaggtcttgatttacctccgactgatgatccaatgcttcttgcgtacctcttggacccgtcaaacacgacgcccgaaggcgtagcccgtcgttacggcggcgagtggaccgaagatgcagcgaaacgcgcgttattggccgaacgtttgcacgccaatttattaggacgtttgcaaggcgaggaacgtctcctctggctttacgaagaagtggagaaaccattgagtcgcgtgctcgcgcatatggaagctaccggtgtcaaattagacgtggcgtatttggagaatctcagccttgaagttgctgcccacatgcgccgcttggaggaagaagtattccgtttagcaggccgttcctttcgccttaactctcgcgatcagttagaacgtgtgttgttcgatgaacttggtctccctcctatcggcaagacagagaagaccggtaaacgtagcacttcagcggcggttttagaagctcttcgcgaagtccatcccattgtggacaagatcttgcagtaccgcgaactcgcgaaattgaaaggcacctatattgaccgtcttccggcattagtccacccgaaaacgggacgcctccatacccgcttcaaccaaacagccacggcgaccggtcgtttgtcctcctctgatccaaaccttcagaatattccagtacgtaccccattgggccagaagatccgccgtgcgtttgtagctgaggagggttggcgtttagtggccctcgattatcgtcaaattgaattacgtgtccttgcccatctttctggcgatgagaacctcatccgcgtgtttcaggaaggcaaagacattcacactcaaacggcaagctggatgtttggattatcagctgaagcgatcgatcctttgatgcgtcgtgcagcgaagaccatcaatttcggtgttctctacggtatgagtgcctttcgtttgtcgcaggaattaggcattccctatgaagaagctcaggcgttcattcagaaatactttcaaagctatcccaaagttaaagcatggatcgagaagactctccgtgaaggccgcacacgtggttacgtagagaccttatttggacgtcgccgctatgttcccgatttaaacgctcgcgtgaaaggcaagcgtgaagccgccgaacgcatggcgttcaacatgcctgtacagggcacggcagctgacctcatgaaacttgcaatggtgcgcctttttccacaattgcgtgaagttggtgcccgcatgctcttgcaggtccacgatgaactcttgttagaagcgccaaaagagcgtgcggaagaggtggcagccctcgcgaaagaagttatggaaggcgtgtggcccttagcggtgcctcttgaagtcgaagttggtattggcgaggattggctggctgccaaagga

SEQ ID NO: 4972 - protein, 841 aa, synthetic construct
  REGION 1..841: note = Variant of DNA polymerase I from Thermus sp. strain 2.9
MHHHHHHGGSGVLPVFEPKGRVLLVDGHHLAYRNFFALKGLTTSLGEPVQGVYGFAKSLLKALKEDGDVVIVVFDAKAPSFRHEAYEAYKAGRAPTPEDFPRQLALMKELVDLLGLERLEVPGFEADDVLATLAKKAEREGYEVQILTADRDLFQLLSPRISVLHPEGHRITPEWLWEKYGLRPEQWVDFRALAGDPSDNIPGVKGIGEKTALKLLKEWGSLENLLKNLDQVKPESVREKILAHLEDLKLSRMLSRVRTDLPLEVDFGRRREPDWEGLKAFLERLEFGSLLHEFGLLESPLLAEEAPWPPPEGAFLGYRLSRPEPMWAELLALAASAQGRVYRAEDPHGALRGLFEVRGLLAKDLAVVALREGLDLPPTDDPMLLAYLLDPSNTTPEGVARRYGGEWTEDAAKRALLAERLHANLLGRLQGEERLLWLYEEVEKPLSRVLAHMEATGVKLDVAYLENLSLEVAAHMRRLEEEVFRLAGRSFRLNSRDQLERVLFDELGLPPIGKTEKTGKRSTSAAVLEALREVHPIVDKILQYRELAKLKGTYIDRLPALVHPKTGRLHTRFNQTATATGRLSSSDPNLQNIPVRTPLGQKIRRAFVAEEGWRLVALDYRQIELRVLAHLSGDENLIRVFQEGKDIHTQTASWMFGLSAEAIDPLMRRAAKTINFGVLYGMSAFRLSQELGIPYEEAQAFIQKYFQSYPKVKAWIEKTLREGRTRGYVETLFGRRRYVPDLNARVKGKREAAERMAFNMPVQGTAADLMKLAMVRLFPQLREVGARMLLQVHDELLLEAPKERAEEVAALAKEVMEGVWPLAVPLEVEVGIGEDWLAAKG

SEQ ID NO: 4973 - DNA, 2523 bp, synthetic construct
  misc_feature 1..2523: note = Variant of DNA polymerase I from Thermus sp. strain 2.9
  source 1..2523: mol_type = other DNA
atgcaccatcatcatcatcatggcggtagcggcgtgttaccggtgttcgagcctaaaggtcgcgtgcttctggttgatggccatcatctcgcgtatcgtaacttctttgccctgaaaggattaaccaccagcctgggcgagccggtacagggtgtctacggctttgcaaagtcgctcctgaaagctctgaaagaagacggtgatgtggtgattgttgtctttgatgcgaaagcgccaagttttcgccacgaagcgtacgaagcttacaaagccgggcgtgctccaacgccggaagactttcctcgccaattggcgcttatgaaggaattagtggatttgcttggcctcgaacgcttggaagttcccggtttcgaggcagacgacgtattagcgactctcgcaaagaaagccgaacgtgagggctatgaagtccagatcttgacagcagatcgcgatcttttccagcttttatctccgcgcatctcggtgttacacccggaagggcatcgtatcaccccggaatggctctgggagaaatatggtttgcgtcccgaacaatgggtggattttcgcgccttagcaggcgatccgagcgacaatattccgggagttaaaggtatcggcgagaagacggcgctcaagctccttaaagaatgggggtcgttggagaacttgcttaagaatttagatcaggtcaaaccagagtcagtgcgtgagaagattcttgctcacctcgaagacctcaaattaagccgcgaattgtcccgtgtacgcaccgatttgccgctcgaagttgatttcggtcgccgccgcgaacctgactgggagggtcttaaagcgtttttagagcgtcttgaatttggttcgctcttgcatgaattcggccttttagaaagcccgttactggccgaagaagcaccttggccaccgcccgagggcgcgtttttaggttaccgtttgagtcgcccggaaccgatgtgggccgaattactggctcttgcagcgtctgcccagggacgtgtgtatcgcgcggaagaccctcatggtgcgctccgcggcctcttcgaagtccgtggactccttgccaaagacttagctgttgttgcattgcgcgaaggtcttgatttacctccgactgatgatccaatgcttcttgcgtacctcttggacccgtcaaacacgacgcccgaaggcgtagcccgtcgttacggcggcgagtggaccgaagatgcagcgaaacgcgcgttattggccgaacgtttgcacgccaatttattaggacgtttgcaaggcgaggaacgtctcctctggctttacgaagaagtggagaaaccattgagtcgcgtgctcgcgcatatggaagctaccggtgtcaaattagacgtggcgtatttggagaatctcagccttgaagttgctgcccacatgcgccgcttggaggaagaagtattccgtttagcaggccgttcctttcgccttaactctcgcgatcagttagaacgtgtgttgttcgatgaacttggtctccctcctatcggcaagacagagaagaccggtaaacgtagcacttcagcggcggttttagaagctcttcgcgaagtccatcccattgtggacaagatcttgcagtaccgcgaactcgcgaaattgaaaggcacctatattgaccgtcttccggcattagtccacccgaaaacgggacgcctccatacccgcttcaaccaaacagccacggcgaccggtcgtttgtcctcctctgatccaaaccttcagaatattccagtacgtaccccattgggccagaagatccgccgtgcgtttgtagctgaggagggttggcgtttagtggccctcgattatcgtcaaattgaattacgtgtccttgcccatctttctggcgatgagaacctcatccgcgtgtttcaggaaggcaaagacattcacactcaaacggcaagctggatgtttggattatcagctgaagcgatcgatcctttgatgcgtcgtgcagcgaagaccatcaatttcggtgttctctacggtatgagtgcctttcgtttgtcgcaggaattaggcattccctatgaagaagctcaggcgttcattcagaaaggttttcaaagctatcccaaagttaaagcatggatcgagaagactctccgtgaaggccgcacacgtggttacgtagagaccttatttggacgtcgccgctatgttcccgatttaaacgctcgcgtgaaaggcaagcgtgaagccgccgaacgcatggcgttcaacatgcctgtacagggcacggcagctgacctcatgaaacttgcaatggtgcgcctttttccacaattgcgtgaagttggtgcccgcatgctcttgcaggtccacgatgaactcttgttagaagcgccaaaagagcgtgcggaagaggtggcagccctcgcgaaagaagttatggaaggcgtgtggcccttagcggtgcctcttgaagtcgaagttggtattggcgaggattggctggctgccaaagga

SEQ ID NO: 4974 - protein, 841 aa, synthetic construct
  REGION 1..841: note = Variant of DNA polymerase I from Thermus sp. strain 2.9
MHHHHHHGGSGVLPVFEPKGRVLLVDGHHLAYRNFFALKGLTTSLGEPVQGVYGFAKSLLKALKEDGDVVIVVFDAKAPSFRHEAYEAYKAGRAPTPEDFPRQLALMKELVDLLGLERLEVPGFEADDVLATLAKKAEREGYEVQILTADRDLFQLLSPRISVLHPEGHRITPEWLWEKYGLRPEQWVDFRALAGDPSDNIPGVKGIGEKTALKLLKEWGSLENLLKNLDQVKPESVREKILAHLEDLKLSRELSRVRTDLPLEVDFGRRREPDWEGLKAFLERLEFGSLLHEFGLLESPLLAEEAPWPPPEGAFLGYRLSRPEPMWAELLALAASAQGRVYRAEDPHGALRGLFEVRGLLAKDLAVVALREGLDLPPTDDPMLLAYLLDPSNTTPEGVARRYGGEWTEDAAKRALLAERLHANLLGRLQGEERLLWLYEEVEKPLSRVLAHMEATGVKLDVAYLENLSLEVAAHMRRLEEEVFRLAGRSFRLNSRDQLERVLFDELGLPPIGKTEKTGKRSTSAAVLEALREVHPIVDKILQYRELAKLKGTYIDRLPALVHPKTGRLHTRFNQTATATGRLSSSDPNLQNIPVRTPLGQKIRRAFVAEEGWRLVALDYRQIELRVLAHLSGDENLIRVFQEGKDIHTQTASWMFGLSAEAIDPLMRRAAKTINFGVLYGMSAFRLSQELGIPYEEAQAFIQKGFQSYPKVKAWIEKTLREGRTRGYVETLFGRRRYVPDLNARVKGKREAAERMAFNMPVQGTAADLMKLAMVRLFPQLREVGARMLLQVHDELLLEAPKERAEEVAALAKEVMEGVWPLAVPLEVEVGIGEDWLAAKG

SEQ ID NO: 4975 - DNA, 2523 bp, synthetic construct
  misc_feature 1..2523: note = Variant of DNA polymerase I from Thermus sp. strain 2.9
  source 1..2523: mol_type = other DNA
atgcaccatcatcatcatcatggcggtagcggcgtgttaccggtgttcgagcctaaaggtcgcgtgcttctggttgatggccatcatctcgcgtatcgtaacttctttgccctgaaaggattaaccaccagcctgggcgagccggtacagggtgtctacggctttgcaaagtcgctcctgaaagctctgaaagaagacggtgatgtggtgattgttgtctttgatgcgaaagcgccaagttttcgccacgaagcgtacgaagcttacaaagccgggcgtgctccaacgccggaagactttcctcgccaattggcgcttatgaaggaattagtggatttgcttggcctcgaacgcttggaagttcccggtttcgaggcagacgacgtattagcgactctcgcaaagaaagccgaacgtgagggctatgaagtccagatcttgacagcagatcgcgatcttttccagcttttatctccgcgcatctcggtgttacacccggaagggcatcgtatcaccccggaatggctctgggagaaatatggtttgcgtcccgaacaatgggtggattttcgcgccttagcaggcgatccgagcgacaatattccgggagttaaaggtatcggcgagaagacggcgctcaagctccttaaagaatgggggtcgttggagaacttgcttaagaatttagatcaggtcaaaccagagtcagtgcgtgagaagattcttgctcacctcgaagacctcaaattaagccgcgaattgtcccgtgtacgcaccgatttgccgctcgaagttgatttcggtcgccgccgcgaacctgactgggagggtcttaaagcgtttttagagcgtcttgaatttggttcgctcttgcatgaattcggccttttagaaagcccgttactggccgaagaagcaccttggccaccgcccgagggcgcgtttttaggttaccgtttgagtcgcccggaaccgatgtgggccgaattactggctcttgcagcgtctgcccagggacgtgtgtatcgcgcggaagaccctcatggtgcgctccgcggcctcttcgaagtccgtggactccttgccaaagacttagctgttgttgcattgcgcgaaggtcttgatttacctccgactgatgatccaatgcttcttgcgtacctcttggacccgtcaaacacgacgcccgaaggcgtagcccgtcgttacggcggcgagtggaccgaagatgcagcgaaacgcgcgttattggccgaacgtttgcacgccaatttattaggacgtttgcaaggcgaggaacgtctcctctggctttacgaagaagtggagaaaccattgagtcgcgtgctcgcgcatatggaagctaccggtgtcaaattagacgtggcgtatttggagaatctcagccttgaagttgctgcccacatgcgccgcttggaggaagaagtattccgtttagcaggccgttcctttcgccttaactctcgcgatcagttagaacgtgtgttgttcgatgaacttggtctccctcctatcggcaagacagagaagaccggtaaacgtagcacttcagcggcggttttagaagctcttcgcgaagtccatcccattgtggacaagatcttgcagtaccgcgaactcgcgaaattgaaaggcacctatattgaccgtcttccggcattagtccacccgaaaacgggacgcctccatacccgcttcaaccaaacagccacggcgaccggtcgtttgtcctcctctgatccaaaccttcagaatattccagtacgtaccccattgggccagaagatccgccgtgcgtttgtagctgaggagggttggcgtttagtggccctcgattatcgtcaaattgaattacgtgtccttgcccatctttctggcgatgagaacctcatccgcgtgtttcaggaaggcaaagacattcacactcaaacggcaagctggatgtttggattatcagctgaagcgatcgatcctttgatgcgtcgtgcagcgaagaccatcaatttcggtgttctctacggtaagagtgcctttcgtttgtcgcaggaattaggcattccctatgaagaagctcaggcgttcattcagaaatactttcaaagctatcccaaagttaaagcatggatcgagaagactctccgtgaaggccgcacacgtggttacgtagagaccttatttggacgtcgccgctatgttcccgatttaaacgctcgcgtgaaaggcaagcgtgaagccgccgaacgcatggcgttcaacatgcctgtacagggcacggcagctgacctcatgaaacttgcaatggtgcgcctttttccacaattgcgtgaagttggtgcccgcatgctcttgcaggtccacgatgaactcttgttagaagcgccaaaagagcgtgcggaagaggtggcagccctcgcgaaagaagttatggaaggcgtgtggcccttagcggtgcctcttgaagtcgaagttggtattggcgaggattggctggctgccaaagga

SEQ ID NO: 4976 - protein, 841 aa, synthetic construct
  REGION 1..841: note = Variant of DNA polymerase I from Thermus sp. strain 2.9
MHHHHHHGGSGVLPVFEPKGRVLLVDGHHLAYRNFFALKGLTTSLGEPVQGVYGFAKSLLKALKEDGDVVIVVFDAKAPSFRHEAYEAYKAGRAPTPEDFPRQLALMKELVDLLGLERLEVPGFEADDVLATLAKKAEREGYEVQILTADRDLFQLLSPRISVLHPEGHRITPEWLWEKYGLRPEQWVDFRALAGDPSDNIPGVKGIGEKTALKLLKEWGSLENLLKNLDQVKPESVREKILAHLEDLKLSRELSRVRTDLPLEVDFGRRREPDWEGLKAFLERLEFGSLLHEFGLLESPLLAEEAPWPPPEGAFLGYRLSRPEPMWAELLALAASAQGRVYRAEDPHGALRGLFEVRGLLAKDLAVVALREGLDLPPTDDPMLLAYLLDPSNTTPEGVARRYGGEWTEDAAKRALLAERLHANLLGRLQGEERLLWLYEEVEKPLSRVLAHMEATGVKLDVAYLENLSLEVAAHMRRLEEEVFRLAGRSFRLNSRDQLERVLFDELGLPPIGKTEKTGKRSTSAAVLEALREVHPIVDKILQYRELAKLKGTYIDRLPALVHPKTGRLHTRFNQTATATGRLSSSDPNLQNIPVRTPLGQKIRRAFVAEEGWRLVALDYRQIELRVLAHLSGDENLIRVFQEGKDIHTQTASWMFGLSAEAIDPLMRRAAKTINFGVLYGKSAFRLSQELGIPYEEAQAFIQKYFQSYPKVKAWIEKTLREGRTRGYVETLFGRRRYVPDLNARVKGKREAAERMAFNMPVQGTAADLMKLAMVRLFPQLREVGARMLLQVHDELLLEAPKERAEEVAALAKEVMEGVWPLAVPLEVEVGIGEDWLAAKG

SEQ ID NO: 4977 - DNA, 2523 bp, synthetic construct
  misc_feature 1..2523: note = Variant of DNA polymerase I from Thermus sp. strain 2.9
  source 1..2523: mol_type = other DNA
atgcaccatcatcatcatcatggcggtagcggcgtgttaccggtgttcgagcctaaaggtcgcgtgcttctggttgatggccatcatctcgcgtatcgtaacttctttgccctgaaaggattaaccaccagcctgggcgagccggtacagggtgtctacggctttgcaaagtcgctcctgaaagctctgaaagaagacggtgatgtggtgattgttgtctttgatgcgaaagcgccaagttttcgccacgaagcgtacgaagcttacaaagccgggcgtgctccaacgccggaagactttcctcgccaattggcgcttatgaaggaattagtggatttgcttggcctcgaacgcttggaagttcccggtttcgaggcagacgacgtattagcgactctcgcaaagaaagccgaacgtgagggctatgaagtccagatcttgacagcagatcgcgatcttttccagcttttatctccgcgcatctcggtgttacacccggaagggcatcgtatcaccccggaatggctctgggagaaatatggtttgcgtcccgaacaatgggtggattttcgcgccttagcaggcgatccgagcgacaatattccgggagttaaaggtatcggcgagaagacggcgctcaagctccttaaagaatgggggtcgttggagaacttgcttaagaatttagatcaggtcaaaccagagtcagtgcgtgagaagattcttgctcacctcgaagacctcaaattaagccgcgaattgtcccgtgtacgcaccgatttgccgctcgaagttgatttcggtcgccgccgcgaacctgactgggagggtcttaaagcgtttttagagcgtcttgaatttggttcgctcttgcatgaattcggccttttagaaagcccgttactggccgaagaagcaccttggccaccgcccgagggcgcgtttttaggttaccgtttgagtcgcccggaaccgatgtgggccgaattactggctcttgcagcgtctgcccagggacgtgtgtatcgcgcggaagaccctcatggtgcgctccgcggcctcttcgaagtccgtggactccttgccaaagacttagctgttgttgcattgcgcgaaggtcttgatttacctccgactgatgatccaatgcttcttgcgtacctcagggacccgtcaaacacgacgcccgaaggcgtagcccgtcgttacggcggcgagtggaccgaagatgcagcgaaacgcgcgttattggccgaacgtttgcacgccaatttattaggacgtttgcaaggcgaggaacgtctcctctggctttacgaagaagtggagaaaccattgagtcgcgtgctcgcgcatatggaagctaccggtgtcaaattagacgtggcgtatttggagaatctcagccttgaagttgctgcccacatgcgccgcttggaggaagaagtattccgtttagcaggccgttcctttcgccttaactctcgcgatcagttagaacgtgtgttgttcgatgaacttggtctccctcctatcggcaagacagagaagaccggtaaacgtagcacttcagcggcggttttagaagctcttcgcgaagtccatcccattgtggacaagatcttgcagtaccgcgaactcgcgaaattgaaaggcacctatattgaccgtcttccggcattagtccacccgaaaacgggacgcctccatacccgcttcaaccaaacagccacggcgaccggtcgtttgtcctcctctgatccaaaccttcagaatattccagtacgtaccccattgggccagaagatccgccgtgcgtttgtagctgaggagggttggcgtttagtggccctcgattatcgtcaaattgaattacgtgtccttgcccatctttctggcgatgagaacctcatccgcgtgtttcaggaaggcaaagacattcacactcaaacggcaagctggatgtttggattatcagctgaagcgatcgatcctttgatgcgtcgtgcagcgaagaccatcaatttcggtgttctctacggtatgagtgcctttcgtttgtcgcaggaattaggcattccctatgaagaagctcaggcgttcattcagaaatactttcaaagctatcccaaagttaaagcatggatcgagaagactctccgtgaaggccgcacacgtggttacgtagagaccttatttggacgtcgccgctatgttcccgatttaaacgctcgcgtgaaaggcaagcgtgaagccgccgaacgcatggcgttcaacatgcctgtacagggcacggcagctgacctcatgaaacttgcaatggtgcgcctttttccacaattgcgtgaagttggtgcccgcatgctcttgcaggtccacgatgaactcttgttagaagcgccaaaagagcgtgcggaagaggtggcagccctcgcgaaagaagttatggaaggcgtgtggcccttagcggtgcctcttgaagtcgaagttggtattggcgaggattggctggctgccaaagga

SEQ ID NO: 4978 - protein, 841 aa, synthetic construct
  REGION 1..841: note = Variant of DNA polymerase I from Thermus sp. strain 2.9
MHHHHHHGGSGVLPVFEPKGRVLLVDGHHLAYRNFFALKGLTTSLGEPVQGVYGFAKSLLKALKEDGDVVIVVFDAKAPSFRHEAYEAYKAGRAPTPEDFPRQLALMKELVDLLGLERLEVPGFEADDVLATLAKKAEREGYEVQILTADRDLFQLLSPRISVLHPEGHRITPEWLWEKYGLRPEQWVDFRALAGDPSDNIPGVKGIGEKTALKLLKEWGSLENLLKNLDQVKPESVREKILAHLEDLKLSRELSRVRTDLPLEVDFGRRREPDWEGLKAFLERLEFGSLLHEFGLLESPLLAEEAPWPPPEGAFLGYRLSRPEPMWAELLALAASAQGRVYRAEDPHGALRGLFEVRGLLAKDLAVVALREGLDLPPTDDPMLLAYLRDPSNTTPEGVARRYGGEWTEDAAKRALLAERLHANLLGRLQGEERLLWLYEEVEKPLSRVLAHMEATGVKLDVAYLENLSLEVAAHMRRLEEEVFRLAGRSFRLNSRDQLERVLFDELGLPPIGKTEKTGKRSTSAAVLEALREVHPIVDKILQYRELAKLKGTYIDRLPALVHPKTGRLHTRFNQTATATGRLSSSDPNLQNIPVRTPLGQKIRRAFVAEEGWRLVALDYRQIELRVLAHLSGDENLIRVFQEGKDIHTQTASWMFGLSAEAIDPLMRRAAKTINFGVLYGMSAFRLSQELGIPYEEAQAFIQKYFQSYPKVKAWIEKTLREGRTRGYVETLFGRRRYVPDLNARVKGKREAAERMAFNMPVQGTAADLMKLAMVRLFPQLREVGARMLLQVHDELLLEAPKERAEEVAALAKEVMEGVWPLAVPLEVEVGIGEDWLAAKG

SEQ ID NO: 4979 - DNA, 2523 bp, synthetic construct
  misc_feature 1..2523: note = Variant of DNA polymerase I from Thermus sp. strain 2.9
  source 1..2523: mol_type = other DNA
atgcaccatcatcatcatcatggcggtagcggcgtgttaccggtgttcgagcctaaaggtcgcgtgcttctggttgatggccatcatctcgcgtatcgtaacttctttgccctgaaaggattaaccaccagcctgggcgagccggtacagggtgtctacggctttgcaaagtcgctcctgaaagctctgaaagaagacggtgatgtggtgattgttgtctttgatgcgaaagcgccaagttttcgccacgaagcgtacgaagcttacaaagccgggcgtgctccaacgccggaagactttcctcgccaattggcgcttatgaaggaattagtggatttgcttggcctcgaacgcttggaagttcccggtttcgaggcagacgacgtattagcgactctcgcaaagaaagccgaacgtgagggctatgaagtccagatcttgacagcagatcgcgatcttttccagcttttatctccgcgcatctcggtgttacacccggaagggcatcgtatcaccccggaatggctctgggagaaatatggtttgcgtcccgaacaatgggtggattttcgcgccttagcaggcgatccgagcgacaatattccgggagttaaaggtatcggcgagaagacggcgctcaagctccttaaagaatgggggtcgttggagaacttgcttaagaatttagatcaggtcaaaccagagtcagtgcgtgagaagattcttgctcacctcgaagacctcaaattaagccgcgaattgtcccgtgtacgcaccgatttgccgctcgaagttgatttcggtcgccgccgcgaacctgactgggagggtcttaaagcgtttttagagcgtcttgaatttggttcgctcttgcatgaattcggccttttagaaagcccgttactggccgaagaagcaccttggccaccgcccgagggcgcgtttttaggttaccgtttgagtcgcccggaaccgatgtgggccgaattactggctcttgcagcgtctgcccagggacgtgtgtatcgcgcggaagaccctcatggtgcgctccgcggcctcttcgaagtccgtggactccttgccaaagacttagctgttgttgcattgcgcgaaggtcttgatttacctccgactgatgatccaatgcttcttgcgtacctcttggacccgtcaaacacgacgcccgaaggcgtagcccgtcgttacggcggcgagtggaccgaagatgcagcgaaacgcgcgttattggccgaacgtttgcacgccaatttattaggacgtttgcaaggcgaggaacgtctcctctggctttacgaagaagtggagaaaccattgagtcgcgtgctcgcgcatatggaagctaccggtgtcaaattagacgtggcgtatttggagaatctcagccttgaagttgctgcccacatgcgccgcttggaggaagaagtattccgtttagcaggccgttcctttcgccttaactctcgcgatcagttagaacgtgtgttgttcgatgaacttggtctccctcctatcggcaagacagagaagaccggtaaacgtagcacttcagcggcggttttagaagctcttcgcgaagtccatcccattgtggacaagatcttgcagtaccgcgaactcgcgaaattgaaaggcacctatattgaccgtcttccggcattagtccacccgaaaacgggacgcctccatacccgcttcaaccaaacagccacggcgaccggtcgtttgtcctcctctgatccaaaccttcagaatattccagtacgtaccccattgggccagaagatccgccgtgcgtttgtagctgaggagggttggcgtttagtggccctcgattatcgtcaaattgaattacgtgtccttgcccatctttctggcgatgagaacctcatccgcgtgtttcaggaaggcaaagacattcacactcaaacggcaagctggatgtttggattatcagctgaagcgatcgatcctttgatgcgtcgtgcagcgaagaccatcaatttcggtgttctctacggtatgagtgcctttcgtttgtcgcaggaattaggcattccctatgaagaagctcaggcgttcattcagaaatactttcaaagctatcccaaagttaaagcatggatcgagaagactctccgtgaaggccgcacacgtggtcaggtagagaccttatttggacgtcgccgctatgttcccgatttaaacgctcgcgtgaaaggcaagcgtgaagccgccgaacgcatggcgttcaacatgcctgtacagggcacggcagctgacctcatgaaacttgcaatggtgcgcctttttccacaattgcgtgaagttggtgcccgcatgctcttgcaggtccacgatgaactcttgttagaagcgccaaaagagcgtgcggaagaggtggcagccctcgcgaaagaagttatggaaggcgtgtggcccttagcggtgcctcttgaagtcgaagttggtattggcgaggattggctggctgccaaagga

SEQ ID NO: 4980 - protein, 841 aa, synthetic construct
  REGION 1..841: note = Variant of DNA polymerase I from Thermus sp. strain 2.9
MHHHHHHGGSGVLPVFEPKGRVLLVDGHHLAYRNFFALKGLTTSLGEPVQGVYGFAKSLLKALKEDGDVVIVVFDAKAPSFRHEAYEAYKAGRAPTPEDFPRQLALMKELVDLLGLERLEVPGFEADDVLATLAKKAEREGYEVQILTADRDLFQLLSPRISVLHPEGHRITPEWLWEKYGLRPEQWVDFRALAGDPSDNIPGVKGIGEKTALKLLKEWGSLENLLKNLDQVKPESVREKILAHLEDLKLSRELSRVRTDLPLEVDFGRRREPDWEGLKAFLERLEFGSLLHEFGLLESPLLAEEAPWPPPEGAFLGYRLSRPEPMWAELLALAASAQGRVYRAEDPHGALRGLFEVRGLLAKDLAVVALREGLDLPPTDDPMLLAYLLDPSNTTPEGVARRYGGEWTEDAAKRALLAERLHANLLGRLQGEERLLWLYEEVEKPLSRVLAHMEATGVKLDVAYLENLSLEVAAHMRRLEEEVFRLAGRSFRLNSRDQLERVLFDELGLPPIGKTEKTGKRSTSAAVLEALREVHPIVDKILQYRELAKLKGTYIDRLPALVHPKTGRLHTRFNQTATATGRLSSSDPNLQNIPVRTPLGQKIRRAFVAEEGWRLVALDYRQIELRVLAHLSGDENLIRVFQEGKDIHTQTASWMFGLSAEAIDPLMRRAAKTINFGVLYGMSAFRLSQELGIPYEEAQAFIQKYFQSYPKVKAWIEKTLREGRTRGQVETLFGRRRYVPDLNARVKGKREAAERMAFNMPVQGTAADLMKLAMVRLFPQLREVGARMLLQVHDELLLEAPKERAEEVAALAKEVMEGVWPLAVPLEVEVGIGEDWLAAKG

SEQ ID NO: 4981 - DNA, 2523 bp, synthetic construct
  misc_feature 1..2523: note = Variant of DNA polymerase I from Thermus sp. strain 2.9
  source 1..2523: mol_type = other DNA
atgcaccatcatcatcatcatggcggtagcggcgtgttaccggtgttcgagcctaaaggtcgcgtgcttctggttgatggccatcatctcgcgtatcgtaacttctttgccctgaaaggattaaccaccagcctgggcgagccggtacagggtgtctacggctttgcaaagtcgctcctgaaagctctgaaagaagacggtgatgtggtgattgttgtctttgatgcgaaagcgccaagttttcgccacgaagcgtacgaagcttacaaagccgggcgtgctccaacgccggaagactttcctcgccaattggcgcttatgaaggaattagtggatttgcttggcctcgaacgcttggaagttcccggtttcgaggcagacgacgtattagcgactctcgcaaagaaagccgaacgtgagggctatgaagtccagatcttgacagcagatcgcgatcttttccagcttttatctccgcgcatctcggtgttacacccggaagggcatcgtatcaccccggaatggctctgggagaaatatggtttgcgtcccgaacaatgggtggattttcgcgccttagcaggcgatccgagcgacaatattccgggagttaaaggtatcggcgagaagacggcgctcaagctccttaaagaatgggggtcgttggagaacttgcttaagaatttagatcaggtcaaaccagagtcagtgcgtgagaagattcttgctcacctcgaagacctcaaattaagccgcgaattgtcccgtgtacgcaccgatttgccgctcgaagttgatttcggtcgccgccgcgaacctgactgggagggtcttaaagcgtttttagagcgtcttgaatttggttcgctcttgcatgaattcggccttttagaaagcccgttactggccgaagaagcaccttggccaccgcccgagggcgcgtttttaggttaccgtttgagtcgcccggaaccgatgtgggccgaattactggctcttgcagcgtctgcccagggacgtgtgtatcgcgcggaagaccctcatggtgcgctccgcggcctcttcgaagtccgtggactccttgccaaagacttagctgttgttgcattgcgcgaaggtcttgatttacctccgactgatgatccaatgcttcttgcgtacctcttggacccgtcaaacacgacgcccgaaggcgtagcccgtcgttacggcggcgagtggaccgaagatgcagcgaaacgcgcgttattggccgaacgtttgcacgccaatttattaggacgtttgcaaggcgaggaacgtctcctctggctttacgaagaagtggagaaaccattgagtcgcgtgctcgcgcatatggaagctaccggtgtcaaattagacgtggcgtatttggagaatctcagccttgaagttgctgcccacatgcgccgcttggaggaagaagtattccgtttagcaggccgttcctttcgccttaactctcgcgatcagttagaacgtgtgttgtccgatgaacttggtctccctcctatcggcaagacagagaagaccggtaaacgtagcacttcagcggcggttttagaagctcttcgcgaagtccatcccattgtggacaagatcttgcagtaccgcgaactctttaaattgaaaggcacctatattgaccgtcttccggcattagtccacccgaaaacgggacgcctccatacccgcttcaaccaaacagccacggcgaccggtcgtttgtcctcctctgatccaaaccttcagaatattccagtacgtaccccattgggccagaagatccgccgtgcgtttgtagctgaggagggttggcgtttagtggccctcgattatcgtcaaattgaattacgtgtccttgcccatctttctggcgatgagaacctcatccgcgtgtttcaggaaggcaaagacattcacactcaaacggcaagctggatgtttggattatcagctgaagcgatcgatcctttgatgcgtcgtgcagcgaagaccatcaatttcggtgttctctacggtatgagtgcctttcgtttgtcgcaggaattaggcattccctatgaagaagctcaggcgttcattcagaaatactttcaaagctatcccaaagttaaagcatggatcgagaagactctccgtgaaggccgcacacgtggttacgtagagaccttatttggacgtcgccgctatgttcccgatttaaacgctcgcgtgaaaggcaagcgtgaagccgccgaacgcatggcgttcaacatgcctgtacagggcacggcagctgacctcatgaaacttgcaatggtgcgcctttttccacaattgcgtgaagttggtgcccgcatgctcttgcaggtccacgatgaactcttgttagaagcgccaaaagagcgtgcggaagaggtggcagccctcgcgaaagaagttatggaaggcgtgtggcccttagcggtgcctcttgaagtcgaagttggtattggcgaggattggctggctgccaaagga

SEQ ID NO: 4982 - protein, 841 aa, synthetic construct
  REGION 1..841: note = Variant of DNA polymerase I from Thermus sp. strain 2.9
MHHHHHHGGSGVLPVFEPKGRVLLVDGHHLAYRNFFALKGLTTSLGEPVQGVYGFAKSLLKALKEDGDVVIVVFDAKAPSFRHEAYEAYKAGRAPTPEDFPRQLALMKELVDLLGLERLEVPGFEADDVLATLAKKAEREGYEVQILTADRDLFQLLSPRISVLHPEGHRITPEWLWEKYGLRPEQWVDFRALAGDPSDNIPGVKGIGEKTALKLLKEWGSLENLLKNLDQVKPESVREKILAHLEDLKLSRELSRVRTDLPLEVDFGRRREPDWEGLKAFLERLEFGSLLHEFGLLESPLLAEEAPWPPPEGAFLGYRLSRPEPMWAELLALAASAQGRVYRAEDPHGALRGLFEVRGLLAKDLAVVALREGLDLPPTDDPMLLAYLLDPSNTTPEGVARRYGGEWTEDAAKRALLAERLHANLLGRLQGEERLLWLYEEVEKPLSRVLAHMEATGVKLDVAYLENLSLEVAAHMRRLEEEVFRLAGRSFRLNSRDQLERVLSDELGLPPIGKTEKTGKRSTSAAVLEALREVHPIVDKILQYRELFKLKGTYIDRLPALVHPKTGRLHTRFNQTATATGRLSSSDPNLQNIPVRTPLGQKIRRAFVAEEGWRLVALDYRQIELRVLAHLSGDENLIRVFQEGKDIHTQTASWMFGLSAEAIDPLMRRAAKTINFGVLYGMSAFRLSQELGIPYEEAQAFIQKYFQSYPKVKAWIEKTLREGRTRGYVETLFGRRRYVPDLNARVKGKREAAERMAFNMPVQGTAADLMKLAMVRLFPQLREVGARMLLQVHDELLLEAPKERAEEVAALAKEVMEGVWPLAVPLEVEVGIGEDWLAAKG

SEQ ID NO: 4983 - DNA, 2523 bp, synthetic construct
  misc_feature 1..2523: note = Variant of DNA polymerase I from Thermus sp. strain 2.9
  source 1..2523: mol_type = other DNA
atgcaccatcatcatcatcatggcggtagcggcgtgttaccggtgttcgagcctaaaggtcgcgtgcttctggttgatggccatcatctcgcgtatcgtaacttctttgccctgaaaggattaaccaccagcctgggcgagccggtacagggtgtctacggctttgcaaagtcgctcctgaaagctctgaaagaagacggtgatgtggtgattgttgtctttgatgcgaaagcgccaagttttcgccacgaagcgtacgaagcttacaaagccgggcgtgctccaacgccggaagactttcctcgccaattggcgcttatgaaggaattagtggatttgcttggcctcgaacgcttggaagttcccggtttcgaggcagacgacgtattagcgactctcgcaaagaaagccgaacgtgagggctatgaagtccagatcttgacagcagatcgcgatcttttccagcttttatctccgcgcatctcggtgttacacccggaagggcatcgtatcaccccggaatggctctgggagaaatatggtttgcgtcccgaacaatgggtggattttcgcgccttagcaggcgatccgagcgacaatattccgggagttaaaggtatcggcgagaagacggcgctcaagctccttaaagaatgggggtcgttggagaacttgcttaagaatttagatcaggtcaaaccagagtcagtgcgtgagaagattcttgctcacctcgaagacctcaaattaagccgcgaattgtcccgtgtacgcaccgatttgccgctcgaagttgatttcggtcgccgccgcgaacctgactgggagggtcttaaagcgtttttagagcgtcttgaatttggttcgctcttgcatgaattcggccttttagaaagcccgttactggccgaagaagcaccttggccaccgcccgagggcgcgtttttaggttaccgtttgagtcgcccggaaccgatgtgggccgaattactggctcttgcagcgtctgcccagggacgtgtgtatcgcgcggaagaccctcatggtgcgctccgcggcctcttcgaagtccgtggactccttgccaaagacttagctgttgttgcattgcgcgaaggtcttgatttacctccgactgatgatccaatgcttcttgcgtacctcttggacccgtcaaacacgacgcccgaaggcgtagcccgtcgttacggcggcgagtggaccgaagatgcagcgaaacgcgcgttattggccgaacgtttgcacgccaatttattaggacgtttgcaaggcgaggaacgtctcctctggctttacgaagaagtggagaaaccattgagtcgcgtgctcgcgcatatggaagctaccggtgtcaaattagacgtggcgtatttggagaatctcagccttgaagttgctgcccacatgcgccgcttggaggaagaagtattccgtttagcaggccgttcctttcgccttaactctcgcgatcagttagaacgtgtgttgttcgatgaacttggtctccctcctatcggcaagacagagaagaccggtaaacgtagcacttcagcggcggttttagaagctcttcgcgaagtccatcccattgtggacaagatcttgcagtaccgcgaactcgcgaaattgaaaggcacctatattgaccgtcttccggcattagtccacccgaaaacgggacgcctccatacccgcttcaaccaaacagccacggcgaccggtcgtttgtcctcctctgatccaaaccttcagaatattccagtacgtaccccattgggccagaagatccgccgtgcgtttgtagctgaggagggttggcgtttagtggccctcgattatcgtcaaattgaattacgtgtccttgcccatctttctggcgatgagaacctcatccgcgtgtttcaggaaggcaaagacattcacactcaaacggcaagctggatgtttggattatcagctgaagcgatcgatcctttgatgcgtcgtgcagcgaagaccatcaatttcggtgttctctacggtatgagtgcctttcgtttgtcgcaggaattaggcattccctatgaagaagctcaggcgttcattcagaaatactttcaaagctatcccaaagttaaagcatggatcgagaagactctccgtgaaggccgcacacgtggttacgtagagaccttatttggacgtcgccgctatgttcccgatttaaacgctcgcgtgaaaggcaagcgtgaagccgccgaacgcatggcgttcaacatgcctgtacagggcacggcagctgacctcatgaaacttgcaatggtgcgcctttttccacaattgcgtgaagttggtgcccgcatgctcttgcaggtcactgatgaactcttgttagaagcgccaaaagagcgtgcggaagaggtggcagccctcgcgaaagaagttatggaaggcgtgtggcccttagcggtgcctcttgaagtcgaagttggtattggcgaggattggctggctgccaaagga

SEQ ID NO: 4984 - protein, 841 aa, synthetic construct
  REGION 1..841: note = Variant of DNA polymerase I from Thermus sp. strain 2.9
MHHHHHHGGSGVLPVFEPKGRVLLVDGHHLAYRNFFALKGLTTSLGEPVQGVYGFAKSLLKALKEDGDVVIVVFDAKAPSFRHEAYEAYKAGRAPTPEDFPRQLALMKELVDLLGLERLEVPGFEADDVLATLAKKAEREGYEVQILTADRDLFQLLSPRISVLHPEGHRITPEWLWEKYGLRPEQWVDFRALAGDPSDNIPGVKGIGEKTALKLLKEWGSLENLLKNLDQVKPESVREKILAHLEDLKLSRELSRVRTDLPLEVDFGRRREPDWEGLKAFLERLEFGSLLHEFGLLESPLLAEEAPWPPPEGAFLGYRLSRPEPMWAELLALAASAQGRVYRAEDPHGALRGLFEVRGLLAKDLAVVALREGLDLPPTDDPMLLAYLLDPSNTTPEGVARRYGGEWTEDAAKRALLAERLHANLLGRLQGEERLLWLYEEVEKPLSRVLAHMEATGVKLDVAYLENLSLEVAAHMRRLEEEVFRLAGRSFRLNSRDQLERVLFDELGLPPIGKTEKTGKRSTSAAVLEALREVHPIVDKILQYRELAKLKGTYIDRLPALVHPKTGRLHTRFNQTATATGRLSSSDPNLQNIPVRTPLGQKIRRAFVAEEGWRLVALDYRQIELRVLAHLSGDENLIRVFQEGKDIHTQTASWMFGLSAEAIDPLMRRAAKTINFGVLYGMSAFRLSQELGIPYEEAQAFIQKYFQSYPKVKAWIEKTLREGRTRGYVETLFGRRRYVPDLNARVKGKREAAERMAFNMPVQGTAADLMKLAMVRLFPQLREVGARMLLQVTDELLLEAPKERAEEVAALAKEVMEGVWPLAVPLEVEVGIGEDWLAAKG

SEQ ID NO: 4985 - DNA, 2523 bp, synthetic construct
  misc_feature 1..2523: note = Variant of DNA polymerase I from Thermus sp. strain 2.9
  source 1..2523: mol_type = other DNA
atgcaccatcatcatcatcatggcggtagcggcgtgttaccggtgttcgagcctaaaggtcgcgtgcttctggttgatggccatcatctcgcgtatcgtaacttctttgccctgaaaggattaaccaccagcctgggcgagccggtacagggtgtctacggctttgcaaagtcgctcctgaaagctctgaaagaagacggtgatgtggtgattgttgtctttgatgcgaaagcgccaagttttcgccacgaagcgtacgaagcttacaaagccgggcgtgctccaacgccggaagactttcctcgccaattggcgcttatgaaggaattagtggatttgcttggcctcgaacgcttggaagttcccggtttcgaggcagacgacgtattagcgactctcgcaaagaaagccgaacgtgagggctatgaagtccagatcttgacagcagatcgcgatcttttccagcttttatctccgcgcatctcggtgttacacccggaagggcatcgtatcaccccggaatggctctgggagaaatatggtttgcgtcccgaacaatgggtggattttcgcgccttagcaggcgatccgagcgacaatattccgggagttaaaggtatcggcgagaagacggcgctcaagctccttaaagaatgggggtcgttggagaacttgcttaagaatttagatcaggtcaaaccagagtcagtgcgtgagaagattcttgctcacctcgaagacctcaaattaagccgcgaattgtcccgtgtacgcaccgatttgccgctcgaagttgatttcggtcgccgccgcgaacctgactgggagggtcttaaagcgtttttagagcgtcttgaatttggttcgctcttgcatgaattcggccttttagaaagcccgttactggccgaagaagcaccttggccaccgcccgagggcgcgtttttaggttaccgtttgagtcgcccggaaccgatgtgggccgaattactggctcttgcagcgtctgcccagggacgtgtgtatcgcgcggaagaccctcatggtgcgctccgcggcctcttcgaagtccgtggactccttgccaaagacttagctgttgttgcattgcgcgaaggtcttgatttacctccgactgatgatccaatgcttcttgcgtacctcttggacccgtcaaacacgacgcccgaaggcgtagcccgtcgttacggcggcgagtggaccgaagatgcagcgaaacgcgcgttattggccgaacgtttgcacgccaatttattaggacgtttgcaaggcgaggaacgtctcctctggctttacgaagaagtggagaaaccattgagtcgcgtgctcgcgcatatggaagctaccggtgtcaaattagacgtggcgtatttggagaatctcagccttgaagttgctgcccacatgcgccgcttggaggaagaagtattccgtttagcaggccgttcctttcgccttaactctcgcgatcagttagaacgtgtgttgttcgatgaacttggtctccctcctatcggcaagacagagaagaccggtaaacgtagcacttcaagtgcggttttagaagctcttcgcgaagtccatcccattgtggacaagatcttgcagtaccgcgaactcgcgaaattgaaaggcacctatattgaccgtcttccggcattagtccacccgaaaacgggacgcctccatacccgcttcaaccaaacagccacggcgaccggtcgtttgtcctcctctgatccaaaccttcagaatattccagtacgtaccccattgggccagaagatccgccgtgcgtttgtagctgaggagggttggcgtttagtggccctcgattatcgtcaaattgaattacgtgtccttgcccatctttctggcgatgagaacctcatccgcgtgtttcaggaaggcaaagacattcacactcaaacggcaagctggatgtttggattatcagctgaagcgatcgatcctttgatgcgtcgtgcagcgaagaccatcaatttcggtgttctctacggtatgagtgcctttcgtttgtcgcaggaattaggcattccctatgaagaagctcaggcgttcattcagaaatactttcaaagctatcccaaagttaaagcatggatcgagaagactctccgtgaaggccgcacacgtggttacgtagagaccttatttggacgtcgccgctatgttcccgatttaaacgctcgcgtgaaaggcaagcgtgaagccgccgaacgcatggcgttcaacatgcctgtacagggcacggcagctgacctcatgaaacttgcaatggtgcgcctttttccacaattgcgtgaagttggtgcccgcatgctcttgcaggtccacgatgaactcttgttagaagcgccaaaagagcgtgcggaagaggtggcagccctcgcgaaagaagttatggaaggcgtgtggcccttagcggtgcctcttgaagtcgaagttggtattggcgaggattggctggctgccaaagga

SEQ ID NO: 4986 - protein, 841 aa, synthetic construct
  REGION 1..841: note = Variant of DNA polymerase I from Thermus sp. strain 2.9
MHHHHHHGGSGVLPVFEPKGRVLLVDGHHLAYRNFFALKGLTTSLGEPVQGVYGFAKSLLKALKEDGDVVIVVFDAKAPSFRHEAYEAYKAGRAPTPEDFPRQLALMKELVDLLGLERLEVPGFEADDVLATLAKKAEREGYEVQILTADRDLFQLLSPRISVLHPEGHRITPEWLWEKYGLRPEQWVDFRALAGDPSDNIPGVKGIGEKTALKLLKEWGSLENLLKNLDQVKPESVREKILAHLEDLKLSRELSRVRTDLPLEVDFGRRREPDWEGLKAFLERLEFGSLLHEFGLLESPLLAEEAPWPPPEGAFLGYRLSRPEPMWAELLALAASAQGRVYRAEDPHGALRGLFEVRGLLAKDLAVVALREGLDLPPTDDPMLLAYLLDPSNTTPEGVARRYGGEWTEDAAKRALLAERLHANLLGRLQGEERLLWLYEEVEKPLSRVLAHMEATGVKLDVAYLENLSLEVAAHMRRLEEEVFRLAGRSFRLNSRDQLERVLFDELGLPPIGKTEKTGKRSTSSAVLEALREVHPIVDKILQYRELAKLKGTYIDRLPALVHPKTGRLHTRFNQTATATGRLSSSDPNLQNIPVRTPLGQKIRRAFVAEEGWRLVALDYRQIELRVLAHLSGDENLIRVFQEGKDIHTQTASWMFGLSAEAIDPLMRRAAKTINFGVLYGMSAFRLSQELGIPYEEAQAFIQKYFQSYPKVKAWIEKTLREGRTRGYVETLFGRRRYVPDLNARVKGKREAAERMAFNMPVQGTAADLMKLAMVRLFPQLREVGARMLLQVHDELLLEAPKERAEEVAALAKEVMEGVWPLAVPLEVEVGIGEDWLAAKG

SEQ ID NO: 4987 - DNA, 2523 bp, synthetic construct
  misc_feature 1..2523: note = Variant of DNA polymerase I from Thermus sp. strain 2.9
  source 1..2523: mol_type = other DNA
atgcaccatcatcatcatcatggcggtagcggcgtgttaccggtgttcgagcctaaaggtcgcgtgcttctggttgatggccatcatctcgcgtatcgtaacttctttgccctgaaaggattaaccaccagcctgggcgagccggtacagggtgtctacggctttgcaaagtcgctcctgaaagctctgaaagaagacggtgatgtggtgattgttgtctttgatgcgaaagcgccaagttttcgccacgaagcgtacgaagcttacaaagccgggcgtgctccaacgccggaagactttcctcgccaattggcgcttatgaaggaattagtggatttgcttggcctcgaacgcttggaagttcccggtttcgaggcagacgacgtattagcgactctcgcaaagaaagccgaacgtgagggctatgaagtccagatcttgacagcagatcgcgatcttttccagcttttatctccgcgcatctcggtgttacacccggaagggcatcgtatcaccccggaatggctctgggagaaatatggtttgcgtcccgaacaatgggtggattttcgcgccttagcaggcgatccgagcgacaatattccgggagttaaaggtatcggcgagaagacggcgctcaagctccttaaagaatgggggtcgttggagaacttgcttaagaatttagatcaggtcaaaccagagtcagtgcgtgagaagattcttgctcacctcgaagacctcaaattaagccgcgaattgtcccgtgtacgcaccgatttgccgctcgaagttgatttcggtcgccgccgcgaacctgactgggagggtcttaaagcgtttttagagcgtcttgaatttggttcgctcttgcatgaattcggccttttagaaagcccgttactggccgaagaagcaccttggccaccgcccgagggcgcgtttttaggttaccgtttgagtcgcccggaaccgatgtgggccgaattactggctcttgcagcgtctgcccagggacgtgtgtatcgcgcggaagaccctcatggtgcgctccgcggcctcttcgaagtccgtggactccttgccaaagacttagctgttgttgcattgcgcgaaggtcttgatttacctccgactgatgatccaatgcttcttgcgtacctcttggacccgtcaaacacgacgcccgaaggcgtagcccgtcgttacggcggcgagtggaccgaagatgcagcgaaacgcgcgttattggccgaacgtttgcacgccaatttattaggacgtttgcaaggcgaggaacgtctcctctggctttacgaagaagtggagaaaccattgagtcgcgtgctcgcgcatatggaagctaccggtgtcaaattagacgtggcgtatttggagaatctcagccttgaagttgctgcccacatgcgccgcttggaggaagaagtattccgtttagcaggccgttcctttcgccttaactctcgcgatcagttagaacgtgtgttgttcgatgaacttggtctccctcctatcggcaagacagagaagaccggtaaacgtagcacttcagcggcggttttagaagctcttcgcgaagtccatcccattgtggacaagatcttgcagtaccgcgaactcgcgaaattgaaaggcacctatattgaccgtcttccggcattagtccacccgaaaacgggacgcctccatacccgcttcaaccaaacagccacggcgaccggtcgtttgtcctcctctgatccaaaccttcagaatattccagtacgtaccccattgggccagaagatccgccgtgcgtttgtagctgaggagggttggcgtttagtggccctcgattatcgtcaaattgaattacgtgtccttgcccatctttctggcgatgagaacctcatccgcgtgtttcaggaaggcaaagacattcacactcaaacggcaagctggatgtttggattatcagctgaagcgatcgatcctttgatgcgtcgtgcagcgaagaccatcaatttcggtgttctctacggtatgagtgcctttcgtttgtcgcaggaattaggcattccctatgaagaagctcaggcgttcattcagaaatactttcaaagctatcccaaagttaaagcatggatcgagaagactctccgtgaaggccgcacacgtggttacgtagagaccttatttggacgtcgccgctatgttcccgatttaaacgctcgcgtgaaaggcaagcgtgaagccgccgaacgcatggcgttcaacatgcctgtacagggcacggcagctgactgtatgaaacttgcaatggtgcgcctttttccacaattgcgtgaagttggtgcccgcatgctcttgcaggtccacgatgaactcttgttagaagcgccaaaagagcgtgcggaagaggtggcagccctcgcgaaagaagttatggaaggcgtgtggcccttagcggtgcctcttgaagtcgaagttggtattggcgaggattggctggctgccaaagga

SEQ ID NO: 4988 - protein, 841 aa, synthetic construct
  REGION 1..841: note = Variant of DNA polymerase I from Thermus sp. strain 2.9
MHHHHHHGGSGVLPVFEPKGRVLLVDGHHLAYRNFFALKGLTTSLGEPVQGVYGFAKSLLKALKEDGDVVIVVFDAKAPSFRHEAYEAYKAGRAPTPEDFPRQLALMKELVDLLGLERLEVPGFEADDVLATLAKKAEREGYEVQILTADRDLFQLLSPRISVLHPEGHRITPEWLWEKYGLRPEQWVDFRALAGDPSDNIPGVKGIGEKTALKLLKEWGSLENLLKNLDQVKPESVREKILAHLEDLKLSRELSRVRTDLPLEVDFGRRREPDWEGLKAFLERLEFGSLLHEFGLLESPLLAEEAPWPPPEGAFLGYRLSRPEPMWAELLALAASAQGRVYRAEDPHGALRGLFEVRGLLAKDLAVVALREGLDLPPTDDPMLLAYLLDPSNTTPEGVARRYGGEWTEDAAKRALLAERLHANLLGRLQGEERLLWLYEEVEKPLSRVLAHMEATGVKLDVAYLENLSLEVAAHMRRLEEEVFRLAGRSFRLNSRDQLERVLFDELGLPPIGKTEKTGKRSTSAAVLEALREVHPIVDKILQYRELAKLKGTYIDRLPALVHPKTGRLHTRFNQTATATGRLSSSDPNLQNIPVRTPLGQKIRRAFVAEEGWRLVALDYRQIELRVLAHLSGDENLIRVFQEGKDIHTQTASWMFGLSAEAIDPLMRRAAKTINFGVLYGMSAFRLSQELGIPYEEAQAFIQKYFQSYPKVKAWIEKTLREGRTRGYVETLFGRRRYVPDLNARVKGKREAAERMAFNMPVQGTAADCMKLAMVRLFPQLREVGARMLLQVHDELLLEAPKERAEEVAALAKEVMEGVWPLAVPLEVEVGIGEDWLAAKG

SEQ ID NO: 4989 - DNA, 2523 bp, synthetic construct
  misc_feature 1..2523: note = Variant of DNA polymerase I from Thermus sp. strain 2.9
  source 1..2523: mol_type = other DNA
atgcaccatcatcatcatcatggcggtagcggcgtgttaccggtgttcgagcctaaaggtcgcgtgcttctggttgatggccatcatctcgcgtatcgtaacttctttgccctgaaaggattaaccaccagcctgggcgagccggtacagggtgtctacggctttgcaaagtcgctcctgaaagctctgaaagaagacggtgatgtggtgattgttgtctttgatgcgaaagcgccaagttttcgccacgaagcgtacgaagcttacaaagccgggcgtgctccaacgccggaagactttcctcgccaattggcgcttatgaaggaattagtggatttgcttggcctcgaacgcttggaagttcccggtttcgaggcagacgacgtattagcgactctcgcaaagaaagccgaacgtgagggctatgaagtccagatcttgacagcagatcgcgatcttttccagcttttatctccgcgcatctcggtgttacacccggaagggcatcgtatcaccccggaatggctctgggagaaatatggtttgcgtcccgaacaatgggtggattttcgcgccttagcaggcgatccgagcgacaatattccgggagttaaaggtatcggcgagaagacggcgctcaagctccttaaagaatgggggtcgttggagaacttgcttaagaatttagatcaggtcaaaccagagtcagtgcgtgagaagattcttgctcacctcgaagacctcaaattaagccgcgaattgtcccgtgtacgcaccgatttgccgctcgaagttgatttcggtcgccgccgcgaacctgactgggagggtcttaaagcgtttttagagcgtcttgaatttggttcgctcttgcatgaattcggccttttagaaagcccgttactggccgaagaagcaccttggccaccgcccgagggcgcgtttttaggttaccgtttgagtcgcccggaaccgatgtgggccgaattactggctcttgcagcgtctgcccagggacgtgtgtatcgcgcggaagaccctcatggtgcgctccgcggcctcttcgaagtccgtggactccttgccaaagacttagctgttgttgcattgcgcgaaggtcttgatttacctccgactgatgatccaatgcttcttgcgtacctcttggacccgtcaaacacgacgcccgaaggcgtagcccgtcgttacggcggcgagtggaccgaagatgcagcgaaacgcgcgttattggccgaacgtttgcacgccaatttattaggacgtttgcaaggcgaggaacgtctcctctggctttacgaagaagtggagaaaccattgagtcgcgtgctcgcgcatatggaagctaccggtgtcaaattagacgtggcgtatttggagaatctcagccttgaagttgctgcccacatgcgccgcttggaggaagaagtattccgtttagcaggccgttcctttcgccttaactctcgcgatcagttagaacgtgtgttgttcgatgaacttggtctccctcctatcggcaagacagagaagaccggtaaacgtagcacttcagcggcggttttagaagctcttcgcgaagtccatcccattgtggacaagatcttgcagtaccgcgaactcgcgaaattgaaaggcacctatattgaccgtcttccggcattagtccacccgaaaacgggacgcctccatacccgcttcaaccaaacagccacggcgaccggtcgtttgtcctcctctgatccaaaccttcagaatattccagtacgtaccccattgggccagaagatccgccgtgcgtttgtagctgaggagggttggcgtttagtggccctcgattatcgtcaaattgaattacgtgtccttgcccatctttctggcgatgagaacctcatccgcgtgtttcaggaaggcaaagacattcacactcaaacggcaagctggatgtttggattatcagctgaagcgatcgatcctttgatgcgtcgtgcagcgaagaccatcaatttcggtgttctctacggtatgagtgcctttcgtttgtcgcaggaattaggcattccctatgaagaagctcaggcgttcattcagaaaatgtttcaaagctatcccaaagttaaagcatggatcgagaagactctccgtgaaggccgcacacgtggttacgtagagaccttatttggacgtcgccgctatgttcccgatttaaacgctcgcgtgaaaggcaagcgtgaagccgccgaacgcatggcgttcaacatgcctgtacagggcacggcagctgacctcatgaaacttgcaatggtgcgcctttttccacaattgcgtgaagttggtgcccgcatgctcttgcaggtccacgatgaactcttgttagaagcgccaaaagagcgtgcggaagaggtggcagccctcgcgaaagaagttatggaaggcgtgtggcccttagcggtgcctcttgaagtcgaagttggtattggcgaggattggctggctgccaaagga

SEQ ID NO: 4990 - protein, 841 aa, synthetic construct
  REGION 1..841: note = Variant of DNA polymerase I from Thermus sp. strain 2.9
MHHHHHHGGSGVLPVFEPKGRVLLVDGHHLAYRNFFALKGLTTSLGEPVQGVYGFAKSLLKALKEDGDVVIVVFDAKAPSFRHEAYEAYKAGRAPTPEDFPRQLALMKELVDLLGLERLEVPGFEADDVLATLAKKAEREGYEVQILTADRDLFQLLSPRISVLHPEGHRITPEWLWEKYGLRPEQWVDFRALAGDPSDNIPGVKGIGEKTALKLLKEWGSLENLLKNLDQVKPESVREKILAHLEDLKLSRELSRVRTDLPLEVDFGRRREPDWEGLKAFLERLEFGSLLHEFGLLESPLLAEEAPWPPPEGAFLGYRLSRPEPMWAELLALAASAQGRVYRAEDPHGALRGLFEVRGLLAKDLAVVALREGLDLPPTDDPMLLAYLLDPSNTTPEGVARRYGGEWTEDAAKRALLAERLHANLLGRLQGEERLLWLYEEVEKPLSRVLAHMEATGVKLDVAYLENLSLEVAAHMRRLEEEVFRLAGRSFRLNSRDQLERVLFDELGLPPIGKTEKTGKRSTSAAVLEALREVHPIVDKILQYRELAKLKGTYIDRLPALVHPKTGRLHTRFNQTATATGRLSSSDPNLQNIPVRTPLGQKIRRAFVAEEGWRLVALDYRQIELRVLAHLSGDENLIRVFQEGKDIHTQTASWMFGLSAEAIDPLMRRAAKTINFGVLYGMSAFRLSQELGIPYEEAQAFIQKMFQSYPKVKAWIEKTLREGRTRGYVETLFGRRRYVPDLNARVKGKREAAERMAFNMPVQGTAADLMKLAMVRLFPQLREVGARMLLQVHDELLLEAPKERAEEVAALAKEVMEGVWPLAVPLEVEVGIGEDWLAAKG

SEQ ID NO: 4991 - DNA, 2523 bp, synthetic construct
  misc_feature 1..2523: note = Variant of DNA polymerase I from Thermus sp. strain 2.9
  source 1..2523: mol_type = other DNA
atgcaccatcatcatcatcatggcggtagcggcgtgttaccggtgttcgagcctaaaggtcgcgtgcttctggttgatggccatcatctcgcgtatcgtaacttctttgccctgaaaggattaaccaccagcctgggcgagccggtacagggtgtctacggctttgcaaagtcgctcctgaaagctctgaaagaagacggtgatgtggtgattgttgtctttgatgcgaaagcgccaagttttcgccacgaagcgtacgaagcttacaaagccgggcgtgctccaacgccggaagactttcctcgccaattggcgcttatgaaggaattagtggatttgcttggcctcgaacgcttggaagttcccggtttcgaggcagacgacgtattagcgactctcgcaaagaaagccgaacgtgagggctatgaagtccagatcttgacagcagatcgcgatcttttccagcttttatctccgcgcatctcggtgttacacccggaagggcatcgtatcaccccggaatggctctgggagaaatatggtttgcgtcccgaacaatgggtggattttcgcgccttagcaggcgatccgagcgacaatattccgggagttaaaggtatcggcgagaagacggcgctcaagctccttaaagaatgggggtcgttggagaacttgcttaagaatttagatcaggtcaaaccagagtcagtgcgtgagaagattcttgctcacctcgaagacctcaaattaagccgcgaattgtcccgtgtacgcaccgatttgccgctcgaagttgatttcggtcgccgccgcgaacctgactgggagggtcttaaagcgtttttagagcgtcttgaatttggttcgctcttgcatgaattcggccttttagaaagcccgttactggccgaagaagcaccttggccaccgcccgagggcgcgtttttaggttaccgtttgagtcgcccggaaccgatgtgggccgaattactggctcttgcagcgtctgcccagggacgtgtgtatcgcgcggaagaccctcatggtgcgctccgcggcctcttcgaagtccgtggactccttgccaaagacttagctgttgttgcattgcgcgaaggtcttgatttacctccgactgatgatccaatgcttcttgcgtacctcttggacccgtcaaacacgacgcccgaaggcgtagcccgtcgttacggcggcgagtggaccgaagatgcagcgaaacgcgcgttattggccgaacgtttgcacgccaatttattaggacgtttgcaaggcgaggaacgtctcctctggctttacgaagaagtggagaaaccattgagtcgcgtgctcgcgcatatggaagctaccggtgtcaaattagacgtggcgtatttggagaatctcagccttgaagttgctgcccacatgcgccgcttggaggaagaagtattccgtttagcaggccgttcctttcgccttaactctcgcgatcagttagaacgtgtgttgttcgatgaacttggtctccctcctatcggcaagacagagaagaccggtaaacgtagcacttcagcggcggttttagaagctcttcgcgaagtccatcccattgtggacaagatcttgcagtaccgcgaactcgcgaaattgaaaggcacctatattgaccgtcttccggcattagtccacccgaaaacgggacgcctccatacccgcttcaaccaaacagccacggcgaccggtcgtttgtcctcctctgatccaaaccttcagaatattccagtacgtaccccattgggccagaagatccgccgtgcgtttgtagctgaggagggttggcgtttagtggccctcgattatcgtcaaattgaattacgtgtccttgcccatctttctggcgatgagaacctcatccgcgtgtttcaggaaggcaaagacattcacactcaaacggcaagctggatgtttggattatcagctgaagcgatcgatcctttgatgcgtcgtgcagcgaagaccatcaatttcggtgttctctacggtatgagtgcctttcgtttgtcgcaggaattaggcattccctatgaagaagctcaggcgttcattcagaaatactttcaaagctatcccaaagttaaagcatggatcgagaagactctccgtgaaggccgcacacgtggttacgtagagaccttatttggacgtcgccgctatgttcccgatttaaacgctcgcgtgaaaggcaagcgtgaagccgccgaacgcatggcgttcaacatgcctgtacagggcacggcagctgacctcatgaaacttgcaatggtgcgcctttttccacaattgcgtgaagttggtgcccgcatgctcttgcaggtccacgatgaactcttgttagaagcgccaaaagagcgtgcggaagaggtggcagccctcgcgaaagaagttatggaaggcgtgtggcccttagcggtgcctcttgaagtctgggttggtattggcgaggattggctggctgccaaagga

SEQ ID NO: 4992 - protein, 841 aa, synthetic construct
  REGION 1..841: note = Variant of DNA polymerase I from Thermus sp. strain 2.9
MHHHHHHGGSGVLPVFEPKGRVLLVDGHHLAYRNFFALKGLTTSLGEPVQGVYGFAKSLLKALKEDGDVVIVVFDAKAPSFRHEAYEAYKAGRAPTPEDFPRQLALMKELVDLLGLERLEVPGFEADDVLATLAKKAEREGYEVQILTADRDLFQLLSPRISVLHPEGHRITPEWLWEKYGLRPEQWVDFRALAGDPSDNIPGVKGIGEKTALKLLKEWGSLENLLKNLDQVKPESVREKILAHLEDLKLSRELSRVRTDLPLEVDFGRRREPDWEGLKAFLERLEFGSLLHEFGLLESPLLAEEAPWPPPEGAFLGYRLSRPEPMWAELLALAASAQGRVYRAEDPHGALRGLFEVRGLLAKDLAVVALREGLDLPPTDDPMLLAYLLDPSNTTPEGVARRYGGEWTEDAAKRALLAERLHANLLGRLQGEERLLWLYEEVEKPLSRVLAHMEATGVKLDVAYLENLSLEVAAHMRRLEEEVFRLAGRSFRLNSRDQLERVLFDELGLPPIGKTEKTGKRSTSAAVLEALREVHPIVDKILQYRELAKLKGTYIDRLPALVHPKTGRLHTRFNQTATATGRLSSSDPNLQNIPVRTPLGQKIRRAFVAEEGWRLVALDYRQIELRVLAHLSGDENLIRVFQEGKDIHTQTASWMFGLSAEAIDPLMRRAAKTINFGVLYGMSAFRLSQELGIPYEEAQAFIQKYFQSYPKVKAWIEKTLREGRTRGYVETLFGRRRYVPDLNARVKGKREAAERMAFNMPVQGTAADLMKLAMVRLFPQLREVGARMLLQVHDELLLEAPKERAEEVAALAKEVMEGVWPLAVPLEVWVGIGEDWLAAKG

SEQ ID NO: 4993 - DNA, 2523 bp, synthetic construct
  misc_feature 1..2523: note = Variant of DNA polymerase I from Thermus sp. strain 2.9
  source 1..2523: mol_type = other DNA
atgcaccatcatcatcatcatggcggtagcggcgtgttaccggtgttcgagcctaaaggtcgcgtgcttctggttgatggccatcatctcgcgtatcgtaacttctttgccctgaaaggattaaccaccagcctgggcgagccggtacagggtgtctacggctttgcaaagtcgctcctgaaagctctgaaagaagacggtgatgtggtgattgttgtctttgatgcgaaagcgccaagttttcgccacgaagcgtacgaagcttacaaagccgggcgtgctccaacgccggaagactttcctcgccaattggcgcttatgaaggaattagtggatttgcttggcctcgaacgcttggaagttcccggtttcgaggcagacgacgtattagcgactctcgcaaagaaagccgaacgtgagggctatgaagtccagatcttgacagcagatcgcgatcttttccagcttttatctccgcgcatctcggtgttacacccggaagggcatcgtatcaccccggaatggctctgggagaaatatggtttgcgtcccgaacaatgggtggattttcgcgccttagcaggcgatccgagcgacaatattccgggagttaaaggtatcggcgagaagacggcgctcaagctccttaaagaatgggggtcgttggagaacttgcttaagaatttagatcaggtcaaaccagagtcagtgcgtgagaagattcttgctcacctcgaagacctcaaattaagccgcgaattgtcccgtgtacgcaccgatttgccgctcgaagttgatttcggtcgccgccgcgaacctgactgggagggtcttaaagcgtttttagagcgtcttgaatttggttcgctcttgcatgaattcggccttttagaaagcccgttactggccgaagaagcaccttggccaccgcccgagggcgcgtttttaggttaccgtttgagtcgcccggaaccgatgtgggccgaattactggctcttgcagcgtctgcccagggacgtgtgtatcgcgcggaagaccctcatggtgcgctccgcggcgggttcgaagtccgtggactccttgccaaagacttagctgttgttgcattgcgcgaaggtcttgatttacctccgactgatgatccaatgcttcttgcgtacctcttggacccgtcaaacacgacgcccgaaggcgtagcccgtcgttacggcggcgagtggaccgaagatgcagcgaaacgcgcgttattggccgaacgtttgcacgccaatttattaggacgtttgcaaggcgaggaacgtctcctctggctttacgaagaagtggagaaaccattgagtcgcgtgctcgcgcatatggaagctaccggtgtcaaattagacgtggcgtatttggagaatctcagccttgaagttgctgcccacatgcgccgcttggaggaagaagtattccgtttagcaggccgttcctttcgccttaactctcgcgatcagttagaacgtgtgttgttcgatgaacttggtctccctcctatcggcaagacagagaagaccggtaaacgtagcacttcagcggcggttttagaagctcttcgcgaagtccatcccattgtggacaagatcttgcagtaccgcgaactcgcgaaattgaaaggcacctatattgaccgtcttccggcattagtccacccgaaaacgggacgcctccatacccgcttcaaccaaacagccacggcgaccggtcgtttgtcctcctctgatccaaaccttcagaatattccagtacgtaccccattgggccagaagatccgccgtgcgtttgtagctgaggagggttggcgtttagtggccctcgattatcgtcaaattgaattacgtgtccttgcccatctttctggcgatgagaacctcatccgcgtgtttcaggaaggcaaagacattcacactcaaacggcaagctggatgtttggattatcagctgaagcgatcgatcctttgatgcgtcgtgcagcgaagaccatcaatttcggtgttctctacggtatgagtgcctttcgtttgtcgcaggaattaggcattccctatgaagaagctcaggcgttcattcagaaatactttcaaagctatcccaaagttaaagcatggatcgagaagactctccgtgaaggccgcacacgtggttacgtagagaccttatttggacgtcgccgctatgttcccgatttaaacgctcgcgtgaaaggcaagcgtgaagccgccgaacgcatggcgttcaacatgcctgtacagggcacggcagctgacctcatgaaacttgcaatggtgcgcctttttccacaattgcgtgaagttggtgcccgcatgctcttgcaggtccacgatgaactcttgttagaagcgccaaaagagcgtgcggaagaggtggcagccctcgcgaaagaagttatggaaggcgtgtggcccttagcggtgcctcttgaagtcgaagttggtattggcgaggattggctggctgccaaagga

SEQ ID NO: 4994 - protein, 841 aa, synthetic construct
  REGION 1..841: note = Variant of DNA polymerase I from Thermus sp. strain 2.9
MHHHHHHGGSGVLPVFEPKGRVLLVDGHHLAYRNFFALKGLTTSLGEPVQGVYGFAKSLLKALKEDGDVVIVVFDAKAPSFRHEAYEAYKAGRAPTPEDFPRQLALMKELVDLLGLERLEVPGFEADDVLATLAKKAEREGYEVQILTADRDLFQLLSPRISVLHPEGHRITPEWLWEKYGLRPEQWVDFRALAGDPSDNIPGVKGIGEKTALKLLKEWGSLENLLKNLDQVKPESVREKILAHLEDLKLSRELSRVRTDLPLEVDFGRRREPDWEGLKAFLERLEFGSLLHEFGLLESPLLAEEAPWPPPEGAFLGYRLSRPEPMWAELLALAASAQGRVYRAEDPHGALRGGFEVRGLLAKDLAVVALREGLDLPPTDDPMLLAYLLDPSNTTPEGVARRYGGEWTEDAAKRALLAERLHANLLGRLQGEERLLWLYEEVEKPLSRVLAHMEATGVKLDVAYLENLSLEVAAHMRRLEEEVFRLAGRSFRLNSRDQLERVLFDELGLPPIGKTEKTGKRSTSAAVLEALREVHPIVDKILQYRELAKLKGTYIDRLPALVHPKTGRLHTRFNQTATATGRLSSSDPNLQNIPVRTPLGQKIRRAFVAEEGWRLVALDYRQIELRVLAHLSGDENLIRVFQEGKDIHTQTASWMFGLSAEAIDPLMRRAAKTINFGVLYGMSAFRLSQELGIPYEEAQAFIQKYFQSYPKVKAWIEKTLREGRTRGYVETLFGRRRYVPDLNARVKGKREAAERMAFNMPVQGTAADLMKLAMVRLFPQLREVGARMLLQVHDELLLEAPKERAEEVAALAKEVMEGVWPLAVPLEVEVGIGEDWLAAKG

SEQ ID NO: 4995 - DNA, 2523 bp, synthetic construct
  misc_feature 1..2523: note = Variant of DNA polymerase I from Thermus sp. strain 2.9
  source 1..2523: mol_type = other DNA
atgcaccatcatcatcatcatggcggtagcggcgtgttaccggtgttcgagcctaaaggtcgcgtgcttctggttgatggccatcatctcgcgtatcgtaacttctttgccctgaaaggattaaccaccagcctgggcgagccggtacagggtgtctacggctttgcaaagtcgctcctgaaagctctgaaagaagacggtgatgtggtgattgttgtctttgatgcgaaagcgccaagttttcgccacgaagcgtacgaagcttacaaagccgggcgtgctccaacgccggaagactttcctcgccaattgtttcttatgaaggaattagtggatttgcttggcctcgaacgcttggaagttcccggtttcgaggcagacgacgtattagcgactctcgcaaagaaagccgaagatgagggctatgaagtccagatcttgacagcagatcgcgatcttttccagcttttatctccgcgcatctcggtgttacacccggaagggcatcgtatcaccccggaatggctctgggagaaatatggtttgcgtcccgaacaatgggtggattttcgcgccttagcaggcgatccgagcgacaatattccgggagttaaaggtatcggcgagaagacggcgctcaagctccttaaagaatgggggtcgttggagaacttgcttaagaatttagatcaggtcaaaccagagtcagtgcgtgagaagattcttgctcacctcgaagacctcaagttaagccgcgaattgtcccgtgtacgcaccgatttgccgctcgaagttgatttcggtcgccgccgcgaacctgactgggagggtcttaaagcgtttttagagcgtcttgaatttggttcgctcttgcatgaattcggccttttagaaagcccgttactggccgaagaagcaccttggccaccgcccgagggcgcgtttttaggttaccgtttgagtcgcccggaaccgatgtgggccgaattactggctcttgcagcgtctgcccagggacgtgtgtatcgcgcggaagaccctcatggtgcgctccgcggcctcttcgaagtccgtggactccttgccaaagacttagctgttgttgcattgcgcgaaggtcttgatttacctccgactgatgatccaatgcttcttgcgtacctcttggacccgtcaaacacgacgcccgaaggcgtagcccgtcgttacggcggcgagtggaccgaagatgcagcgaaacgcgcgttattggccgaacgtttgcacgccaatttattaggacgtttgcaaggcgaggagcgtctcctctggctttacgaagaagtggagaaaccattgagtgtggtgctcgctcatatggaagctaccggtgtcaaattagacgtggcgtatttggagaatctcagccttgaagttgctgcccacatgcgccgcttggaggaagaagtattccgtttagcaggccgttcctttcgccttaactctcgcgatcagttagaaaaagtgttgttcgatgaacttggtctccctcctatcggcaagacagagaagaccggtaaacgtagcacttcacgtgcggttttagatgctcttcgcgaagtccatcccattgtggacaagatcttgcagtaccgcgaactggcgaaattgaaaggcacctatattgaccgtcttccggcattagtccacccgaaaacgggacgcctccatacccgcttcaaccaaacagccacggcgaccggtcgtttgtcctcctctgatccaaaccttcagaatattccagtacgtaccccattgggccagaagatccgccgtgcgtttgtagctgaggagggttggcgtttagtggccctcgattatcgtcaaattgaattacgtgtccttgcccatctttctggcgatgagaacctcatccgcgtgtttgaagaaggcaaagacattcacactcaaacggcaagctggatgtttggattaggcgctgaagcgatcgatcctttgatgcgtcgtgcagcgaagacgatcaatttcggtgttctctacggtatgagtgcctttcgtttgtcgcaggaattaggcattccctatgaagaagctcaggcgttcattcagaaatactttcaaagctatcccaaagttaaagcatggatcgagaagactctccgtgaaggccgcacacgtggttacgtagagaccttatttggacgtcgccgctatgttcccgatttaaacgctcgcgtgaaaggcaagcgtgaagccgccgaacgcatggcgttcaacatgcctgtacagggcacggcagctgacctcatgaaacttgcaatggtgcgcctttttccacaattgcgtgaagttggtgcccgcatgctcttgcaggtccacgatgaactcttgttagaagcgccaaaagagcgtgcggaagaggtggcagccctcgcgaaagaagttatggaaggcgtgtggcccttagcggtgcctcttgaagtcgaagttggtattggcgaggattggctggctgccaaagga

SEQ ID NO: 4996 - protein, 841 aa, synthetic construct
  REGION 1..841: note = Variant of DNA polymerase I from Thermus sp. strain 2.9
MHHHHHHGGSGVLPVFEPKGRVLLVDGHHLAYRNFFALKGLTTSLGEPVQGVYGFAKSLLKALKEDGDVVIVVFDAKAPSFRHEAYEAYKAGRAPTPEDFPRQLFLMKELVDLLGLERLEVPGFEADDVLATLAKKAEDEGYEVQILTADRDLFQLLSPRISVLHPEGHRITPEWLWEKYGLRPEQWVDFRALAGDPSDNIPGVKGIGEKTALKLLKEWGSLENLLKNLDQVKPESVREKILAHLEDLKLSRELSRVRTDLPLEVDFGRRREPDWEGLKAFLERLEFGSLLHEFGLLESPLLAEEAPWPPPEGAFLGYRLSRPEPMWAELLALAASAQGRVYRAEDPHGALRGLFEVRGLLAKDLAVVALREGLDLPPTDDPMLLAYLLDPSNTTPEGVARRYGGEWTEDAAKRALLAERLHANLLGRLQGEERLLWLYEEVEKPLSVVLAHMEATGVKLDVAYLENLSLEVAAHMRRLEEEVFRLAGRSFRLNSRDQLEKVLFDELGLPPIGKTEKTGKRSTSRAVLDALREVHPIVDKILQYRELAKLKGTYIDRLPALVHPKTGRLHTRFNQTATATGRLSSSDPNLQNIPVRTPLGQKIRRAFVAEEGWRLVALDYRQIELRVLAHLSGDENLIRVFEEGKDIHTQTASWMFGLGAEAIDPLMRRAAKTINFGVLYGMSAFRLSQELGIPYEEAQAFIQKYFQSYPKVKAWIEKTLREGRTRGYVETLFGRRRYVPDLNARVKGKREAAERMAFNMPVQGTAADLMKLAMVRLFPQLREVGARMLLQVHDELLLEAPKERAEEVAALAKEVMEGVWPLAVPLEVEVGIGEDWLAAKG

SEQ ID NO: 4997 - DNA, 2523 bp, synthetic construct
  misc_feature 1..2523: note = Variant of DNA polymerase I from Thermus sp. strain 2.9
  source 1..2523: mol_type = other DNA
atgcaccatcatcatcatcatggcggtagcggcgtgttaccggtgttcgagcctaaaggtcgcgtgcttctggttgatggccatcatctcgcgtatcgtaacttctttgccctgaaaggattaaccaccagcctgggcgagccggtacagggtgtctacggctttgcaaagtcgctcctgaaagctctgaaagaagacggtgatgtggtgattgttgtctttgatgcgaaagcgccaagttttcgccacgaagcgtacgaagcttacaaagccgggcgtgctccaacgccggaagactttcctcgccaattggcgcttatgaaggaattagtggatttgcttggcctcgaacgcttggaagttcccggtttcgaggcagacgacgtattagcgactctcgcaaagaaagccgaacgtgagggctatgaagtccagatcttgacagcagatcgcgatcttttccagcttttatctccgcgcatctcggtgttacacccggaagggcatcgtatcaccccggaatggctctgggagaaatatggtttgcgtcccgaacaatgggtggattttcgcgccttagcaggcgatccgagcgacaatattccgggagttaaaggtatcggcgagaagacggcgctcaagctccttaaagaatgggggtcgttggagaacttgcttaagaatttagatcaggtcaaaccagagtcagtgcgtgagaagattcttgctcacctcgaagacctcaaattaagccgcgaattgtcccgtgtacgcaccgatttgccgctcgaagttgatttcggtcgccgccgcgaacctgactgggagggtcttaaagcgtttttagagcgtcttgaatttggttcgctcttgcatgaattcggccttttagaaagcccgttactggccgaagaagcaccttggccaccgcccgagggcgcgtttttaggttaccgtttgagtcgcccggaaccgatgtgggccgaattactggctcttgcagcgtctgcccagggacgtgtgtatcgcgcggaagaccctcatggtgcgctccgcggcctcttcgaagtccgtggactccttgccaaagacttagctgttgttgcattgcgcgaaggtcttgatttacctccgactgatgatccaatgcttcttgcgtacctcttggacccgtcaaacacgacgcccgaaggcgtagcccgtcgttacggcggcgagtggaccgaagatgcagcgaaacgcgcgttattggccgaacgtttgcacgccaatttattaggacgtttgcaaggcgaggaacgtctcctctggctttacgaagaagtggagaaaccattgagtcgcgtgctcgcgcatatggaagctaccggtgtcaaattagacgtggcgtatttggagaatctcagccttgaagttgctgcccacatgcgccgcttggaggaagaagtattccgtttagcaggccgttcctttcgccttaactctcgcgatcagttagaacgtgtgttgttcgatgaacttggtctccctcctatcggcaagacagagaagaccggtaaacgtagcacttcagcggcggttttagaagctcttcgcgaagtccatcccattgtggacaagatcttgcagtaccgcgaactcgcgaaattgaaaggcacctatattgaccgtcttccggcattagtccacccgaaaacgggacgcctccatacccgcttcaaccaaacagccacggcgaccggtcgtttgtcctcctctgatccaaaccttcagaatattccagtacgtaccccattgggccagaagatccgccgtgcgtttgtagctgaggagggttggcgtttagtggccctcgattatcgtcaaattgaattacgtgtccttgcccatctttctggcgatgagaacctcatccgcgtgtttcaggaaggcaaagacattcacactcaaacggcaagctggatgtttggattatcagctgaagcgatcgatcctttgatgcgtcgtgcagcgaagaccatcaatttcggtgttctctacggtatgagtgccagtcgtttgtcgcaggaattaggcattccctatgaagaagctcaggcgttcattcagaaatactttcaaagctatcccaaagttaaagcatggatcgagaagactctccgtgaaggccgcacacgtggttacgtagagaccttatttggacgtcgccgctatgttcccgatttaaacgctcgcgtgaaaggcaagcgtgaagccgccgaacgcatggcgttcaacatgcctgtacagggcacggcagctgacctcatgaaacttgcaatggtgcgcctttttccacaattgcgtgaagttggtgcccgcatgctcttgcaggtccacgatgaactcttgttagaagcgccaaaagagcgtgcggaagaggtggcagccctcgcgaaagaagttatggaaggcgtgtggcccttagcggtgcctcttgaagtcgaagttggtattggcgaggattggctggctgccaaagga

SEQ ID NO: 4998 - protein, 841 aa, synthetic construct
  REGION 1..841: note = Variant of DNA polymerase I from Thermus sp. strain 2.9
MHHHHHHGGSGVLPVFEPKGRVLLVDGHHLAYRNFFALKGLTTSLGEPVQGVYGFAKSLLKALKEDGDVVIVVFDAKAPSFRHEAYEAYKAGRAPTPEDFPRQLALMKELVDLLGLERLEVPGFEADDVLATLAKKAEREGYEVQILTADRDLFQLLSPRISVLHPEGHRITPEWLWEKYGLRPEQWVDFRALAGDPSDNIPGVKGIGEKTALKLLKEWGSLENLLKNLDQVKPESVREKILAHLEDLKLSRELSRVRTDLPLEVDFGRRREPDWEGLKAFLERLEFGSLLHEFGLLESPLLAEEAPWPPPEGAFLGYRLSRPEPMWAELLALAASAQGRVYRAEDPHGALRGLFEVRGLLAKDLAVVALREGLDLPPTDDPMLLAYLLDPSNTTPEGVARRYGGEWTEDAAKRALLAERLHANLLGRLQGEERLLWLYEEVEKPLSRVLAHMEATGVKLDVAYLENLSLEVAAHMRRLEEEVFRLAGRSFRLNSRDQLERVLFDELGLPPIGKTEKTGKRSTSAAVLEALREVHPIVDKILQYRELAKLKGTYIDRLPALVHPKTGRLHTRFNQTATATGRLSSSDPNLQNIPVRTPLGQKIRRAFVAEEGWRLVALDYRQIELRVLAHLSGDENLIRVFQEGKDIHTQTASWMFGLSAEAIDPLMRRAAKTINFGVLYGMSASRLSQELGIPYEEAQAFIQKYFQSYPKVKAWIEKTLREGRTRGYVETLFGRRRYVPDLNARVKGKREAAERMAFNMPVQGTAADLMKLAMVRLFPQLREVGARMLLQVHDELLLEAPKERAEEVAALAKEVMEGVWPLAVPLEVEVGIGEDWLAAKG

SEQ ID NO: 4999 - DNA, 2523 bp, synthetic construct
  misc_feature 1..2523: note = Variant of DNA polymerase I from Thermus sp. strain 2.9
  source 1..2523: mol_type = other DNA
atgcaccatcatcatcatcatggcggtagcggcgtgttaccggtgttcgagcctaaaggtcgcgtgcttctggttgatggccatcatctcgcgtatcgtaacttctttgccctgaaaggattaaccaccagcctgggcgagccggtacagggtgtctacggctttgcaaagtcgctcctgaaagctctgaaagaagacggtgatgtggtgattgttgtctttgatgcgaaagcgccaagttttcgccacgaagcgtacgaagcttacaaagccgggcgtgctccaacgccggaagactttcctcgccaattggcgcttatgaaggaattagtggatttgcttggcctcgaacgcttggaagttcccggtttcgaggcagacgacgtattagcgactctcgcaaagaaagccgaacgtgagggctatgaagtccagatcttgacagcagatcgcgatcttttccagcttttatctccgcgcatctcggtgttacacccggaagggcatcgtatcaccccggaatggctctgggagaaatatggtttgcgtcccgaacaatgggtggattttcgcgccttagcaggcgatccgagcgacaatattccgggagttaaaggtatcggcgagaagacggcgctcaagctccttaaagaatgggggtcgttggagaacttgcttaagaatttagatcaggtcaaaccagagtcagtgcgtgagaagattcttgctcacctcgaagacctcaaattaagccgcgaattgtcccgtgtacgcaccgatttgccgctcgaagttgatttcggtcgccgccgcgaacctgactgggagggtcttaaagcgtttttagagcgtcttgaatttggttcgctcttgcatgaattcggccttttagaaagcccgttactggccgaagaagcaccttggccaccgcccgagggcgcgtttttaggttaccgtttgagtcgcccggaaccgatgtgggccgaattactggctcttgcagcgtctgcccagggacgtgtgtatcgcgcggaagaccctcatggtgcgctccgcggcctcttcgaagtccgtggactccttgccaaagacttagctgttgttgcattgcgcgaaggtcttgatttacctccgactgatgatccaatgcttcttgcgtacctcttggacccgtcaaacacgacgcccgaaggcgtagcccgtcgttacggcggcgagtggaccgaagatgcagcgaaacgcgcgttattggccgaacgtttgcacgccaatttattaggacgtttgcaaggcgaggaacgtctcctctggctttacgaagaagtggagaaaccattgagtcgcgtgctcgcgcatatggaagctaccggtgtcaaattagacgtggcgtatttggagaatctcagccttgaagttgctgcccacatgcgccgcttggaggaagaagtattccgtttagcaggccgttcctttcgccttaactctcgcgatcagttagaacgtgtgttgttcgatgaacttggtctccctcctatcggcaagacagagaagaccggtaaacgtagcacttcagcggcggttttagaagctcttcgcgaagtccatcccattgtggacaagatcttgcagtaccgcgaactcgcgaaattgaaaggcacctatattgaccgtcttccggcattagtccacccgaaaacgggacgcctccatacccgcttcaaccaatgggccacggcgaccggtcgtttgtcctcctctgatccaaaccttcagaatattccagtacgtaccccattgggccagaagatccgccgtgcgtttgtagctgaggagggttggcgtttagtggccctcgattatcgtcaaattgaattacgtgtccttgcccatctttctggcgatgagaacctcatccgcgtgtttcaggaaggcaaagacattcacactcaaacggcaagctggatgtttggattatcagctgaagcgatcgatcctttgatgcgtcgtgcagcgaagaccatcaatttcggtgttctctacggtatgagtgcctttcgtttgtcgcaggaattaggcattccctatgaagaagctcaggcgttcattcagaaatactttcaaagctatcccaaagttaaagcatggatcgagaagactctccgtgaaggccgcacacgtggttacgtagagaccttatttggacgtcgccgctatgttcccgatttaaacgctcgcgtgaaaggcaagcgtgaagccgccgaacgcatggcgttcaacatgcctgtacagggcacggcagctgacctcatgaaacttgcaatggtgcgcctttttccacaattgcgtgaagttggtgcccgcatgctcttgcaggtccacgatgaactcttgttagaagcgccaaaagagcgtgcggaagaggtggcagccctcgcgaaagaagttatggaaggcgtgtggcccttagcggtgcctcttgaagtcgaagttggtattggcgaggattggctggctgccaaagga

SEQ ID NO: 5000 - protein, 841 aa, synthetic construct
  REGION 1..841: note = Variant of DNA polymerase I from Thermus sp. strain 2.9
MHHHHHHGGSGVLPVFEPKGRVLLVDGHHLAYRNFFALKGLTTSLGEPVQGVYGFAKSLLKALKEDGDVVIVVFDAKAPSFRHEAYEAYKAGRAPTPEDFPRQLALMKELVDLLGLERLEVPGFEADDVLATLAKKAEREGYEVQILTADRDLFQLLSPRISVLHPEGHRITPEWLWEKYGLRPEQWVDFRALAGDPSDNIPGVKGIGEKTALKLLKEWGSLENLLKNLDQVKPESVREKILAHLEDLKLSRELSRVRTDLPLEVDFGRRREPDWEGLKAFLERLEFGSLLHEFGLLESPLLAEEAPWPPPEGAFLGYRLSRPEPMWAELLALAASAQGRVYRAEDPHGALRGLFEVRGLLAKDLAVVALREGLDLPPTDDPMLLAYLLDPSNTTPEGVARRYGGEWTEDAAKRALLAERLHANLLGRLQGEERLLWLYEEVEKPLSRVLAHMEATGVKLDVAYLENLSLEVAAHMRRLEEEVFRLAGRSFRLNSRDQLERVLFDELGLPPIGKTEKTGKRSTSAAVLEALREVHPIVDKILQYRELAKLKGTYIDRLPALVHPKTGRLHTRFNQWATATGRLSSSDPNLQNIPVRTPLGQKIRRAFVAEEGWRLVALDYRQIELRVLAHLSGDENLIRVFQEGKDIHTQTASWMFGLSAEAIDPLMRRAAKTINFGVLYGMSAFRLSQELGIPYEEAQAFIQKYFQSYPKVKAWIEKTLREGRTRGYVETLFGRRRYVPDLNARVKGKREAAERMAFNMPVQGTAADLMKLAMVRLFPQLREVGARMLLQVHDELLLEAPKERAEEVAALAKEVMEGVWPLAVPLEVEVGIGEDWLAAKG

SEQ ID NO: 5001 - DNA, 2523 bp, synthetic construct
  misc_feature 1..2523: note = Variant of DNA polymerase I from Thermus sp. strain 2.9
  source 1..2523: mol_type = other DNA
atgcaccatcatcatcatcatggcggtagcggcgtgttaccggtgttcgagcctaaaggtcgcgtgcttctggttgatggccatcatctcgcgtatcgtaacttctttgccctgaaaggattaaccaccagcctgggcgagccggtacagggtgtctacggctttgcaaagtcgctcctgaaagctctgaaagaagacggtgatgtggtgattgttgtctttgatgcgaaagcgccaagttttcgccacgaagcgtacgaagcttacaaagccgggcgtgctccaacgccggaagactttcctcgccaattggcgcttatgaaggaattagtggatttgcttggcctcgaacgcttggaagttcccggtttcgaggcagacgacgtattagcgactctcgcaaagaaagccgaacgtgagggctatgaagtccagatcttgacagcagatcgcgatcttttccagcttttatctccgcgcatctcggtgttacacccggaagggcatcgtatcaccccggaatggctctgggagaaatatggtttgcgtcccgaacaatgggtggattttcgcgccttagcaggcgatccgagcgacaatattccgggagttaaaggtatcggcgagaagacggcgctcaagctccttaaagaatgggggtcgttggagaacttgcttaagaatttagatcaggtcaaaccagagtcagtgcgtgagaagattcttgctcacctcgaagacctcaaattaagccgcgaattgtcccgtgtacgcaccgatttgccgctcgaagttgatttcggtcgccgccgcgaacctgactgggagggtcttaaagcgtttttagagcgtcttgaatttggttcgctcttgcatgaattcggccttttagaaagcccgttactggccgaagaagcaccttggccaccgcccgagggcgcgtttttaggttaccgtttgagtcgcccggaaccgatgtgggccgaattactggctcttgcagcgtctgcccagggacgtgtgtatcgcgcggaagaccctcatggtgcgctccgcggcctcttcgaagtccgtggactccttgccaaagacttagctgttgttgcattgcgcgaaggtcttgatttacctccgactgatgatccaatgcttcttgcgtacctcttggacccgtcaaacacgacgcccgaaggcgtagcccgtcgttacggcggcgagtggaccgaagatgcagcgaaacgcgcgttattggccgaacgtttgcacgccaatttattaggacgtttgcaaggcgaggaacgtctcctctggctttacgaagaagtggagaaaccattgagtcgcgtgctcgcgcatatggaagctaccggtgtcaaattagacgtggcgtatttggagaatctcagccttgaagttgctgcccacatgcgccgcttggaggaagaagtattccgtttagcaggccgttcctttcgccttaactctcgcgatcagttagaacgtgtgttgttcgatgaacttggtctccctcctatcggcaagacagagaagaccggtaaacgtagcacttcagcggcggttttagaagctcttcgcgaagtccatcccattgtggacaagatcttgcagtaccgcgaactcgcgaaattgaaaggcacctatattgaccgtcttccggcattagtccacccgaaaacgggacgcctccatacccgcttcaaccaaacagccacggcgaccggtcgtttgtcctcctctgatccaaaccttcagaatattccagtacgtaccccattgggccagaagatccgccgtgcgtttgtagctgaggagggttggcgtttagtggccctcgattatcgtcaaattgaattacgtgtccttgcccatctttctggcgatgagaacctcatccgcgtgtttcaggaaggcaaagacattcacactcaaacggcaagctggatgtttggattatcagctgaagcgatcgatcctttgatgcgtcgtgcagcgaagaccatcaatttcggtgttctctacggtatgagtgcctttcgtttgtcgcaggaattaggcattccctatgaagaagctcaggcgttcattcagaaatactttcaaagctatcccaaagttaaagcatggatcgagaagactctccgtgaaggccgcacacgtggtagtgtagagaccttatttggacgtcgccgctatgttcccgatttaaacgctcgcgtgaaaggcaagcgtgaagccgccgaacgcatggcgttcaacatgcctgtacagggcacggcagctgacctcatgaaacttgcaatggtgcgcctttttccacaattgcgtgaagttggtgcccgcatgctcttgcaggtccacgatgaactcttgttagaagcgccaaaagagcgtgcggaagaggtggcagccctcgcgaaagaagttatggaaggcgtgtggcccttagcggtgcctcttgaagtcgaagttggtattggcgaggattggctggctgccaaagga

SEQ ID NO: 5002 - protein, 841 aa, synthetic construct
  REGION 1..841: note = Variant of DNA polymerase I from Thermus sp. strain 2.9
MHHHHHHGGSGVLPVFEPKGRVLLVDGHHLAYRNFFALKGLTTSLGEPVQGVYGFAKSLLKALKEDGDVVIVVFDAKAPSFRHEAYEAYKAGRAPTPEDFPRQLALMKELVDLLGLERLEVPGFEADDVLATLAKKAEREGYEVQILTADRDLFQLLSPRISVLHPEGHRITPEWLWEKYGLRPEQWVDFRALAGDPSDNIPGVKGIGEKTALKLLKEWGSLENLLKNLDQVKPESVREKILAHLEDLKLSRELSRVRTDLPLEVDFGRRREPDWEGLKAFLERLEFGSLLHEFGLLESPLLAEEAPWPPPEGAFLGYRLSRPEPMWAELLALAASAQGRVYRAEDPHGALRGLFEVRGLLAKDLAVVALREGLDLPPTDDPMLLAYLLDPSNTTPEGVARRYGGEWTEDAAKRALLAERLHANLLGRLQGEERLLWLYEEVEKPLSRVLAHMEATGVKLDVAYLENLSLEVAAHMRRLEEEVFRLAGRSFRLNSRDQLERVLFDELGLPPIGKTEKTGKRSTSAAVLEALREVHPIVDKILQYRELAKLKGTYIDRLPALVHPKTGRLHTRFNQTATATGRLSSSDPNLQNIPVRTPLGQKIRRAFVAEEGWRLVALDYRQIELRVLAHLSGDENLIRVFQEGKDIHTQTASWMFGLSAEAIDPLMRRAAKTINFGVLYGMSAFRLSQELGIPYEEAQAFIQKYFQSYPKVKAWIEKTLREGRTRGSVETLFGRRRYVPDLNARVKGKREAAERMAFNMPVQGTAADLMKLAMVRLFPQLREVGARMLLQVHDELLLEAPKERAEEVAALAKEVMEGVWPLAVPLEVEVGIGEDWLAAKG

SEQ ID NO: 5003 - DNA, 2523 bp, synthetic construct
  misc_feature 1..2523: note = Variant of DNA polymerase I from Thermus sp. strain 2.9
  source 1..2523: mol_type = other DNA
atgcaccatcatcatcatcatggcggtagcggcgtgttaccggtgttcgagcctaaaggtcgcgtgcttctggttgatggccatcatctcgcgtatcgtaacttctttgccctgaaaggattaaccaccagcctgggcgagccggtacagggtgtctacggctttgcaaagtcgctcctgaaagctctgaaagaagacggtgatgtggtgattgttgtctttgatgcgaaagcgccaagttttcgccacgaagcgtacgaagcttacaaagccgggcgtgctccaacgccggaagactttcctcgccaattggcgcttatgaaggaattagtggatttgcttggcctcgaacgcttggaagttcccggtttcgaggcagacgacgtattagcgactctcgcaaagaaagccgaacgtgagggctatgaagtccagatcttgacagcagatcgcgatcttttccagcttttatctccgcgcatctcggtgttacacccggaagggcatcgtatcaccccggaatggctctgggagaaatatggtttgcgtcccgaacaatgggtggattttcgcgccttagcaggcgatccgagcgacaatattccgggagttaaaggtatcggcgagaagacggcgctcaagctccttaaagaatgggggtcgttggagaacttgcttaagaatttagatcaggtcaaaccagagtcagtgcgtgagaagattcttgctcacctcgaagacctcaaattaagccgcgaattgtcccgtgtacgcaccgatttgccgctcgaagttgatttcggtcgccgccgcgaacctgactgggagggtcttaaagcgtttttagagcgtcttgaatttggttcgctcttgcatgaattcggccttttagaaagcccgttactggccgaagaagcaccttggccaccgcccgagggcgcgtttttaggttaccgtttgagtcgcccggaaccgatgtgggccgaattactggctcttgcagcgtctgcccagggacgtgtgtatcgcgcggaagaccctcatggtgcgctccgcggcctcttcgaagtccgtggactccttgccaaagacttagctgttgttgcattgcgcgaaggtcttgatttacctccgactgatgatccatctcttcttgcgtacctcttggacccgtcaaacacgacgcccgaaggcgtagcccgtcgttacggcggcgagtggaccgaagatgcagcgaaacgcgcgttattggccgaacgtttgcacgccaatttattaggacgtttgcaaggcgaggaacgtctcctctggctttacgaagaagtggagaaaccattgagtcgcgtgctcgcgcatatggaagctaccggtgtcaaattagacgtggcgtatttggagaatctcagccttgaagttgctgcccacatgcgccgcttggaggaagaagtattccgtttagcaggccgttcctttcgccttaactctcgcgatcagttagaacgtgtgttgttcgatgaacttggtctccctcctatcggcaagacagagaagaccggtaaacgtagcacttcagcggcggttttagaagctcttcgcgaagtccatcccattgtggacaagatcttgcagtaccgcgaactcgcgaaattgaaaggcacctatattgaccgtcttccggcattagtccacccgaaaacgggacgcctccatacccgcttcaaccaaacagccacggcgaccggtcgtttgtcctcctctgatccaaaccttcagaatattccagtacgtaccccattgggccagaagatccgccgtgcgtttgtagctgaggagggttggcgtttagtggccctcgattatcgtcaaattgaattacgtgtccttgcccatctttctggcgatgagaacctcatccgcgtgtttcaggaaggcaaagacattcacactcaaacggcaagctggatgtttggattatcagctgaagcgatcgatcctttgatgcgtcgtgcagcgaagaccatcaatttcggtgttctctacggtatgagtgcctttcgtttgtcgcaggaattaggcattccctatgaagaagctcaggcgttcattcagaaatactttcaaagctatcccaaagttaaagcatggatcgagaagactctccgtgaaggccgcacacgtggttacgtagagaccttatttggacgtcgccgctatgttcccgatttaaacgctcgcgtgaaaggcaagcgtgaagccgccgaacgcatggcgttcaacatgcctgtacagggcacggcagctgacctcatgaaacttgcaatggtgcgcctttttccacaattgcgtgaagttggtgcccgcatgctcttgcaggtccacgatgaactcttgttagaagcgccaaaagagcgtgcggaagaggtggcagccctcgcgaaagaagttatggaaggcgtgtggcccttagcggtgcctcttgaagtcgaagttggtattggcgaggattggctggctgccaaagga

SEQ ID NO: 5004 - protein, 841 aa, synthetic construct
  REGION 1..841: note = Variant of DNA polymerase I from Thermus sp. strain 2.9
MHHHHHHGGSGVLPVFEPKGRVLLVDGHHLAYRNFFALKGLTTSLGEPVQGVYGFAKSLLKALKEDGDVVIVVFDAKAPSFRHEAYEAYKAGRAPTPEDFPRQLALMKELVDLLGLERLEVPGFEADDVLATLAKKAEREGYEVQILTADRDLFQLLSPRISVLHPEGHRITPEWLWEKYGLRPEQWVDFRALAGDPSDNIPGVKGIGEKTALKLLKEWGSLENLLKNLDQVKPESVREKILAHLEDLKLSRELSRVRTDLPLEVDFGRRREPDWEGLKAFLERLEFGSLLHEFGLLESPLLAEEAPWPPPEGAFLGYRLSRPEPMWAELLALAASAQGRVYRAEDPHGALRGLFEVRGLLAKDLAVVALREGLDLPPTDDPSLLAYLLDPSNTTPEGVARRYGGEWTEDAAKRALLAERLHANLLGRLQGEERLLWLYEEVEKPLSRVLAHMEATGVKLDVAYLENLSLEVAAHMRRLEEEVFRLAGRSFRLNSRDQLERVLFDELGLPPIGKTEKTGKRSTSAAVLEALREVHPIVDKILQYRELAKLKGTYIDRLPALVHPKTGRLHTRFNQTATATGRLSSSDPNLQNIPVRTPLGQKIRRAFVAEEGWRLVALDYRQIELRVLAHLSGDENLIRVFQEGKDIHTQTASWMFGLSAEAIDPLMRRAAKTINFGVLYGMSAFRLSQELGIPYEEAQAFIQKYFQSYPKVKAWIEKTLREGRTRGYVETLFGRRRYVPDLNARVKGKREAAERMAFNMPVQGTAADLMKLAMVRLFPQLREVGARMLLQVHDELLLEAPKERAEEVAALAKEVMEGVWPLAVPLEVEVGIGEDWLAAKG

SEQ ID NO: 5005 - DNA, 2523 bp, synthetic construct
  misc_feature 1..2523: note = Variant of DNA polymerase I from Thermus sp. strain 2.9
  source 1..2523: mol_type = other DNA
atgcaccatcatcatcatcatggcggtagcggcgtgttaccgatgttcgagcctaaaggtcgcgtgcttctggttgatggccatcatctcgcgtatcgtaacttctttgccctgaaaggattaaccaccagcctgggcgagccggtacagggtgtctacggctttgcaaagtcgctcctgaaagctctgaaagaagacggtgatgtggtgattgttgtctttgatgcgaaagcgccaagttttcgccacgaagcgtacgaagcttacaaagccgggcgtgctccaacgccggaagactttcctcgccaattggcgcttatgaaggaattagtggatttgcttggcctcgaacgcttggaagttcccggtttcgaggcagacgacgtattagcgactctcgcaaagaaagccgaacgtgagggctatgaagtccagatcttgacagcagatcgcgatcttttccagcttttatctccgcgcatctcggtgttacacccggtggggcatcgtatcaccccggaatggctctgggagaaatatggtttgcgtcccgaacaatgggtggattttcgcgccttagcaggcgatccgagcgacaatattccgggagttaaaggtatcggcgagaagacggcgctcaagctccttaaagaatgggggtcgttggagaacttgcttaagaatttagatcaggtcaaaccagagtcagtgcgtgagaagattcttgctcacctcgaagacctcaaattaagccgcgaattgtcccgtgtacgcaccgatttgccgctcgaagttgatttcggtcgccgccgcgaacctgactgggagggtcttaaagcgtttttagagcgtcttgaatttggttcgctcttgcatgaattcggccttttagaaagcccgttactggccgaagaagcaccttggccaccgcccgagggcgcgtttttaggttaccgtttgagtcgcccggaaccgatgtgggccgaattactggctcttgcagcgtctgcccagggacgtgtgtatcgcgcggaagaccctcatggtgcgctccgcggcctcttcgaagtccgtggactccttgccaaagacttagctgttgttgcattgcgcgaaggtcttgatttacctccgactgatgatccaatgcttcttgcgtacctcttggacccgtcaaacacgacgcccgaaggcgtagcccgtcgttacggcggcgagtggaccgaagatgcagcgaaacgcgcgttattggccgaacgtttgcacgccaatttattaggacgtttgcaaggcgaggaacgtctcctctggctttacgaagaagtggagaaaccattgagtcgcgtgctcgcgcatatggaagctaccggtgtcaaattagacgtggcgtatttggagaatctcagccttgaagttgctgcccacatgcgccgcttggaggaagaagtattccgtttagcaggccgttcctttcgccttaactctcgcgatcagttagaacgtgtgttgttcgatgaacttggtctccctcctatcggcaagacagagaagaccggtaaacgtagcacttcagcggcggttttagaagctcttcgcgaagtccatcccattgtggacaagatcttgcagtaccgcgaactcgcgaaattgaaaggcacctatattgaccgtcttccggcattagtccacccgaaaacgggacgcctccatacccgcttcaaccaaacagccacggcgaccggtcgtttgtcctcctctgatccaaaccttcagaatattccagtacgtaccccattgggccagaagatccgccgtgcgtttgtagctgaggagggttggcgtttagtggccctcgattatcgtcaaattgaattacgtgtccttgcccatctttctggcgatgagaacctcatccgcgtgtttcaggaaggcaaagacattcacactcaaacggcaagctggatgtttggattatcagctgaagcgatcgatcctttgatgcgtcgtgcagcgaagaccatcaatttcggtgttctctacggtatgagtgcctttcgtttgtcgcaggaattaggcattccctatgaagaagctcaggcgttcattcagaaatactttcaaagctatcccaaagttaaagcatggatcgagaagactctccgtgaaggccgcacacgtggttacgtagagaccttatttggacgtcgccgctatgttcccgatttaaacgctcgcgtgaaaggcaagcgtgaagccgccgaacgcatggcgttcaacatgcctgtacagggcacggcagctgacctcatgaaacttgcaatggtgcgcctttttccacaattgcgtgaagttggtgcccgcatgctcttgcaggtccacgatgaactcttgttagaagcgccaaaagagcgtgcggaagaggtggcagccctcgcgaaagaagttatggaaggcgtgtggcccttagcggtgcctcttgaagtcgaagttggtattggcgaggattggctggctgccaaagga

SEQ ID NO: 5006 - protein, 841 aa, synthetic construct
  REGION 1..841: note = Variant of DNA polymerase I from Thermus sp. strain 2.9
MHHHHHHGGSGVLPMFEPKGRVLLVDGHHLAYRNFFALKGLTTSLGEPVQGVYGFAKSLLKALKEDGDVVIVVFDAKAPSFRHEAYEAYKAGRAPTPEDFPRQLALMKELVDLLGLERLEVPGFEADDVLATLAKKAEREGYEVQILTADRDLFQLLSPRISVLHPVGHRITPEWLWEKYGLRPEQWVDFRALAGDPSDNIPGVKGIGEKTALKLLKEWGSLENLLKNLDQVKPESVREKILAHLEDLKLSRELSRVRTDLPLEVDFGRRREPDWEGLKAFLERLEFGSLLHEFGLLESPLLAEEAPWPPPEGAFLGYRLSRPEPMWAELLALAASAQGRVYRAEDPHGALRGLFEVRGLLAKDLAVVALREGLDLPPTDDPMLLAYLLDPSNTTPEGVARRYGGEWTEDAAKRALLAERLHANLLGRLQGEERLLWLYEEVEKPLSRVLAHMEATGVKLDVAYLENLSLEVAAHMRRLEEEVFRLAGRSFRLNSRDQLERVLFDELGLPPIGKTEKTGKRSTSAAVLEALREVHPIVDKILQYRELAKLKGTYIDRLPALVHPKTGRLHTRFNQTATATGRLSSSDPNLQNIPVRTPLGQKIRRAFVAEEGWRLVALDYRQIELRVLAHLSGDENLIRVFQEGKDIHTQTASWMFGLSAEAIDPLMRRAAKTINFGVLYGMSAFRLSQELGIPYEEAQAFIQKYFQSYPKVKAWIEKTLREGRTRGYVETLFGRRRYVPDLNARVKGKREAAERMAFNMPVQGTAADLMKLAMVRLFPQLREVGARMLLQVHDELLLEAPKERAEEVAALAKEVMEGVWPLAVPLEVEVGIGEDWLAAKG

SEQ ID NO: 5007 - DNA, 2523 bp, synthetic construct
  misc_feature 1..2523: note = Variant of DNA polymerase I from Thermus sp. strain 2.9
  source 1..2523: mol_type = other DNA
atgcaccatcatcatcatcatggcggtagcggcgtgttaccggtgttcgagcataaaggtcgcgtgcttctggttgatggccatcatctcgcgtatcgtaacttctttgccctgaaaggattaaccaccagcctgggcgagccggtacagggtgtctacggctttgcaaagtcgctcctgaaagctctgaaagaagacggtgatgtggtgattgttgtctttgatgcgaaagcgccaagttttcgccacgaagcgtacgaagcttacaaagccgggcgtgctccaacgccggaagactttcctcgccaattggcgcttatgaaggaattagtggatttgcttggcctcgaacgcttggaagttcccggtttcgaggcagacgacgtattagcgactctcgcaaagaaagccgaacgtgagggctatgaagtccagatcttgacagcagatcgcgatcttttccagcttttatctccgcgcatctcggtgttacacccggaagggcatcgtatcaccccggaatggctctgggagaaatatggtttgcgtcccgaacaatgggtggattttcgcgccttagcaggcgataagagcgacaatattccgggagttaaaggtatcggcgagaagacggcgctcaagctccttaaagaatgggggtcgttggagaacttgcttaagaatttagatcaggtcaaaccagagtcagtgcgtgagaagattcttgctcacctcgaagacctcaaattaagccgcgaattgtcccgtgtacgcaccgatttgccgctcgaagttgatttcggtcgccgccgcgaacctgactgggagggtcttaaagcgtttttagagcgtcttgaatttggttcgctcttgcatgaattcggccttttagaaagcccgttactggccgaagaagcaccttggccaccgcccgagggcgcgtttttaggttaccgtttgacccgcccggaaccgatgtgggccgaattactggctcttgcagcgtctgcccagggacgtgtgtatcgcgcggaagaccctcatggtgcgctccgcggcctcttcgaagtccgtggactccttgccaaagacttagctgttgttgcattgcgcgaaggtcttgatttacctccgactgatgatccaatgcttcttgcgtacctcttggacccgtcaaacacgacgcccgaaggcgtagcccgtcgttacggcggcgagtggaccgaagatgcagcgaaacgcgcgttattggccgaacgtttgcacgccaatttattaggacgtttgcaaggcgagaagcgtctcctctggctttacgaagaagtggagaaaccattgagtcgcgtgctcgcgcatatggaagctaccggtgtcaaattagacgtggcgtatttggagaatctcagccttgaagttgctgcccacatgcgccgcttggaggaagaagtagtccgtttagcaggccgttcctttcgccttaactctcgcgatcagttagaacgtgtgttgttcgatgaacttggtctccctcctatcggcaagacagagaagaccggtaaacgtagcacttcagcggcggttttagaagctcttcgcgaagtccatcccattgtggacaagatcttgcagtaccgcgaactcgcgaaattgaaaggcacctatattgaccgtcttccggcattagtccacccgaaaacgggacgcctccatacccgcttcaaccaaacagccacggcgaccggtcgtttgtcctcctctgatccaaaccttcagaatattccagtacgtaccccattgggccagaagatccgccgtgcgtttgtagctgaggagggttggcgtttagtggccctcgattatcgtcaaattgaattacgtgtccttgcccatctttctggcgatgagaacctcatccgcgtgtttcaggaaggcaaagacattcacactcaaacggcaagctggatgtttggattatcagctgaagcgatcgatcctttgatgcgtcgtgcagcgaagaccatcaatttcggtgttctctacggtatgagtgcctttcgtttgtcgcaggaattaggcattccctatgaagaagctcaggcgttcattcagaaatactttcaaagctatcccaaagttaaagcatggatcgagaagactctccgtgaaggccgcacacgtggttacgtagagaccttatttggacgtcgccgctatgttcccgatttaaacgctcgcgtgaaaggcaagcgtgaagccgccgaacgcatggcgttcaacatgcctgtacagggcacggcagctgacctcatgaaacttgcaatggtgcgcctttttccacaattgcgtgaagttggtgcccgcatgctcttgcaggtccacgatgaactcttgttagaagcgccaaaagagcgtgcggaagaggtggcagccctcgcgaaagaagttatggaaggcgtgtggcccttagcggtgcctcttgaagtcgaagttggtattggcgaggattggctggctgccaaagga

SEQ ID NO: 5008 - protein, 841 aa, synthetic construct
  REGION 1..841: note = Variant of DNA polymerase I from Thermus sp. strain 2.9
MHHHHHHGGSGVLPVFEHKGRVLLVDGHHLAYRNFFALKGLTTSLGEPVQGVYGFAKSLLKALKEDGDVVIVVFDAKAPSFRHEAYEAYKAGRAPTPEDFPRQLALMKELVDLLGLERLEVPGFEADDVLATLAKKAEREGYEVQILTADRDLFQLLSPRISVLHPEGHRITPEWLWEKYGLRPEQWVDFRALAGDKSDNIPGVKGIGEKTALKLLKEWGSLENLLKNLDQVKPESVREKILAHLEDLKLSRELSRVRTDLPLEVDFGRRREPDWEGLKAFLERLEFGSLLHEFGLLESPLLAEEAPWPPPEGAFLGYRLTRPEPMWAELLALAASAQGRVYRAEDPHGALRGLFEVRGLLAKDLAVVALREGLDLPPTDDPMLLAYLLDPSNTTPEGVARRYGGEWTEDAAKRALLAERLHANLLGRLQGEKRLLWLYEEVEKPLSRVLAHMEATGVKLDVAYLENLSLEVAAHMRRLEEEVVRLAGRSFRLNSRDQLERVLFDELGLPPIGKTEKTGKRSTSAAVLEALREVHPIVDKILQYRELAKLKGTYIDRLPALVHPKTGRLHTRFNQTATATGRLSSSDPNLQNIPVRTPLGQKIRRAFVAEEGWRLVALDYRQIELRVLAHLSGDENLIRVFQEGKDIHTQTASWMFGLSAEAIDPLMRRAAKTINFGVLYGMSAFRLSQELGIPYEEAQAFIQKYFQSYPKVKAWIEKTLREGRTRGYVETLFGRRRYVPDLNARVKGKREAAERMAFNMPVQGTAADLMKLAMVRLFPQLREVGARMLLQVHDELLLEAPKERAEEVAALAKEVMEGVWPLAVPLEVEVGIGEDWLAAKG

SEQ ID NO: 5009 - DNA, 2523 bp, synthetic construct
  misc_feature 1..2523: note = Variant of DNA polymerase I from Thermus sp. strain 2.9
  source 1..2523: mol_type = other DNA
atgcaccatcatcatcatcatggcggtagcggcgtgttaccggtgttcgagcctaaaggtcgcgtgcttctggttgatggccatcatctcgcgtatcgtaacttctttgccctgaaaggattaaccaccagcctgggcgagccggtacagggtgtctacggctttgcaaagtcgctcctgaaagctctgaaagaagacggtgatgtggtgattgttgtctttgatgcgaaagcgccaagttttcgccacgaagcgtacgaagcttacaaagccgggcgtgctccaacgccggaagactttcctcgccaattggcgcttatgaaggaattagtggatttgcttggcctcgaacgcttggaagttcccggtttcgaggcagacgacgtattagcgactctcgcaaagaaagccgaacgtgagggctatgaagtccagatcttgacagcagatcgcgatcttttccagcttttatctccgcgcatctcggtgttacacccggaagggcatcgtatcaccccggaatggctctgggagaaatatggtttgcgtcccgaacaatgggtggattttcgcgccttagcaggcgatccgagcgacaatattccgggagttaaaggtatcggcgagaagacggcgctcaagctccttaaagaatgggggtcgttggagaacttgcttaagaatttagatcaggtcaaaccagagtcagtgcgtgagaagattcttgctcacctcgaagacctcaaattaagccgcgaattgtcccgtgtacgcaccgatttgccgctcgaagttgatttcggtcgccgccgcgaacctgactgggagggtcttaaagcgtttttagagcgtcttgaatttggttcgctcttgcatgaattcggccttttagaaagcccgttactggccgaagaagcaccttggccaccgcccgagggcgcgtttttaggttaccgtttgagtcgcccggaaccgatgtgggccgaattactggctcttgcagcgtctgcccagggacgtgtgtatcgcgcggaagaccctcatggtgcgctccgcggcctcttcgaagtccgtggactccttgccaaagacttagctgttgttgcattgcgcgaaggtcttgatttacctccgactgatgatccaatgcttcttgcgtacctcttggacccgtcaaacacgacgcccgaaggcgtagcccgtcgttacggcggcgagtggaccgaagatgcagcgaaacgcgcgttattggccgaacgtttgcacgccaatttattaggacgtttgcaaggcgaggaacgtctcctctggctttacgaagaagtggagaaaccattgagtcgcgtgctcgcgcatatggaagctaccggtgtcaaattagacgtggcgtatttggagaatctcagccttgaagttgctgcccacatgcgccgcttggaggaagaagtattccgtttagcaggccgttcctttcgccttaactctcgcgatcagttagaacgtgtgttgttcgatgaacttggtctccctcctatcggcaagacagagaagaccggtaaacgtagcacttcagcggcggttttagaagctcttcgcgaagtccatcccattgtggacaagatcttgcagtaccgcgaactcgcgaaattgaaaggcacctatattgaccgtcttccggcattagtccacccgaaaacgggacgcctccatacccgcttcaaccaaacagccacggcgaccggtcgtttgtcctcctctgatccaaaccttcagaatattccagtacgtaccccattgggccagaagatccgccgtgcgtttgtagctgaggagggttggcgtttagtggccctcgattatcgtcaaattgaattacgtgtccttgcccatctttctggcgatgagaacctcatccgcgtgtttcaggaaggcaaagacattcacactcaaacggcaagctggatgtttggattatcagctgaagcgatcgatcctttgatgcgtcgtgcagcgaagaccatcaatttcggtgttctctacggtatgagtgcctttcgtttgtcgcaggaattaggcattccctatgaagaagctcaggcgttcattcagaaatactttcaaagctatcccaaagttaaagcatggatcgagaagactctccgtgaaggccgcacacgtggttacgtagagaccttatttggacgtcgccgctatgttcccgatttaaacgctcgcgtgaaaggcaagcgtgaagccgccgaacgccatgcgttcaacatgcctgtacagggcacggcagctgacctcatgaaacttgcaatggtgcgcctttttccacaattgcgtgaagttggtgcccgcatgctcttgcaggtccacgatgaactcttgttagaagcgccaaaagagcgtgcggaagaggtggcagccctcgcgaaagaagttatggaaggcgtgtggcccttagcggtgcctcttgaagtcgaagttggtattggcgaggattggctggctgccaaagga

SEQ ID NO: 5010 - protein, 841 aa, synthetic construct
  REGION 1..841: note = Variant of DNA polymerase I from Thermus sp. strain 2.9
MHHHHHHGGSGVLPVFEPKGRVLLVDGHHLAYRNFFALKGLTTSLGEPVQGVYGFAKSLLKALKEDGDVVIVVFDAKAPSFRHEAYEAYKAGRAPTPEDFPRQLALMKELVDLLGLERLEVPGFEADDVLATLAKKAEREGYEVQILTADRDLFQLLSPRISVLHPEGHRITPEWLWEKYGLRPEQWVDFRALAGDPSDNIPGVKGIGEKTALKLLKEWGSLENLLKNLDQVKPESVREKILAHLEDLKLSRELSRVRTDLPLEVDFGRRREPDWEGLKAFLERLEFGSLLHEFGLLESPLLAEEAPWPPPEGAFLGYRLSRPEPMWAELLALAASAQGRVYRAEDPHGALRGLFEVRGLLAKDLAVVALREGLDLPPTDDPMLLAYLLDPSNTTPEGVARRYGGEWTEDAAKRALLAERLHANLLGRLQGEERLLWLYEEVEKPLSRVLAHMEATGVKLDVAYLENLSLEVAAHMRRLEEEVFRLAGRSFRLNSRDQLERVLFDELGLPPIGKTEKTGKRSTSAAVLEALREVHPIVDKILQYRELAKLKGTYIDRLPALVHPKTGRLHTRFNQTATATGRLSSSDPNLQNIPVRTPLGQKIRRAFVAEEGWRLVALDYRQIELRVLAHLSGDENLIRVFQEGKDIHTQTASWMFGLSAEAIDPLMRRAAKTINFGVLYGMSAFRLSQELGIPYEEAQAFIQKYFQSYPKVKAWIEKTLREGRTRGYVETLFGRRRYVPDLNARVKGKREAAERHAFNMPVQGTAADLMKLAMVRLFPQLREVGARMLLQVHDELLLEAPKERAEEVAALAKEVMEGVWPLAVPLEVEVGIGEDWLAAKG

SEQ ID NO: 5011 - DNA, 2523 bp, synthetic construct
  misc_feature 1..2523: note = Variant of DNA polymerase I from Thermus sp. strain 2.9
  source 1..2523: mol_type = other DNA
atgcaccatcatcatcatcatggcggtagcggcgtgttaccggtgttcgagcctaaaggtcgcgtgcttctggttgatggccatcatctcgcgtatcgtaacttctttgccctgaaaggattaaccaccagcctgggcgagccggtacagggtgtctacggctttgcaaagtcgctcctgaaagctctgaaagaagacggtgatgtggtgattgttgtctttgatgcgaaagcgccaagttttcgccacgaagcgtacgaagcttacaaagccgggcgtgctccaacgccggaagactttcctcgccaattggcgcttatgaaggaattagtggatttgcttggcctcgaacgcttggaagttcccggtttcgaggcagacgacgtattagcgactctcgcaaagaaagccgaacgtgagggctatgaagtccagatcttgacagcagatcgcgatcttttccagcttttatctccgcgcatctcggtgttacacccggaagggcatcgtatcaccccggaatggctctgggagaaatatggtttgcgtcccgaacaatgggtggattttcgcgccttagcaggcgatccgagcgacaatattccgggagttaaaggtatcggcgagaagacggcgctcaagctccttaaagaatgggggtcgttggagaacttgcttaagaatttagatcaggtcaaaccagagtcagtgcgtgagaagattcttgctcacctcgaagacctcaaattaagccgcgaattgtcccgtgtacgcaccgatttgccgctcgaagttgatttcggtcgccgccgcgaacctgactgggagggtcttaaagcgtttttagagcgtcttgaatttggttcgctcttgcatgaattcggccttttagaaagcccgttactggccgaagaagcaccttggccaccgcccgagggcgcgtttttaggttaccgtttgagtcgcccggaaccgatgtgggccgaattactggctcttgcagcgtctgcccagggacgtgtgtatcgcgcggaagaccctcatggtgcgctccgcggcctcttcgaagtccgtggactccttgccaaagacttagctgttgttgcattgcgcgaaggtcttgatttacctccgactgatgatccaatgcttcttgcgtacctcttggacccgcgtaacacgacgcccgaaggcgtagcccgtcgttacggcggcgagtggaccgaagatgcagcgaaacgcgcgttattggccgaacgtttgcacgccaatttattaggacgtttgcaaggcgaggaacgtctcctctggctttacgaagaagtggagaaaccattgagtcgcgtgctcgcgcatatggaagctaccggtgtcaaattagacgtggcgtatttggagaatctcagccttgaagttgctgcccacatgcgccgcttggaggaagaagtattccgtttagcaggccgttcctttcgccttaactctcgcgatcagttagaacgtgtgttgttcgatgaacttggtctccctcctatcggcaagacagagaagaccggtaaacgtagcacttcagcggcggttttagaagctcttcgcgaagtccatcccattgtggacaagatcttgcagtaccgcgaactcgcgaaattgaaaggcacctatattgaccgtcttccggcattagtccacccgaaaacgggacgcctccatacccgcttcaaccaaacagccacggcgaccggtcgtttgtcctcctctgatccaaaccttcagaatattccagtacgtaccccattgggccagaagatccgccgtgcgtttgtagctgaggagggttggcgtttagtggccctcgattatcgtcaaattgaattacgtgtccttgcccatctttctggcgatgagaacctcatccgcgtgtttcaggaaggcaaagacattcacactcaaacggcaagctggatgtttggattatcagctgaagcgatcgatcctttgatgcgtcgtgcagcgaagaccatcaatttcggtgttctctacggtatgagtgcctttcgtttgtcgcaggaattaggcattccctatgaagaagctcaggcgttcattcagaaatactttcaaagctatcccaaagttaaagcatggatcgagaagactctccgtgaaggccgcacacgtggttacgtagagaccttatttggacgtcgccgctatgttcccgatttaaacgctcgcgtgaaaggcaagcgtgaagccgccgaacgcatggcgttcaacatgcctgtacagggcacggcagctgacctcatgaaacttgcaatggtgcgcctttttccacaattgcgtgaagttggtgcccgcatgctcttgcaggtccacgatgaactcttgttagaagcgccaaaagagcgtgcggaagaggtggcagccctcgcgaaagaagttatggaaggcgtgtggcccttagcggtgcctcttgaagtcgaagttggtattggcgaggattggctggctgccaaagga

SEQ ID NO: 5012 - protein, 841 aa, synthetic construct
  REGION 1..841: note = Variant of DNA polymerase I from Thermus sp. strain 2.9
MHHHHHHGGSGVLPVFEPKGRVLLVDGHHLAYRNFFALKGLTTSLGEPVQGVYGFAKSLLKALKEDGDVVIVVFDAKAPSFRHEAYEAYKAGRAPTPEDFPRQLALMKELVDLLGLERLEVPGFEADDVLATLAKKAEREGYEVQILTADRDLFQLLSPRISVLHPEGHRITPEWLWEKYGLRPEQWVDFRALAGDPSDNIPGVKGIGEKTALKLLKEWGSLENLLKNLDQVKPESVREKILAHLEDLKLSRELSRVRTDLPLEVDFGRRREPDWEGLKAFLERLEFGSLLHEFGLLESPLLAEEAPWPPPEGAFLGYRLSRPEPMWAELLALAASAQGRVYRAEDPHGALRGLFEVRGLLAKDLAVVALREGLDLPPTDDPMLLAYLLDPRNTTPEGVARRYGGEWTEDAAKRALLAERLHANLLGRLQGEERLLWLYEEVEKPLSRVLAHMEATGVKLDVAYLENLSLEVAAHMRRLEEEVFRLAGRSFRLNSRDQLERVLFDELGLPPIGKTEKTGKRSTSAAVLEALREVHPIVDKILQYRELAKLKGTYIDRLPALVHPKTGRLHTRFNQTATATGRLSSSDPNLQNIPVRTPLGQKIRRAFVAEEGWRLVALDYRQIELRVLAHLSGDENLIRVFQEGKDIHTQTASWMFGLSAEAIDPLMRRAAKTINFGVLYGMSAFRLSQELGIPYEEAQAFIQKYFQSYPKVKAWIEKTLREGRTRGYVETLFGRRRYVPDLNARVKGKREAAERMAFNMPVQGTAADLMKLAMVRLFPQLREVGARMLLQVHDELLLEAPKERAEEVAALAKEVMEGVWPLAVPLEVEVGIGEDWLAAKG

SEQ ID NO: 5013 - DNA, 2523 bp, synthetic construct
  misc_feature 1..2523: note = Variant of DNA polymerase I from Thermus sp. strain 2.9
  source 1..2523: mol_type = other DNA
atgcaccatcatcatcatcatggcggtagcggcgtgttaccggtgttcgagcctaaaggtcgcgtgcttctggttgatggccatcatctcgcgtatcgtaacttctttgccctgaaaggattaaccaccagcctgggcgagccggtacagggtgtctacggctttgcaaagtcgctcctgaaagctctgaaagaagacggtgatgtggtgattgttgtctttgatgcgaaagcgccaagttttcgccacgaagcgtacgaagcttacaaagccgggcgtgctccaacgccggaagactttcctcgccaattggcgcttatgaaggaattagtggatttgcttggcctcgaacgcttggaagttcccggtttcgaggcagacgacgtattagcgactctcgcaaagaaagccgaacgtgagggctatgaagtccagatcttgacagcagatcgcgatcttttccagcttttatctccgcgcatctcggtgttacacccggaagggcatcgtatcaccccggaatggctctgggagaaatatggtttgcgtcccgaacaatgggtggattttcgcgccttagcaggcgatccgagcgacaatattccgggagttaaaggtatcggcgagaagacggcgctcaagctccttaaagaatgggggtcgttggagaacttgcttaagaatttagatcaggtcaaaccagagtcagtgcgtgagaagattcttgctcacctcgaagacctcaaattaagccgcgaattgtcccgtgtacgcaccgatttgccgctcgaagttgatttcggtcgccgccgcgaacctgactgggagggtcttaaagcgtttttagagcgtcttgaatttggttcgctcttgcatgaattcggccttttagaaagcccgttactggccgaagaagcaccttggccaccgcccgagggcgcgtttttaggttaccgtttgagtcgcccggaaccgatgtgggccgaattactggctcttgcagcgtctgcccagggacgtgtgtatcgcgcggaagaccctcatggtgcgctccgcggcctcttcgaagtccgtggactccttgccaaagacttagctgttgttgcattgcgcgaaggtcttgatttacctccgactgatgatccaatgcttcttgcgtacctcttggacccgtcaaacacgacgcccgaaggcgtagcccgtcgttacggcggcgagtggaccgaagatgcagcgaaacgcgcgttattggccgaacgtttgcacgccaatttattaggacgtttgcaaggcgaggaacgtctcctctggctttacgaagaagtggagaaaccattgagtcgcgtgctcgcgcatatggaagctaccggtgtcaaattagacgtggcgtatttggagaatctcagccttgaagttgctgcccacatgcgccgcttggaggaagaagtattccgtttagcaggccgttcctttcgccttaactctcgcgatcagttagaacgtgtgttgttcgatgaacttggtctccctcctatcggcaagacagagaagaccggtaaacgtagcacttcagcggcggttttagaagctcttcgcgaagtccatcccattgtggacaagatcttgcagtaccgcgaactcgcgaaattgaaaggcacctatattgaccgtcttccggcattagtccacccgaaaacgggacgcctccatacccgcttcaaccaaacagccacggcgaccggtcgtttgtcctcctctgatccaaaccttcagaatattccagtacgtaccccattgggccagaagatccgccgtgcgtttgtagctgaggagggttggcgtttagtggccctcgatttgcgtcaaattgaattacgtgtccttgcccatctttctggcgatgagaacctcatccgcgtgtttcaggaaggcaaagacattcacactcaaacggcaagctggatgtttggattatcagctgaagcgatcgatcctttgatgcgtcgtgcagcgaagaccatcaatttcggtgttctctacggtatgagtgcctttcgtttgtcgcaggaattaggcattccctatgaagaagctcaggcgttcattcagaaatactttcaaagctatcccaaagttaaagcatggatcgagaagactctccgtgaaggccgcacacgtggttacgtagagaccttatttggacgtcgccgctatgttcccgatttaaacgctcgcgtgaaaggcaagcgtgaagccgccgaacgcatggcgttcaacatgcctgtacagggcacggcagctgacctcatgaaacttgcaatggtgcgcctttttccacaattgcgtgaagttggtgcccgcatgctcttgcaggtccacgatgaactcttgttagaagcgccaaaagagcgtgcggaagaggtggcagccctcgcgaaagaagttatggaaggcgtgtggcccttagcggtgcctcttgaagtcgaagttggtattggcgaggattggctggctgccaaagga

SEQ ID NO: 5014 - protein, 841 aa, synthetic construct
  REGION 1..841: note = Variant of DNA polymerase I from Thermus sp. strain 2.9
MHHHHHHGGSGVLPVFEPKGRVLLVDGHHLAYRNFFALKGLTTSLGEPVQGVYGFAKSLLKALKEDGDVVIVVFDAKAPSFRHEAYEAYKAGRAPTPEDFPRQLALMKELVDLLGLERLEVPGFEADDVLATLAKKAEREGYEVQILTADRDLFQLLSPRISVLHPEGHRITPEWLWEKYGLRPEQWVDFRALAGDPSDNIPGVKGIGEKTALKLLKEWGSLENLLKNLDQVKPESVREKILAHLEDLKLSRELSRVRTDLPLEVDFGRRREPDWEGLKAFLERLEFGSLLHEFGLLESPLLAEEAPWPPPEGAFLGYRLSRPEPMWAELLALAASAQGRVYRAEDPHGALRGLFEVRGLLAKDLAVVALREGLDLPPTDDPMLLAYLLDPSNTTPEGVARRYGGEWTEDAAKRALLAERLHANLLGRLQGEERLLWLYEEVEKPLSRVLAHMEATGVKLDVAYLENLSLEVAAHMRRLEEEVFRLAGRSFRLNSRDQLERVLFDELGLPPIGKTEKTGKRSTSAAVLEALREVHPIVDKILQYRELAKLKGTYIDRLPALVHPKTGRLHTRFNQTATATGRLSSSDPNLQNIPVRTPLGQKIRRAFVAEEGWRLVALDLRQIELRVLAHLSGDENLIRVFQEGKDIHTQTASWMFGLSAEAIDPLMRRAAKTINFGVLYGMSAFRLSQELGIPYEEAQAFIQKYFQSYPKVKAWIEKTLREGRTRGYVETLFGRRRYVPDLNARVKGKREAAERMAFNMPVQGTAADLMKLAMVRLFPQLREVGARMLLQVHDELLLEAPKERAEEVAALAKEVMEGVWPLAVPLEVEVGIGEDWLAAKG

SEQ ID NO: 5015 - DNA, 2523 bp, synthetic construct
  misc_feature 1..2523: note = Variant of DNA polymerase I from Thermus sp. strain 2.9
  source 1..2523: mol_type = other DNA
atgcaccatcatcatcatcatggcggtagcggcgtgttaccggtgttcgagcctaaaggtcgcgtgcttctggttgatggccatcatctcgcgtatcgtaacttctttgccctgaaaggattaaccaccagcctgggcgagccggtacagggtgtctacggctttgcaaagtcgctcctgaaagctctgaaagaagacggtgatgtggtgattgttgtctttgatgcgaaagcgccaagttttcgccacgaagcgtacgaagcttacaaagccgggcgtgctccaacgccggaagactttcctcgccaattggcgcttatgaaggaattagtggatttgcttggcctcgaacgcttggaagttcccggtttcgaggcagacgacgtattagcgactctcgcaaagaaagccgaacgtgagggctatgaagtccagatcttgacagcagatcgcgatcttttccagcttttatctccgcgcatctcggtgttacacccggaagggcatcgtatcaccccggaatggctctgggagaaatatggtttgcgtcccgaacaatgggtggattttcgcgccttagcaggcgatccgagcgacaatattccgggagttaaaggtatcggcgagaagacggcgctcaagctccttaaagaatgggggtcgttggagaacttgcttaagaatttagatcaggtcaaaccagagtcagtgcgtgagaagattcttgctcacctcgaagacctcaaattaagccgcgaattgtcccgtgtacgcaccgatttgccgctcgaagttgatttcggtcgccgccgcgaacctgactgggagggtcttaaagcgtttttagagcgtcttgaatttggttcgctcttgcatgaattcggccttttagaaagcccgttactggccgaagaagcaccttggccaccgcccgagggcgcgtttttaggttaccgtttgagtcgcccggaaccgatgtgggccgaattactggctcttgcagcgtctgcccagggacgtgtgtatcgcgcggaagaccctcatggtgcgctccgcggcctcttcgaagtccgtggactccttgccaaagacttagctgttgttgcattgcgcgaaggtcttgatttacctccgactgatgatccaatgcttcttgcgtacctcttggacccgtcaaacacgacgcccgaaggcgtagcccgtcgttacggcggcgagtggaccgaagatgcagcgaaacgcgcgttattggccgaacgtttgcacgccaatttattaggacgtttgcaaggcgaggaacgtctcctctggctttacgaagaagtggagaaaccattgagtcgcgtgctcgcgcatatggaagctaccggtgtcaaattagacgtggcgtatttggagaatctcagccttgaagttgctgcccacatgcgccgcttggaggaagaagtattccgtttagcaggccgttcctttcgccttaactctcgcgatcagttagaacgtgtgttgttcgatgaacttggtctccctcctatcggcaagacagagaagaccggtaaacgtagcacttcagcggcggttttagaagctcttcgcgaagtccatcccattgtggacaagatcttgcagtaccgcgaactcgcgaaattgaaaggcacctatattgaccgtcttccggcattagtccacccgaaaacgggacgcctccatacccgcttcaaccaaacagccacggcgaccggtcgtttgtcctcctctgatccaaaccttcagaatattccagtacgtaccccattgggccagaagatccgccgtgcgtttgtagctgaggagggttggcgtttagtggccctcgattatcgtcaaattgaattacgtgtccttgcccatctttctggcgatgagaacctcatccgcgtgtttcaggaaggcaaagacattcacactcaaacggcaagctggatgtttggattatcagctgaagcgatcgatcctttgatgcgtcgtgcagcgaagaccatcaatttcggtgttctctacggtatgagtgcctttcgtttgtcgcaggaattaggcattccctatgaagaagctcaggcgttcattcagaaagtgtttcaaagctatcccaaagttaaagcatggatcgagaagactctccgtgaaggccgcacacgtggttacgtagagaccttatttggacgtcgccgctatgttcccgatttaaacgctcgcgtgaaaggcaagcgtgaagccgccgaacgcatggcgttcaacatgcctgtacagggcacggcagctgacctcatgaaacttgcaatggtgcgcctttttccacaattgcgtgaagttggtgcccgcatgctcttgcaggtccacgatgaactcttgttagaagcgccaaaagagcgtgcggaagaggtggcagccctcgcgaaagaagttatggaaggcgtgtggcccttagcggtgcctcttgaagtcgaagttggtattggcgaggattggctggctgccaaagga

SEQ ID NO: 5016 - protein, 841 aa, synthetic construct
  REGION 1..841: note = Variant of DNA polymerase I from Thermus sp. strain 2.9
MHHHHHHGGSGVLPVFEPKGRVLLVDGHHLAYRNFFALKGLTTSLGEPVQGVYGFAKSLLKALKEDGDVVIVVFDAKAPSFRHEAYEAYKAGRAPTPEDFPRQLALMKELVDLLGLERLEVPGFEADDVLATLAKKAEREGYEVQILTADRDLFQLLSPRISVLHPEGHRITPEWLWEKYGLRPEQWVDFRALAGDPSDNIPGVKGIGEKTALKLLKEWGSLENLLKNLDQVKPESVREKILAHLEDLKLSRELSRVRTDLPLEVDFGRRREPDWEGLKAFLERLEFGSLLHEFGLLESPLLAEEAPWPPPEGAFLGYRLSRPEPMWAELLALAASAQGRVYRAEDPHGALRGLFEVRGLLAKDLAVVALREGLDLPPTDDPMLLAYLLDPSNTTPEGVARRYGGEWTEDAAKRALLAERLHANLLGRLQGEERLLWLYEEVEKPLSRVLAHMEATGVKLDVAYLENLSLEVAAHMRRLEEEVFRLAGRSFRLNSRDQLERVLFDELGLPPIGKTEKTGKRSTSAAVLEALREVHPIVDKILQYRELAKLKGTYIDRLPALVHPKTGRLHTRFNQTATATGRLSSSDPNLQNIPVRTPLGQKIRRAFVAEEGWRLVALDYRQIELRVLAHLSGDENLIRVFQEGKDIHTQTASWMFGLSAEAIDPLMRRAAKTINFGVLYGMSAFRLSQELGIPYEEAQAFIQKVFQSYPKVKAWIEKTLREGRTRGYVETLFGRRRYVPDLNARVKGKREAAERMAFNMPVQGTAADLMKLAMVRLFPQLREVGARMLLQVHDELLLEAPKERAEEVAALAKEVMEGVWPLAVPLEVEVGIGEDWLAAKG

SEQ ID NO: 5017 - DNA, 2523 bp, synthetic construct
  misc_feature 1..2523: note = Variant of DNA polymerase I from Thermus sp. strain 2.9
  source 1..2523: mol_type = other DNA
atgcaccatcatcatcatcatggcggtagcggcgtgttaccggtgttcgagcctaaaggtcgcgtgcttctggttgatggccatcatctcgcgtatcgtaacttctttgccctgaaaggattaaccaccagcctgggcgagccggtacagggtgtctacggctttgcaaagtcgctcctgaaagctctgaaagaagacggtgatgtggtgattgttgtctttgatgcgaaagcgccaagttttcgccacgaagcgtacgaagcttacaaagccgggcgtgctccaacgccggaagactttcctcgccaattggcgcttatgaaggaattagtggatttgcttggcctcgaacgcttggaagttcccggtttcgaggcagacgacgtattagcgactctcgcaaagaaagccgaacgtgagggctatgaagtccagatcttgacagcagatcgcgatcttttccagcttttatctccgcgcatctcggtgttacacccggaagggcatcgtatcaccccggaatggctctgggagaaatatggtttgcgtcccgaacaatgggtggattttcgcgccttagcaggcgatccgagcgacaatattccgggagttaaaggtatcggcgagaagacggcgctcaagctccttaaagaatgggggtcgttggagaacttgcttaagaatttagatcaggtcaaaccagagtcagtgcgtgagaagattcttgctcacctcgaagacctcaaattaagccgcgaattgtcccgtgtacgcaccgatttgccgctcgaagttgatttcggtcgccgccgcgaacctgactgggagggtcttaaagcgtttttagagcgtcttgaatttggttcgctcttgcatgaattcggccttttagaaagcccgttactggccgaagaagcaccttggccaccgcccgagggcgcgtttttaggttaccgtttgagtcgcccggaaccgatgtgggccgaattactggctcttgcagcgtctgcccagggacgtgtgtatcgcgcggaagaccctcatggtgcgctccgcggcctcttcgaagtccgtggactccttgccaaagacttagctgttgttgcattgcgcgaaggtcttgatttacctccgactgatgatccaatgcttcttgcgtacctcttggacccgtcaaacacgacgcccgaaggcgtagcccgtcgttacggcggcgagtggaccgaagatgcagcgaaacgcgcgttattggccgaacgtttgcacgccaatttattaggacgtttgcaaggcgaggaacgtctcctctggctttacgaagaagtggagaaaccattgagtcgcgtgctcgcgcatatggaagctaccggtgtcaaattagacgtggcgtatttggagaatctcagccttgaagttgctgcccacatgcgccgcttggaggaagaagtattccgtttagcaggccgttcctttcgccttaactctcgcgatcagttagaacgtgtgttgttcgatgaacttggtctccctcctatcggcaagacagagaagaccggtaaacgtagcacttcagcggcggttttagaagctcttcgcgaagtccatcccattgtggacaagatcttgcagtaccgcgaactcgcgaaattgaaaggcacctatattgaccgtcttccggcattagtccacccgaaaacgggacgcctccatacccgcttcaaccaaacagccacggcgaccggtcgtttgtcctcctctgatccaaaccttcagaatattccagtacgtaccccattgggccagaagatccgccgtgcgtttgtagctgaggagggttggcgtttagtggccctcgattatcgtcaaattgaattacgtgtccttgcccatctttctggcgatgagaacctcatccgcgtgtttcaggaaggcaaagacattcacactcaaacggcaagctggttgtttggattatcagctgaagcgatcgatcctttgatgcgtcgtgcagcgaagaccatcaatttcggtgttctctacggtatgagtgcctttcgtttgtcgcaggaattaggcattccctatgaagaagctcaggcgttcattcagaaatactttcaaagctatcccaaagttaaagcatggatcgagaagactctccgtgaaggccgcacacgtggttacgtagagaccttatttggacgtcgccgctatgttcccgatttaaacgctcgcgtgaaaggcaagcgtgaagccgccgaacgcatggcgttcaacatgcctgtacagggcacggcagctgacctcatgaaacttgcaatggtgcgcctttttccacaattgcgtgaagttggtgcccgcatgctcttgcaggtccacgatgaactcttgttagaagcgccaaaagagcgtgcggaagaggtggcagccctcgcgaaagaagttatggaaggcgtgtggcccttagcggtgcctcttgaagtcgaagttggtattggcgaggattggctggctgccaaagga

SEQ ID NO: 5018 - protein, 841 aa, synthetic construct
  REGION 1..841: note = Variant of DNA polymerase I from Thermus sp. strain 2.9
MHHHHHHGGSGVLPVFEPKGRVLLVDGHHLAYRNFFALKGLTTSLGEPVQGVYGFAKSLLKALKEDGDVVIVVFDAKAPSFRHEAYEAYKAGRAPTPEDFPRQLALMKELVDLLGLERLEVPGFEADDVLATLAKKAEREGYEVQILTADRDLFQLLSPRISVLHPEGHRITPEWLWEKYGLRPEQWVDFRALAGDPSDNIPGVKGIGEKTALKLLKEWGSLENLLKNLDQVKPESVREKILAHLEDLKLSRELSRVRTDLPLEVDFGRRREPDWEGLKAFLERLEFGSLLHEFGLLESPLLAEEAPWPPPEGAFLGYRLSRPEPMWAELLALAASAQGRVYRAEDPHGALRGLFEVRGLLAKDLAVVALREGLDLPPTDDPMLLAYLLDPSNTTPEGVARRYGGEWTEDAAKRALLAERLHANLLGRLQGEERLLWLYEEVEKPLSRVLAHMEATGVKLDVAYLENLSLEVAAHMRRLEEEVFRLAGRSFRLNSRDQLERVLFDELGLPPIGKTEKTGKRSTSAAVLEALREVHPIVDKILQYRELAKLKGTYIDRLPALVHPKTGRLHTRFNQTATATGRLSSSDPNLQNIPVRTPLGQKIRRAFVAEEGWRLVALDYRQIELRVLAHLSGDENLIRVFQEGKDIHTQTASWLFGLSAEAIDPLMRRAAKTINFGVLYGMSAFRLSQELGIPYEEAQAFIQKYFQSYPKVKAWIEKTLREGRTRGYVETLFGRRRYVPDLNARVKGKREAAERMAFNMPVQGTAADLMKLAMVRLFPQLREVGARMLLQVHDELLLEAPKERAEEVAALAKEVMEGVWPLAVPLEVEVGIGEDWLAAKG

SEQ ID NO: 5019 - DNA, 2523 bp, synthetic construct
  misc_feature 1..2523: note = Variant of DNA polymerase I from Thermus sp. strain 2.9
  source 1..2523: mol_type = other DNA
atgcaccatcatcatcatcatggcggtagcggcgtgttaccggtgttcgagcctaaaggtcgcgtgcttctggttgatggccatcatctcgcgtatcgtaacttctttgccctgaaaggattaaccaccagcctgggcgagccggtacagggtgtctacggctttgcaaagtcgctcctgaaagctctgaaagaagacggtgatgtggtgattgttgtctttgatgcgaaagcgccaagttttcgccacgaagcgtacgaagcttacaaagccgggcgtgctccaacgccggaagactttcctcgccaattggctcttatgaaggaattagtggatttgcttggcctcgaacgcttggaagttcccggtttcgaggcagacgacgtattagcgactctcgcaaagaaagccgaacgtgagggctatgaagtccagatcttgacagcagatcgcgatcttttccagcttttatctccgcgcatctcggtgttacacccggaagggcatcgtatcaccccggaatggctctgggagaaatatggtttgcgtcccgaacaatgggtggattttcgcgccttagcaggcgataagagcgacaatattccgggagttaaaggtatcggcgagaagacggcgctcaagctccttaaagaatgggggtcgttggagaacttgcttaagaatttagatcaggtcaaaccagagtcagtgcgtgagaagattcttgctcacctcgaagacctcaagttaagccgcgaattgtcccgtgtacgcaccgatttgccgctcgaagttgatttcggtcgccgccgcgaacctgactgggagggtcttaaagcgtttttagagcgtcttgaatttggttcgctcctgcatgaattcggccttttagaaagcccgttactggccgaagaagcaccttggccaccgcccgagggcgcgtttttaggttaccgtttgagccgcccggaaccgatgtgggccgaattactggctcttgcagcgtctgcccagggacgtgtgtatcgcgcggaagaccctcatggtgcgctccgcggcctcttcgaagtccgtggactccttgccaaagacttagctgttgttgcattgcgcgaaggtcttgatttacctccgactgatgatccaatgcttcttgcgtacctcttggacccgtcaaacacgacgcccgaaggcgtagcccgtcgttacggcggcgagtggaccgaagatgcagcgaaacgcgcgttattggccgaacgtttgcacgccaatttattaggacgtttgcaaggcgaggagcgtctcctctggctttacgaagaagtggagaaaccattgagtcgcgtgctcgcgcatatggaagctaccggtgtcaaattagacgtggcgtatttggagaatctcagccttgaagttgctgcccacatgcgccgcttggaggaagaagtattccgtttagcaggccgttcctttcgccttaactctcgcgatcagttagaacgtgtgttgttcgatgaacttggtctccctcctatcggcaagacagagaagaccggtaaacgtagcacttcacgtgcggttttagatgctcttcgcgaagtccatcccattgtggacaagatcttgcagtaccgcgaactcgcgaaattgaaaggcacctatattgaccgtcttccggcattagtccacccgaaaacgggacgcctccatacccgcttcaaccaaacagccacggcgaccggtcgtttgtcctcctctgatccaaaccttcagaatattccagtacgtaccccattgggccagaagatccgccgtgcgtttgtagctgaggagggttggcgtttagtggccctcgattatcgtcaaattgaattacgtgtccttgcccatctttctggcgatgagaacctcatccgcgtgtttcaggaaggcaaagacattcacactcaaacggcaagctggatgtttggattaggcgctgaagcgatcgatcctttgatgcgtcgtgcagcgaagaccatcaatttcggtgttctctacggtatgagtgcctttcgtttgtcgcaggagttaggcattccctatgaagaagctcaggcgttcattcagaaatactttcaaagctatcccaaagttaaagcatggatcgagaagactctccgtgaaggccgcacacgtggttacgtagagaccttatttggacgtcgccgctatgttcccgatttaaacggccgcgtgaaaggcaagcgtgaagccgccgaacgcatggcgttcaacatgcctgtacagggcacggcagctgacctcatgaaacttgcaatggtgcgcctttttccacaattgcgtgaagttggtgcccgcatgctcttgcaggtccacgatgaactcttgttagaagcgccaaaagagcgtgcggaagaggtggcagccctcgcgaaagaagttatggaaggcgtgtggcccttagcggtgcctcttgaagtcgaagttggtattggcgaggattggctggctgccaaagga

SEQ ID NO: 5020 - protein, 841 aa, synthetic construct
  REGION 1..841: note = Variant of DNA polymerase I from Thermus sp. strain 2.9
MHHHHHHGGSGVLPVFEPKGRVLLVDGHHLAYRNFFALKGLTTSLGEPVQGVYGFAKSLLKALKEDGDVVIVVFDAKAPSFRHEAYEAYKAGRAPTPEDFPRQLALMKELVDLLGLERLEVPGFEADDVLATLAKKAEREGYEVQILTADRDLFQLLSPRISVLHPEGHRITPEWLWEKYGLRPEQWVDFRALAGDKSDNIPGVKGIGEKTALKLLKEWGSLENLLKNLDQVKPESVREKILAHLEDLKLSRELSRVRTDLPLEVDFGRRREPDWEGLKAFLERLEFGSLLHEFGLLESPLLAEEAPWPPPEGAFLGYRLSRPEPMWAELLALAASAQGRVYRAEDPHGALRGLFEVRGLLAKDLAVVALREGLDLPPTDDPMLLAYLLDPSNTTPEGVARRYGGEWTEDAAKRALLAERLHANLLGRLQGEERLLWLYEEVEKPLSRVLAHMEATGVKLDVAYLENLSLEVAAHMRRLEEEVFRLAGRSFRLNSRDQLERVLFDELGLPPIGKTEKTGKRSTSRAVLDALREVHPIVDKILQYRELAKLKGTYIDRLPALVHPKTGRLHTRFNQTATATGRLSSSDPNLQNIPVRTPLGQKIRRAFVAEEGWRLVALDYRQIELRVLAHLSGDENLIRVFQEGKDIHTQTASWMFGLGAEAIDPLMRRAAKTINFGVLYGMSAFRLSQELGIPYEEAQAFIQKYFQSYPKVKAWIEKTLREGRTRGYVETLFGRRRYVPDLNGRVKGKREAAERMAFNMPVQGTAADLMKLAMVRLFPQLREVGARMLLQVHDELLLEAPKERAEEVAALAKEVMEGVWPLAVPLEVEVGIGEDWLAAKG

SEQ ID NO: 5021 - DNA, 2523 bp, synthetic construct
  misc_feature 1..2523: note = Variant of DNA polymerase I from Thermus sp. strain 2.9
  source 1..2523: mol_type = other DNA
atgcaccatcatcatcatcatggcggtagcggcgtgttaccggtgttcgagcctaaaggtcgcgtgcttctggttgatggccatcatctcgcgtatcgtaacttctttgccctgaaaggattaaccaccagcctgggcgagccggtacagggtgtctacggctttgcaaagtcgctcctgaaagctctgaaagaagacggtgatgtggtgattgttgtctttgatgcgaaagcgccaagttttcgccacgaagcgtacgaagcttacaaagccgggcgtgctccaacgccggaagactttcctcgccaattggcgcttatgaaggaattagtggatttgcttggcctcgaacgcttggaagttcccggtttcgaggcagacgacgtattagcgactctcgcaaagaaagccgaacgtgagggctatgaagtccagatcttgacagcagatcgcgatcttttccagcttttatctccgcgcatctcggtgttacacccggaagggcatcgtatcaccccggaatggctctgggagaaatatggtttgcgtcccgaacaatgggtggattttcgcgccttagcaggcgatccgagcgacaatattccgggagttaaaggtatcggcgagaagacggcgctcaagctccttaaagaatgggggtcgttggagaacttgcttaagaatttagatcaggtcaaaccagagtcagtgcgtgagaagattcttgctcacctcgaagacctcaaattaagccgcgaattgtcccgtgtacgcaccgatttgccgctcgaagttgatttcggtcgccgccgcgaacctgactgggagggtcttaaagcgtttttagagcgtcttgaatttggttcgctcttgcatgaattcggccttttagaaagcccgttagtggccgaagaagcaccttggccaccgcccgagggcgcgtttttaggttaccgtttgagtcgcccggaaccgatgtgggccgaattactggctcttgcagcgtctgcccagggacgtgtgtatcgcgcggaagaccctcatggtgcgctccgcggcctcttcgaagtccgtggactccttgccaaagacttagctgttgttgcattgcgcgaaggtcttgatttacctccgactgatgatccaatgcttcttgcgtacctcttggacccgtcaaacacgacgcccgaaggcgtagcccgtcgttacggcggcgagtggaccgaagatgcagcgaaacgcgcgttattggccgaacgtttgcacgccaatttattaggacgtttgcaaggcgaggaacgtctcctctggctttacgaagaagtggagaaaccattgagtcgcgtgctcgcgcatatggaagctaccggtgtcaaattagacgtggcgtatttggagaatctcagccttgaagttgctgcccacatgcgccgcttggaggaagaagtattccgtttagcaggccgttcctttcgccttaactctcgcgatcagttagaacgtgtgttgttcgatgaacttggtctccctcctatcggcaagacagagaagaccggtaaacgtagcacttcagcagcggttttagaggctcttcgcgaagtccatcccattgtggacaagatcttgcagtaccgcgaactggcgaaattgaaaggcacctatattgaccgtcttccggcattagtccacccgaaaacgggacgcctccatacccgcttcaaccaaacagccacggcgaccggtcgtttgtcctcctctgatccaaaccttcagaatattccagtacgtaccccattgggccagaagatccgccgtgcgtttgtagctgaggagggttggcgtttagtggccctcgattatcgtcaaattgaattacgtgtccttgcccatctttctggcgatgagaacctcatccgcgtgtttcaggaaggcaaagacattcacactcaaacggcaagctggatgtttggattatcagctgaagcgatcgatcctttgatgcgtcgtgcagcgaagaccatcaatttcggtgttctctacggtatgagtccatttcgtttgtcgcaggaattaggcattcccaaggaagaagctcaggcgttcattcagaaatactttcaaagctatcccaaagttaaagcatggatcgagaagactctccgtgaaggccgcacacgtggttacgtagagaccttatttggacgtcgccgctatgttcccgatttaaacgctcgcgtgaaaggcaagcgtgaagccgccgaacgcatggcgttcaacatgcctgtacagggcacggcagctgacctcatgaaacttgcaatggtgcgcctttttccacaattgcgtgaagttggtgcccgcatgctcttgcaggtccacgatgaactcttgttagaagcgccaaaagagcgtgcggaagaggtggcagccctcgcgaaagaagttatggaaggcgtgtggcccttagcggtgcctcttgaagtcgaagttggtattggcgaggattggctggctgccaaagga

SEQ ID NO: 5022 - protein, 841 aa, synthetic construct
  REGION 1..841: note = Variant of DNA polymerase I from Thermus sp. strain 2.9
MHHHHHHGGSGVLPVFEPKGRVLLVDGHHLAYRNFFALKGLTTSLGEPVQGVYGFAKSLLKALKEDGDVVIVVFDAKAPSFRHEAYEAYKAGRAPTPEDFPRQLALMKELVDLLGLERLEVPGFEADDVLATLAKKAEREGYEVQILTADRDLFQLLSPRISVLHPEGHRITPEWLWEKYGLRPEQWVDFRALAGDPSDNIPGVKGIGEKTALKLLKEWGSLENLLKNLDQVKPESVREKILAHLEDLKLSRELSRVRTDLPLEVDFGRRREPDWEGLKAFLERLEFGSLLHEFGLLESPLVAEEAPWPPPEGAFLGYRLSRPEPMWAELLALAASAQGRVYRAEDPHGALRGLFEVRGLLAKDLAVVALREGLDLPPTDDPMLLAYLLDPSNTTPEGVARRYGGEWTEDAAKRALLAERLHANLLGRLQGEERLLWLYEEVEKPLSRVLAHMEATGVKLDVAYLENLSLEVAAHMRRLEEEVFRLAGRSFRLNSRDQLERVLFDELGLPPIGKTEKTGKRSTSAAVLEALREVHPIVDKILQYRELAKLKGTYIDRLPALVHPKTGRLHTRFNQTATATGRLSSSDPNLQNIPVRTPLGQKIRRAFVAEEGWRLVALDYRQIELRVLAHLSGDENLIRVFQEGKDIHTQTASWMFGLSAEAIDPLMRRAAKTINFGVLYGMSPFRLSQELGIPKEEAQAFIQKYFQSYPKVKAWIEKTLREGRTRGYVETLFGRRRYVPDLNARVKGKREAAERMAFNMPVQGTAADLMKLAMVRLFPQLREVGARMLLQVHDELLLEAPKERAEEVAALAKEVMEGVWPLAVPLEVEVGIGEDWLAAKG

SEQ ID NO: 5023 - DNA, 2523 bp, synthetic construct
  misc_feature 1..2523: note = Variant of DNA polymerase I from Thermus sp. strain 2.9
  source 1..2523: mol_type = other DNA
atgcaccatcatcatcatcatggcggtagcggcgtgttaccggtgttcgagcctaaaggtcgcgtgcttctggttgatggccatcatctcgcgtatcgtaacttctttgccctgaaaggattaaccaccagcctgggcgagccggtacagggtgtctacggctttgcaaagtcgctcctgaaagctctgaaagaagacggtgatgtggtgattgttgtctttgatgcgaaagcgccaagttttcgccacgaagcgtacgaagcttacaaagccgggcgtgctccaacgccggaagactttcctcgccaattggcgcttatgaaggaattagtggatttgcttggcctcgaacgcttggaagttcccggtttcgaggcagacgacgtattagcgactctcgcaaagaaagccgaacgtgagggctatgaagtccagatcttgacagcagatcgcgatcttttccagcttttatctccgcgcatctcggtgttacacccggaagggcatcgtatcaccccggaatggctctgggagaaatatggtttgcgtcccgaacaatgggtggattttcgcgccttagcaggcgataagagcgacaatattccgggagttaaaggtatcggcgagaagacggcgctcaagctccttaaagaatgggggtcgttggagaacttgcttaagaatttagatcaggtcaaaccagagtcagtgcgtgagaagattcttgctcacctcgaagacctcaaattaagccgcgaattgtcccgtgtacgcaccgatttgccgctcgaagttgatttcggtcgccgccgcgaacctgactgggagggtcttaaagcgtttttagagcgtcttgaatttggttcgctcttgcatgaattcggccttttagaaagcccgttactggccgaagaagcaccttggccaccgcccgagggcgcgtttttaggttaccgtttgagtcgcccggaaccgatgtgggccgaattactggctcttgcagcgtctgcccagggacgtgtgtatcgcgcggaagaccctcatggtgcgctccgcggcctcttcgaagtccgtggactccttgccaaagacttagctgttgttgcattgcgcgaaggtcttgatttacctccgactgatgatccaatgcttcttgcgtacctcttggacccgtcaaacacgacgcccgaaggcgtagcccgtcgttacggcggcgagtggaccgaagatgcagcgaaacgcgcgttattggccgaacgtttgcacgccaatttattaggacgtttgcaaggcgaggaacgtctcctctggctttacgaagaagtggagaaaccattgagtcgcgtgctcgcgcatatggaagctaccggtgtcaaattagacgtggcgtatttggagaatctcagccttgaagttgctgcccacatgcgccgcttggaggaagaagtattccgtttagcaggccgttcctttcgccttaactctcgcgatcagttagaacgtgtgttgttcgatgaacttggtctccctcctatcggcaagacagagaagaccggtaaacgtagcacttcagcggcggttttagaagctcttcgcgaagtccatcccattgtggacaagatcttgcagtaccgcgaaatggcgaaattgaaaggcacctatattgaccgtcttccggcattagtccacccgaaaacgggacgcctccatacccgcttcaaccaaacagccacggcgaccggtcgtttgtcctcctctgatccaaaccttcagaatattccagtacgtaccccattgggccagaagatccgccgtgcgtttgtagctgaggagggttggcgtttagtggccctcgattatcgtcaaattgaattacgtgtccttgcccatctttctggcgatgagaacctcatccgcgtgtttcaggaaggcaaagacattcacactcaaacggcaagctggatgtttggattatcagctgaagcgatcgatcctttgatgcgtcgtgcagcgaagaccatcaatttcggtgttctctacggtatgagtgcctttcgtttgtcgcaggaattaggcattccctatgaagaagctcaggcgttcattcagaaatactttcaaagctatcccaaagttaaagcatggatcgagaagactctccgtgaaggccgcacacgtggttacgtagagaccttatttggacgtcgccgctatgttcccgatttaaacgctcgcgtgaaaggcaagcgtgaagccgccgaacgcatggcgttcaacatgcctgtacagggcacggcagctgacctcatgaaacttgcaatggtgcgcctttttccacaattgcgtgaagttggtgcccgcatgctcttgcaggtccatgatgaactcttgctggaagcgccaaaagagcgtgcggaagaggtggcagccctcgcgaaagaagttatggaaggcgtgtggcccttagcggtgcctcttgaagtcgaagttggtattggcgaggattggctggctgccaaagga

SEQ ID NO: 5024 - protein, 841 aa, synthetic construct
  REGION 1..841: note = Variant of DNA polymerase I from Thermus sp. strain 2.9
MHHHHHHGGSGVLPVFEPKGRVLLVDGHHLAYRNFFALKGLTTSLGEPVQGVYGFAKSLLKALKEDGDVVIVVFDAKAPSFRHEAYEAYKAGRAPTPEDFPRQLALMKELVDLLGLERLEVPGFEADDVLATLAKKAEREGYEVQILTADRDLFQLLSPRISVLHPEGHRITPEWLWEKYGLRPEQWVDFRALAGDKSDNIPGVKGIGEKTALKLLKEWGSLENLLKNLDQVKPESVREKILAHLEDLKLSRELSRVRTDLPLEVDFGRRREPDWEGLKAFLERLEFGSLLHEFGLLESPLLAEEAPWPPPEGAFLGYRLSRPEPMWAELLALAASAQGRVYRAEDPHGALRGLFEVRGLLAKDLAVVALREGLDLPPTDDPMLLAYLLDPSNTTPEGVARRYGGEWTEDAAKRALLAERLHANLLGRLQGEERLLWLYEEVEKPLSRVLAHMEATGVKLDVAYLENLSLEVAAHMRRLEEEVFRLAGRSFRLNSRDQLERVLFDELGLPPIGKTEKTGKRSTSAAVLEALREVHPIVDKILQYREMAKLKGTYIDRLPALVHPKTGRLHTRFNQTATATGRLSSSDPNLQNIPVRTPLGQKIRRAFVAEEGWRLVALDYRQIELRVLAHLSGDENLIRVFQEGKDIHTQTASWMFGLSAEAIDPLMRRAAKTINFGVLYGMSAFRLSQELGIPYEEAQAFIQKYFQSYPKVKAWIEKTLREGRTRGYVETLFGRRRYVPDLNARVKGKREAAERMAFNMPVQGTAADLMKLAMVRLFPQLREVGARMLLQVHDELLLEAPKERAEEVAALAKEVMEGVWPLAVPLEVEVGIGEDWLAAKG

SEQ ID NO: 5025 - DNA, 2523 bp, synthetic construct
  misc_feature 1..2523: note = Variant of DNA polymerase I from Thermus sp. strain 2.9
  source 1..2523: mol_type = other DNA
atgcaccatcatcatcatcatggcggtagcggcgtgttaccggtgttcgagcctaaaggtcgcgtgcttctggttgatggccatcatctcgcgtatcgtaacttctttgccctgaaaggattaaccaccagcctgggcgagccggtacagggtgtctacggctttgcaaagtcgctcctgaaagctctgaaagaagacggtgatgtggtgattgttgtctttgatgcgaaagcgccaagttttcgccacgaagcgtacgaagcttacaaagccgggcgtgctccaacgccggaagactttcctcgccaattggcgcttatgaaggaattagtggatttgcttggcctcgaacgcttggaagttcccggtttcgaggcagacgacgtattagcgactctcgcaaagaaagccgaacgtgagggctatgaagtccagatcttgacagcagatcgcgatcttttccagcttttatctccgcgcatctcggtgttacacccggaagggcatcgtatcaccccggaatggctctgggagaaatatggtttgcgtcccgaacaatgggtggattttcgcgccttagcaggcgatccgagcgacaatattccgggagttaaaggtatcggcgagaagacggcgctcaagctccttaaagaatgggggtcgttggagaacttgcttaagaatttagatcaggtcaaaccagagtcagtgcgtgagaagattcttgctcacctcgaagacctcaaattaagccgcgaattgtcccgtgtacgcaccgatttgccgctcgaagttgatttcggtcgccgccgcgaacctgactgggagggtcttaaagcgtttttagagcgtcttgaatttggttcgctcttgcatgaattcggccttttagaaagcccgttactggccgaagaagcaccttggccaccgcccgagggcgcgtttttaggttaccgtttgagtcgcccggaaccgatgtgggccgaattactggctcttgcagcgtctgcccagggacgtgtgtatcgcgcggaagaccctcatggtgcgctccgcggcctcttcgaagtccgtggactccttgccaaagacttagctgttgttgcattgcgcgaaggtcttgatttacctccgactgatgatccaatgcttcttgcgtacctcttggacccgtcaaacacgacgcccgaaggcgtagcccgtcgttacggcggcgagtggaccgaagatgcagcgaaacgcgcgttattggccgaacgtttgcacgccaatttattaggacgtttgcaaggcgaggaacgtctcctctggctttacgaagaagtggagaaaccattgagtcgcgtgctcgcgcatatggaagctaccggtgtcaaattagacgtggcgtatttggagaatctcagccttgaagttgctgcccacatgcgccgcttggaggaagaagtattccgtttagcaggccgttcctttcgccttaactctcgcgatcagttagaacgtgtgttgttcgatgaacttggtctccctcctatcggcaagacagagaagaccggtaaacgtagcacttcagcggcggttttagaagctcttcgcgaagtccatcccattgtggacaagatcttgcagtaccgcgaactcgcgaaattgaaaggcacctatattgaccgtcttccggcattagtccacccgaaaacgggacgcctccatacccgcttcaaccaaacagccacggcgaccggtcgtttgtcctcctctgatccaaactttcagaatattccagtacgtaccccattgggccagaagatccgccgtgcgtttgtagctgaggagggttggcgtttagtggccctcgattatcgtcaaattgaattacgtgtccttgcccatctttctggcgatgagaacctcatccgcgtgtttcaggaaggcaaagacattcacactcaaacggcaagctggatgtttggattatcagctgaagcgatcgatcctttgatgcgtcgtgcagcgaagaccatcaatttcggtgttctctacggtatgagtgcctttcgtttgtcgcaggaattaggcattccctatgaagaagctcaggcgttcattcagaaatactttcaaagctatcccaaagttaaagcatggatcgagaagactctccgtgaaggccgcacacgtggttacgtagagaccttatttggacgtcgccgctatgttcccgatttaaacgctcgcgtgaaaggcaagcgtgaagccgccgaacgcatggcgttcaacatgcctgtacagggcacggcagctgacctcatgaaacttgcaatggtgcgcctttttccacaattgcgtgaagttggtgcccgcatgctcttgcaggtccacgatgaactcttgttagaagcgccaaaagagcgtgcggaagaggtggcagccctcgcgaaagaagttatggaaggcgtgtggcccttagcggtgcctcttgaagtcgaagttggtattggcgaggattggctggctgccaaagga

SEQ ID NO: 5026 - protein, 841 aa, synthetic construct
  REGION 1..841: note = Variant of DNA polymerase I from Thermus sp. strain 2.9
MHHHHHHGGSGVLPVFEPKGRVLLVDGHHLAYRNFFALKGLTTSLGEPVQGVYGFAKSLLKALKEDGDVVIVVFDAKAPSFRHEAYEAYKAGRAPTPEDFPRQLALMKELVDLLGLERLEVPGFEADDVLATLAKKAEREGYEVQILTADRDLFQLLSPRISVLHPEGHRITPEWLWEKYGLRPEQWVDFRALAGDPSDNIPGVKGIGEKTALKLLKEWGSLENLLKNLDQVKPESVREKILAHLEDLKLSRELSRVRTDLPLEVDFGRRREPDWEGLKAFLERLEFGSLLHEFGLLESPLLAEEAPWPPPEGAFLGYRLSRPEPMWAELLALAASAQGRVYRAEDPHGALRGLFEVRGLLAKDLAVVALREGLDLPPTDDPMLLAYLLDPSNTTPEGVARRYGGEWTEDAAKRALLAERLHANLLGRLQGEERLLWLYEEVEKPLSRVLAHMEATGVKLDVAYLENLSLEVAAHMRRLEEEVFRLAGRSFRLNSRDQLERVLFDELGLPPIGKTEKTGKRSTSAAVLEALREVHPIVDKILQYRELAKLKGTYIDRLPALVHPKTGRLHTRFNQTATATGRLSSSDPNFQNIPVRTPLGQKIRRAFVAEEGWRLVALDYRQIELRVLAHLSGDENLIRVFQEGKDIHTQTASWMFGLSAEAIDPLMRRAAKTINFGVLYGMSAFRLSQELGIPYEEAQAFIQKYFQSYPKVKAWIEKTLREGRTRGYVETLFGRRRYVPDLNARVKGKREAAERMAFNMPVQGTAADLMKLAMVRLFPQLREVGARMLLQVHDELLLEAPKERAEEVAALAKEVMEGVWPLAVPLEVEVGIGEDWLAAKG

SEQ ID NO: 5027 - DNA, 2523 bp, synthetic construct
  misc_feature 1..2523: note = Variant of DNA polymerase I from Thermus sp. strain 2.9
  source 1..2523: mol_type = other DNA
atgcaccatcatcatcatcatggcggtagcggcgtgttaccggtgttcgagcctaaaggtcgcgtgcttctggttgatggccatcatctcgcgtatcgtaacttctttgccctgaaaggattaaccaccagcctgggcgagccggtacagggtgtctacggctttgcaaagtcgctcctgaaagctctgaaagaagacggtgatgtggtgattgttgtctttgatgcgaaagcgccaagttttcgccacgaagcgtacgaagcttacaaagccgggcgtgctccaacgccggaagactttcctcgccaattggcgcttatgaaggaattagtggatttgcttggcctcgaacgcttggaagttcccggtttcgaggcagacgacgtattagcgactctcgcaaagaaagccgaacgtgagggctatgaagtccagatcttgacagcagatcgcgatcttttccagcttttatctccgcgcatctcggtgttacacccggaagggcatcgtatcaccccggaatggctctgggagaaatatggtttgcgtcccgaacaatgggtggattttcgcgccttagcaggcgatccgagcgacaatattccgggagttaaaggtatcggcgagaagacggcgctcaagctccttaaagaatgggggtcgttggagaacttgcttaagaatttagatcaggtcaaaccagagtcagtgcgtgagaagattcttgctcacctcgaagacctcaaattaagccgcgaattgtcccgtgtacgcaccgatttgccgctcgaagttgatttcggtcgccgccgcgaacctgactgggagggtcttaaagcgtttttagagcgtcttgaatttggttcgctcttgcatgaattcggccttttagaaagcccgttactggccgaagaagcaccttggccaccgcccgagggcgcgtttttaggttaccgtttgagtcgcccggaaccgatgtgggccgaattactggctcttgcagcgtctgcccagggacgtgtgtatcgcgcggaagaccctcatggtgcgctccgcggcctcttcgaagtccgtggactccttgccacggacttagctgttgttgcattgcgcgaaggtcttgatttacctccgactgatgatccaatgcttcttgcgtacctcttggacccgtcaaacacgacgcccgaaggcgtagcccgtcgttacggcggcgagtggaccgaagatgcagcgaaacgcgcgttattggccgaacgtttgcacgccaatttattaggacgtttgcaaggcgaggaacgtctcctctggctttacgaagaagtggagaaaccattgagtcgcgtgctcgcgcatatggaagctaccggtgtcaaattagacgtggcgtatttggagaatctcagccttgaagttgctgcccacatgcgccgcttggaggaagaagtattccgtttagcaggccgttcctttcgccttaactctcgcgatcagttagaacgtgtgttgttcgatgaacttggtctccctcctatcggcaagacagagaagaccggtaaacgtagcacttcagcggcggttttagaagctcttcgcgaagtccatcccattgtggacaagatcttgcagtaccgcgaactcgcgaaattgaaaggcacctatattgaccgtcttccggcattagtccacccgaaaacgggacgcctccatacccgcttcaaccaaacagccacggcgaccggtcgtttgtcctcctctgatccaaaccttcagaatattccagtacgtaccccattgggccagaagatccgccgtgcgtttgtagctgaggagggttggcgtttagtggccctcgattatcgtcaaattgaattacgtgtccttgcccatctttctggcgatgagaacctcatccgcgtgtttcaggaaggcaaagacattcacactcaaacggcaagctggatgtttggattatcagctgaagcgatcgatcctttgatgcgtcgtgcagcgaagaccatcaatttcggtgttctctacggtatgagtgcctttcgtttgtcgcaggaattaggcattccctatgaagaagctcaggcgttcattcagaaatactttcaaagctatcccaaagttaaagcatggatcgagaagactctccgtgaaggccgcacacgtggttacgtagagaccttatttggacgtcgccgctatgttcccgatttaaacgctcgcgtgaaaggcaagcgtgaagccgccgaacgcatggcgttcaacatgcctgtacagggcacggcagctgacctcatgaaacttgcaatggtgcgcctttttccacaattgcgtgaagttggtgcccgcatgctcttgcaggtccacgatgaactcttgttagaagcgccaaaagagcgtgcggaagaggtggcagccctcgcgaaagaagttatggaaggcgtgtggcccttagcggtgcctcttgaagtcgaagttggtattggcgaggattggctggctgccaaagga

SEQ ID NO: 5028 - protein, 841 aa, synthetic construct
  REGION 1..841: note = Variant of DNA polymerase I from Thermus sp. strain 2.9
MHHHHHHGGSGVLPVFEPKGRVLLVDGHHLAYRNFFALKGLTTSLGEPVQGVYGFAKSLLKALKEDGDVVIVVFDAKAPSFRHEAYEAYKAGRAPTPEDFPRQLALMKELVDLLGLERLEVPGFEADDVLATLAKKAEREGYEVQILTADRDLFQLLSPRISVLHPEGHRITPEWLWEKYGLRPEQWVDFRALAGDPSDNIPGVKGIGEKTALKLLKEWGSLENLLKNLDQVKPESVREKILAHLEDLKLSRELSRVRTDLPLEVDFGRRREPDWEGLKAFLERLEFGSLLHEFGLLESPLLAEEAPWPPPEGAFLGYRLSRPEPMWAELLALAASAQGRVYRAEDPHGALRGLFEVRGLLATDLAVVALREGLDLPPTDDPMLLAYLLDPSNTTPEGVARRYGGEWTEDAAKRALLAERLHANLLGRLQGEERLLWLYEEVEKPLSRVLAHMEATGVKLDVAYLENLSLEVAAHMRRLEEEVFRLAGRSFRLNSRDQLERVLFDELGLPPIGKTEKTGKRSTSAAVLEALREVHPIVDKILQYRELAKLKGTYIDRLPALVHPKTGRLHTRFNQTATATGRLSSSDPNLQNIPVRTPLGQKIRRAFVAEEGWRLVALDYRQIELRVLAHLSGDENLIRVFQEGKDIHTQTASWMFGLSAEAIDPLMRRAAKTINFGVLYGMSAFRLSQELGIPYEEAQAFIQKYFQSYPKVKAWIEKTLREGRTRGYVETLFGRRRYVPDLNARVKGKREAAERMAFNMPVQGTAADLMKLAMVRLFPQLREVGARMLLQVHDELLLEAPKERAEEVAALAKEVMEGVWPLAVPLEVEVGIGEDWLAAKG

SEQ ID NO: 5029 - DNA, 2523 bp, synthetic construct
  misc_feature 1..2523: note = Variant of DNA polymerase I from Thermus sp. strain 2.9
  source 1..2523: mol_type = other DNA
atgcaccatcatcatcatcatggcggtagcggcgtgttaccggtgttcgagcctaaaggtcgcgtgcttctggttgatggccatcatctcgcgtatcgtaacttctttgccctgaaaggattaaccaccagcctgggcgagccggtacagggtgtctacggctttgcaaagtcgctcctgaaagctctgaaagaagacggtgatgtggtgattgttgtctttgatgcgaaagcgccaagttttcgccacgaagcgtacgaagcttacaaagccgggcgtgctccaacgccggaagactttcctcgccaattggcgcttatgaaggaattagtggatttgcttggcctcgaacgcttggaagttcccggtttcgaggcagacgacgtattagcgactctcgcaaagaaagccgaacgtgagggctatgaagtccagatcttgacagcagatcgcgatcttttccagcttttatctccgcgcatctcggtgttacacccggaagggcatcgtatcaccccggaatggctctgggagaaatatggtttgcgtcccgaacaatgggtggattttcgcgccttagcaggcgatccgagcgacaatattccgggagttaaaggtatcggcgagaagacggcgctcaagctccttaaagaatgggggtcgttggagaacttgcttaagaatttagatcaggtcaaaccagagtcagtgcgtgagaagattcttgctcacctcgaagacctcaaattaagccgcgaattgtcccgtgtacgcaccgatttgccgctcgaagttgatttcggtcgccgccgcgaacctgactgggagggtcttaaagcgtttttagagcgtcttgaatttggttcgctcttgcatgaattcggccttttagaaagcccgttactggccgaagaagcaccttggccaccgcccgagggcgcgtttttaggttaccgtttgagtcgcccggaaccgatgtgggccgaattactggctcttgcagcgtctgcccagggacgtgtgtatcgcgcggaagaccctcatggtgcgctccgcggcctcttcgaagtccgtggactccttgccaaagacttagctgttgttgcattgcgcgaaggtcttgatttacctccgactgatgatccaatgcttcttgcgtacctcttggacccgtcaaacacgacgcccgaaggcgtagcccgtcgttacggcggcgagtggaccgaagatgcagcgaaacgcgcgttattggccgaacgtttgcacgccaatttattaggacgtttgcaaggcgaggaacgtctcctctggctttacgaagaagtggagaaaccattgagtcgcgtgctcgcgcatatggaagctaccggtgtcaaattagacgtggcgtatttggagaatctcagccttgaagttgctgcccacatgcgccgcttggaggaagaagtattccgtttagcaggccgttcctttcgccttaactctcgcgatcagttagaacgtgtgttgttcgatgaacttggtctccctcctatcggcaagacagagaagaccggtaaacgtagcacttcagcggcggttttagaagctcttcgcgaagtccatcccattgtggacaagatcttgcagtaccgcgaactcgcgaaattgaaaggcacctatattgaccgtcagccggcattagtccacccgaaaacgggacgcctccatacccgcttcaaccaaacagccacggcgaccggtcgtttgtcctcctctgatccaaaccttcagaatattccagtacgtaccccattgggccagaagatccgccgtgcgtttgtagctgaggagggttggcgtttagtggccctcgattatcgtcaaattgaattacgtgtccttgcccatctttctggcgatgagaacctcatccgcgtgtttcaggaaggcaaagacattcacactcaaacggcaagctggatgtttggattatcagctgaagcgatcgatcctttgatgcgtcgtgcagcgaagaccatcaatttcggtgttctctacggtatgagtgcctttcgtttgtcgcaggaattaggcattccctatgaagaagctcaggcgttcattcagaaatactttcaaagctatcccaaagttaaagcatggatcgagaagactctccgtgaaggccgcacacgtggttacgtagagaccttatttggacgtcgccgctatgttcccgatttaaacgctcgcgtgaaaggcaagcgtgaagccgccgaacgcatggcgttcaacatgcctgtacagggcacggcagctgacctcatgaaacttgcaatggtgcgcctttttccacaattgcgtgaagttggtgcccgcatgctcttgcaggtccacgatgaactcttgttagaagcgccaaaagagcgtgcggaagaggtggcagccctcgcgaaagaagttatggaaggcgtgtggcccttagcggtgcctcttgaagtcgaagttggtattggcgaggattggctggctgccaaagga

SEQ ID NO: 5030 - protein, 841 aa, synthetic construct
  REGION 1..841: note = Variant of DNA polymerase I from Thermus sp. strain 2.9
MHHHHHHGGSGVLPVFEPKGRVLLVDGHHLAYRNFFALKGLTTSLGEPVQGVYGFAKSLLKALKEDGDVVIVVFDAKAPSFRHEAYEAYKAGRAPTPEDFPRQLALMKELVDLLGLERLEVPGFEADDVLATLAKKAEREGYEVQILTADRDLFQLLSPRISVLHPEGHRITPEWLWEKYGLRPEQWVDFRALAGDPSDNIPGVKGIGEKTALKLLKEWGSLENLLKNLDQVKPESVREKILAHLEDLKLSRELSRVRTDLPLEVDFGRRREPDWEGLKAFLERLEFGSLLHEFGLLESPLLAEEAPWPPPEGAFLGYRLSRPEPMWAELLALAASAQGRVYRAEDPHGALRGLFEVRGLLAKDLAVVALREGLDLPPTDDPMLLAYLLDPSNTTPEGVARRYGGEWTEDAAKRALLAERLHANLLGRLQGEERLLWLYEEVEKPLSRVLAHMEATGVKLDVAYLENLSLEVAAHMRRLEEEVFRLAGRSFRLNSRDQLERVLFDELGLPPIGKTEKTGKRSTSAAVLEALREVHPIVDKILQYRELAKLKGTYIDRQPALVHPKTGRLHTRFNQTATATGRLSSSDPNLQNIPVRTPLGQKIRRAFVAEEGWRLVALDYRQIELRVLAHLSGDENLIRVFQEGKDIHTQTASWMFGLSAEAIDPLMRRAAKTINFGVLYGMSAFRLSQELGIPYEEAQAFIQKYFQSYPKVKAWIEKTLREGRTRGYVETLFGRRRYVPDLNARVKGKREAAERMAFNMPVQGTAADLMKLAMVRLFPQLREVGARMLLQVHDELLLEAPKERAEEVAALAKEVMEGVWPLAVPLEVEVGIGEDWLAAKG

SEQ ID NO: 5031 - DNA, 2523 bp, synthetic construct
  misc_feature 1..2523: note = Variant of DNA polymerase I from Thermus sp. strain 2.9
  source 1..2523: mol_type = other DNA
atgcaccatcatcatcatcatggcggtagcggcgtgttaccggtgttcgagcctaaaggtcgcgtgcttctggttgatggccatcatctcgcgtatcgtaacttctttgccctgaaaggattaaccaccagcctgggcgagccggtacagggtgtctacggctttgcaaagtcgctcctgaaagctctgaaagaagacggtgatgtggtgattgttgtctttgatgcgaaagcgccaagttttcgccacgaagcgtacgaagcttacaaagccgggcgtgctccaacgccggaagactttcctcgccaattggcgcttatgaaggaattagtggatttgcttggcctcgaacgcttggaagttcccggtttcgaggcagacgacgtattagcgactctcgcaaagaaagccgaacgtgagggctatgaagtccagatcttgacagcagatcgcgatcttttccagcttttatctccgcgcatctcggtgttacacccggaagggcatcgtatcaccccggaatggctctgggagaaatatggtttgcgtcccgaacaatgggtggattttcgcgccttagcaggcgatccgagcgacaatattccgggagttaaaggtatcggcgagaagacggcgctcaagctccttaaagaatgggggtcgttggagaacttgcttaagaatttagatcaggtcaaaccagagtcagtgcgtgagaagattcttgctcacctcgaagacctcaaattaagccgcgaattgtcccgtgtacgcaccgatttgccgctcgaagttgatttcggtcgccgccgcgaacctgactgggagggtcttaaagcgtttttagagcgtcttgaatttggttcgctcttgcatgaattcggccttttagaaagcccgttactggccgaagaagcaccttggccaccgcccgagggcgcgtttttaggttaccgtttgagtcgcccggaaccgatgtgggccgaattactggctcttgcagcgtctgcccagggacgtgtgtatcgcgcggaagaccctcatggtgcgctccgcggcctcttcgaagtccgtggactccttgccaaagacttagctgttgttgcattgcgcgaaggtcttgatttacctccgactgatgatccaatgcttcttgcgtacctcttggacccgtcaaacacgacgcccgaaggcgtagcccgtcgttacggcggcgagtggaccgaagatgcagcgaaacgcgcgttattggccgaacgtttgcacgccaatttattaggacgtttgcaaggcgaggaacgtctcctctggctttacgaagaagtggagaaaccattgagtcgcgtgctcgcgcatatggaagctaccggtgtcaaattagacgtggcgtatttggagaatgggagccttgaagttgctgcccacatgcgccgcttggaggaagaagtattccgtttagcaggccgttcctttcgccttaactctcgcgatcagttagaacgtgtgttgttcgatgaacttggtctccctcctatcggcaagacagagaagaccggtaaacgtagcacttcagcggcggttttagaagctcttcgcgaagtccatcccattgtggacaagatcttgcagtaccgcgaactcgcgaaattgaaaggcacctatattgaccgtcttccggcattagtccacccgaaaacgggacgcctccatacccgcttcaaccaaacagccacggcgaccggtcgtttgtcctcctctgatccaaaccttcagaatattccagtacgtaccccattgggccagaagatccgccgtgcgtttgtagctgaggagggttggcgtttagtggccctcgattatcgtcaaattgaattacgtgtccttgcccatctttctggcgatgagaacctcatccgcgtgtttcaggaaggcaaagacattcacactcaaacggcaagctggatgtttggattatcagctgaagcgatcgatcctttgatgcgtcgtgcagcgaagaccatcaatttcggtgttctctacggtatgagtgcctttcgtttgtcgcaggaattaggcattccctatgaagaagctcaggcgttcattcagaaatactttcaaagctatcccaaagttaaagcatggatcgagaagactctccgtgaaggccgcacacgtggttacgtagagaccttatttggacgtcgccgctatgttcccgatttaaacgctcgcgtgaaaggcaagcgtgaagccgccgaacgcatggcgttcaacatgcctgtacagggcacggcagctgacctcatgaaacttgcaatggtgcgcctttttccacaattgcgtgaagttggtgcccgcatgctcttgcaggtccacgatgaactcttgttagaagcgccaaaagagcgtgcggaagaggtggcagccctcgcgaaagaagttatggaaggcgtgtggcccttagcggtgcctcttgaagtcgaagttggtattggcgaggattggctggctgccaaagga

SEQ ID NO: 5032 - protein, 841 aa, synthetic construct
  REGION 1..841: note = Variant of DNA polymerase I from Thermus sp. strain 2.9
MHHHHHHGGSGVLPVFEPKGRVLLVDGHHLAYRNFFALKGLTTSLGEPVQGVYGFAKSLLKALKEDGDVVIVVFDAKAPSFRHEAYEAYKAGRAPTPEDFPRQLALMKELVDLLGLERLEVPGFEADDVLATLAKKAEREGYEVQILTADRDLFQLLSPRISVLHPEGHRITPEWLWEKYGLRPEQWVDFRALAGDPSDNIPGVKGIGEKTALKLLKEWGSLENLLKNLDQVKPESVREKILAHLEDLKLSRELSRVRTDLPLEVDFGRRREPDWEGLKAFLERLEFGSLLHEFGLLESPLLAEEAPWPPPEGAFLGYRLSRPEPMWAELLALAASAQGRVYRAEDPHGALRGLFEVRGLLAKDLAVVALREGLDLPPTDDPMLLAYLLDPSNTTPEGVARRYGGEWTEDAAKRALLAERLHANLLGRLQGEERLLWLYEEVEKPLSRVLAHMEATGVKLDVAYLENGSLEVAAHMRRLEEEVFRLAGRSFRLNSRDQLERVLFDELGLPPIGKTEKTGKRSTSAAVLEALREVHPIVDKILQYRELAKLKGTYIDRLPALVHPKTGRLHTRFNQTATATGRLSSSDPNLQNIPVRTPLGQKIRRAFVAEEGWRLVALDYRQIELRVLAHLSGDENLIRVFQEGKDIHTQTASWMFGLSAEAIDPLMRRAAKTINFGVLYGMSAFRLSQELGIPYEEAQAFIQKYFQSYPKVKAWIEKTLREGRTRGYVETLFGRRRYVPDLNARVKGKREAAERMAFNMPVQGTAADLMKLAMVRLFPQLREVGARMLLQVHDELLLEAPKERAEEVAALAKEVMEGVWPLAVPLEVEVGIGEDWLAAKG

SEQ ID NO: 5033 - DNA, 2523 bp, synthetic construct
  misc_feature 1..2523: note = Variant of DNA polymerase I from Thermus sp. strain 2.9
  source 1..2523: mol_type = other DNA
atgcaccatcatcatcatcatggcggtagcggcgtgttaccggtgttcgagcctaaaggtcgcgtgcttctggttgatggccatcatctcgcgtatcgtaacttctttgccctgaaaggattaaccaccagcctgggcgagccggtacagggtgtctacggctttgcaaagtcgctcctgaaagctctgaaagaagacggtgatgtggtgattgttgtctttgatgcgaaagcgccaagttttcgccacgaagcgtacgaagcttacaaagccgggcgtgctccaacgccggaagactttcctcgccaattggcgcttatgaaggaattagtggatttgcttggcctcgaacgcttggaagttcccggtttcgaggcagacgacgtattagcgactctcgcaaagaaagccgaacgtgagggctatgaagtccagatcttgacagcagatcgcgatcttttccagcttttatctccgcgcatctcggtgttacacccggaagggcatcgtatcaccccggaatggctctgggagaaatatggtttgcgtcccgaacaatgggtggattttcgcgccttagcaggcgatccgagcgacaatattccgggagttaaaggtatcggcgagaagacggcgctcaagctccttaaagaatgggggtcgttggagaacttgcttaagaatttagatcaggtcaaaccagagtcagtgcgtgagaagattcttgctcacctcgaagacctcaaattaagccgcgaattgtcccgtgtacgcaccgatttgccgctcgaagttgatttcggtcgccgccgcgaacctgactgggagggtcttaaagcgtttttagagcgtcttgaatttggttcgctcttgcatgaattcggccttttagaaagcccgttagtggccgaagaagcaccttggccaccgcccgagggcgcgtttttaggttaccgtttgagtcgcccggaaccgatgtgggccgaattactggctcttgcagcgtctgcccagggacgtgtgtatcgcgcggaagaccctcatggtgcgctccgcggcctcttcgaagtccgtggactccttgccaaagacttagctgttgttgcattgcgcgaaggtcttgatttacctccgactgatgatccaatgcttcttgcgtacctcttggacccgtcaaacacgacgcccgaaggcgtagcccgtcgttacggcggcgagtggaccgaagatgcagcgaaacgcgcgttattggccgaacgtttgcacgaaaatttattaggacgtttgcaaggcgaggaacgtctcctctggctttacgaagaagtggagaaaccattgagtcgcgtgctcgcgcatatggaagctaccggtgtcaaattagacgtggcgtatttggagaatctcagccttgaagttgctgcccacatgcgccgcttggaggaagaagtattccgtttagcaggccgttcctttcgccttaactctcgcgatcagttagaacgtgtgttgttcgatgaacttggtctccctcctatcggcaagacagagaagaccggtaaacgtagcacttcacgcgcggttttagacgctcttcgcgaagtccatcccattgtggacaagatcttgcagtaccgcgaactcgcgaaattgaaaggcacctatattgaccgtcttccggcattagtccacccgaaaacgggacgcctccatacccgcttcaaccaaacagccacggcgaccggtcgtttgtcctcctctgatccaaaccttcagaatattccagtacgtaccccattgggccagaagatccgccgtgcgtttgtagctgaggagggttggcgtttagtggccctcgattatcgtcaaattgaattacgtgtccttgcccatctttctggcgatgagaacctcatccgcgtgtttcaggaaggcaaagacattcacactcaaacggcaagctggatgtttggattatcagctgaagcgatcgatcctttgatgcgtcgtgcagcgaagaccatcaatttcggtgttctctacggtatgagtgcctttcgtttgtcgcaggaattaggcattccctatgaagaagctcaggcgttcattcagaaatactttcaaagctatcccaaagttaaagcatggatcgagaagactctccgtgaaggccgcacacgtggttacgtagagaccttatttggacgtcgccgctatgttcccgatttaaacgctcgcgtgaaaggcaagcgtgaagccgccgaacgcatggcgttcaacatgcctgtacagggcacggcagctgacctcatgaaacttgcaatggtgcgcctttttccacaattgcgtgaagttggtgcccgcatgctcttgcaggtccacgatgaactcttgttagaagcgccaaaagagcgtgcggaagaggtggcagccctcgcgaaagaagttatggaaggcgtgtggcccttagcggtgcctcttgaagtcgaagttggtattggcgaggattggctggctgccaaagga

SEQ ID NO: 5034 - protein, 841 aa, synthetic construct
  REGION 1..841: note = Variant of DNA polymerase I from Thermus sp. strain 2.9
MHHHHHHGGSGVLPVFEPKGRVLLVDGHHLAYRNFFALKGLTTSLGEPVQGVYGFAKSLLKALKEDGDVVIVVFDAKAPSFRHEAYEAYKAGRAPTPEDFPRQLALMKELVDLLGLERLEVPGFEADDVLATLAKKAEREGYEVQILTADRDLFQLLSPRISVLHPEGHRITPEWLWEKYGLRPEQWVDFRALAGDPSDNIPGVKGIGEKTALKLLKEWGSLENLLKNLDQVKPESVREKILAHLEDLKLSRELSRVRTDLPLEVDFGRRREPDWEGLKAFLERLEFGSLLHEFGLLESPLVAEEAPWPPPEGAFLGYRLSRPEPMWAELLALAASAQGRVYRAEDPHGALRGLFEVRGLLAKDLAVVALREGLDLPPTDDPMLLAYLLDPSNTTPEGVARRYGGEWTEDAAKRALLAERLHENLLGRLQGEERLLWLYEEVEKPLSRVLAHMEATGVKLDVAYLENLSLEVAAHMRRLEEEVFRLAGRSFRLNSRDQLERVLFDELGLPPIGKTEKTGKRSTSRAVLDALREVHPIVDKILQYRELAKLKGTYIDRLPALVHPKTGRLHTRFNQTATATGRLSSSDPNLQNIPVRTPLGQKIRRAFVAEEGWRLVALDYRQIELRVLAHLSGDENLIRVFQEGKDIHTQTASWMFGLSAEAIDPLMRRAAKTINFGVLYGMSAFRLSQELGIPYEEAQAFIQKYFQSYPKVKAWIEKTLREGRTRGYVETLFGRRRYVPDLNARVKGKREAAERMAFNMPVQGTAADLMKLAMVRLFPQLREVGARMLLQVHDELLLEAPKERAEEVAALAKEVMEGVWPLAVPLEVEVGIGEDWLAAKG

SEQ ID NO: 5035 - DNA, 2523 bp, synthetic construct
  misc_feature 1..2523: note = Variant of DNA polymerase I from Thermus sp. strain 2.9
  source 1..2523: mol_type = other DNA
atgcaccatcatcatcatcatggcggtagcggcgtgttaccggtgttcgagcctaaaggtcgcgtgcttctggttgatggccatcatctcgcgtatcgtaacttctttgccctgaaaggattaaccaccagcctgggcgagccggtacagggtgtctacggctttgcaaagtcgctcctgaaagctctgaaagaagacggtgatgtggtgattgttgtctttgatgcgaaagcgccaagttttcgccacgaagcgtacgaagcttacaaagccgggcgtgctccaacgccggaagactttcctcgccaattggcgcttatgaaggaattagtggatttgcttggcctcgaacgcttggaagttcccggtttcgaggcagacgacgtattagcgactctcgcaaagaaagccgaacgtgagggctatgaagtccagatcttgacagcagatcgcgatcttttccagcttttatctccgcgcatctcggtgttacacccggaagggcatcgtatcaccccggaatggctctgggagaaatatggtttgcgtcccgaacaatgggtggattttcgcgccttagcaggcgatccgagcgacaatattccgggagttaaaggtatcggcgagaagacggcgctcaagctccttaaagaatgggggtcgttggagaacttgcttaagaatttagatcaggtcaaaccagagtcagtgcgtgagaagattcttgctcacctcgaagacctcaaattaagccgcgaattgtcccgtgtacgcaccgatttgccgctcgaagttgatttcggtcgccgccgcgaacctgactgggagggtcttaaagcgtttttagagcgtcttgaatttggttcgctccagcatgaattcggccttttagaaagcccgttactggccgaagaagcaccttggccaccgcccgagggcgcgtttttaggttaccgtttgagtcgcccggaaccgatgtgggccgaattactggctcttgcagcgtctgcccagggacgtgtgtatcgcgcggaagaccctcatggtgcgctccgcggcctcttcgaagtccgtggactccttgccaaagacttagctgttgttgcattgcgcgaaggtcttgatttacctccgactgatgatccaatgcttcttgcgtacctcttggacccgtcaaacacgacgcccgaaggcgtagcccgtcgttacggcggcgagtggaccgaagatgcagcgaaacgcgcgttattggccgaacgtttgcacgaaaatttattaggacgtttgcaaggcgaggaacgtctcctctggctttacgaagaagtggagaaaccattgagtcgcgtgctcgcgcatatggaagctaccggtgtcaaattagacgtggcgtatttggagaatctcagccttgaagttgctgcccacatgcgccgcttggaggaagaagtattccgtttagcaggccgttcctttcgccttaactctcgcgatcagttagaacgtgtgttgttcgatgaacttggtctccctcctatcggcaagacagagaagaccggtaaacgtagcacttcacgcgcggttttagaggctcttcgcgaagtccatcccattgtggacaagatcttgcagtaccgcgaactggcgaaattgaaaggcacctatattgaccgtcttccggcattagtccacccgaaaacgggacgcctccatacccgcttcaaccaaacagccacggcgaccggtcgtttgtcctcctctgatccaaaccttcagaatattccagtacgtaccccattgggccagaagatccgccgtgcgtttgtagctgaggagggttggcgtttagtggccctcgattatcgtcaaattgaattacgtgtccttgcccatctttctggcgatgagaacctcatccgcgtgtttcaggaaggcaaagacattcacactcaaacggcaagctggatgtttggattaagtgctgaagcgatcgatcctttgatgcgtcgtgcagcgaagaccatcaatttcggtgttctctacggtatgagtgcctttcgtttgtcgcaggaattaggcattccctatgaagaagctcaggcgttcattcagaaatactttcaaagctatcccaaagttaaagcatggatcgagaagactctccgtgaaggccgcacacgtggttacgtagagaccttatttggacgtcgccgctatgttcccgatttaaacgctcgcgtgaaaggcaagcgtgaagccgccgaacgcatggcgttcaacatgcctgtacagggcacggcagctgacctcatgaaacttgcaatggtgcgcctttttccacaattgcgtgaagttggtgcccgcatgctcttgcaggtccacgatgaactcttgttagaagcgccaaaagagcgtgcggaagaggtggcagccctcgcgaaagaagttatggaaggcgtgtggcccttagcggtgcctcttgaagtcgaagttggtattggcgaggattggctggctgccaaagga

SEQ ID NO: 5036 - protein, 841 aa, synthetic construct
  REGION 1..841: note = Variant of DNA polymerase I from Thermus sp. strain 2.9
MHHHHHHGGSGVLPVFEPKGRVLLVDGHHLAYRNFFALKGLTTSLGEPVQGVYGFAKSLLKALKEDGDVVIVVFDAKAPSFRHEAYEAYKAGRAPTPEDFPRQLALMKELVDLLGLERLEVPGFEADDVLATLAKKAEREGYEVQILTADRDLFQLLSPRISVLHPEGHRITPEWLWEKYGLRPEQWVDFRALAGDPSDNIPGVKGIGEKTALKLLKEWGSLENLLKNLDQVKPESVREKILAHLEDLKLSRELSRVRTDLPLEVDFGRRREPDWEGLKAFLERLEFGSLQHEFGLLESPLLAEEAPWPPPEGAFLGYRLSRPEPMWAELLALAASAQGRVYRAEDPHGALRGLFEVRGLLAKDLAVVALREGLDLPPTDDPMLLAYLLDPSNTTPEGVARRYGGEWTEDAAKRALLAERLHENLLGRLQGEERLLWLYEEVEKPLSRVLAHMEATGVKLDVAYLENLSLEVAAHMRRLEEEVFRLAGRSFRLNSRDQLERVLFDELGLPPIGKTEKTGKRSTSRAVLEALREVHPIVDKILQYRELAKLKGTYIDRLPALVHPKTGRLHTRFNQTATATGRLSSSDPNLQNIPVRTPLGQKIRRAFVAEEGWRLVALDYRQIELRVLAHLSGDENLIRVFQEGKDIHTQTASWMFGLSAEAIDPLMRRAAKTINFGVLYGMSAFRLSQELGIPYEEAQAFIQKYFQSYPKVKAWIEKTLREGRTRGYVETLFGRRRYVPDLNARVKGKREAAERMAFNMPVQGTAADLMKLAMVRLFPQLREVGARMLLQVHDELLLEAPKERAEEVAALAKEVMEGVWPLAVPLEVEVGIGEDWLAAKG

SEQ ID NO: 5037 - DNA, 2523 bp, synthetic construct
  misc_feature 1..2523: note = Variant of DNA polymerase I from Thermus sp. strain 2.9
  source 1..2523: mol_type = other DNA
atgcaccatcatcatcatcatggcggtagcggcgtgttaccggtgttcgagcctaaaggtcgcgtgcttctggttgatggccatcatctcgcgtatcgtaacttctttgccctgaaaggattaaccaccagcctgggcgagccggtacagggtgtctacggctttgcaaagtcgctcctgaaagctctgaaagaagacggtgatgtggtgattgttgtctttgatgcgaaagcgccaagttttcgccacgaagcgtacgaagcttacaaagccgggcgtgctccaacgccggaagactttcctcgccaattggcgcttatgaaggaattagtggatttgcttggcctcgaacgcttggaagttcccggtttcgaggcagacgacgtattagcgactctcgcaaagaaagccgaacgtgagggctatgaagtccagatcttgacagcagatcgcgatcttttccagcttttatctccgcgcatctcggtgttacacccggaagggcatcgtatcaccccggaatggctctgggagaaatatggtttgcgtcccgaacaatgggtggattttcgcgccttagcaggcgatccgagcgacaatattccgggagttaaaggtatcggcgagaagacggcgctcaagctccttaaagaatgggggtcgttggagaacttgcttaagaatttagatcaggtcaaaccagagtcagtgcgtgagaagattcttgctcacctcgaagacctcaagttaagccgcgaattgtcccgtgtacgcaccgatttgccgctcgaagttgatttcggtcgccgccgcgaacctgactgggagggtcttaaagcgtttttagagcgtcttgaatttggttcgctccagcatgaattcggccttttagaaagcccgttactggccgaagaagcaccttggccaccgcccgagggcgcgtttttaggttaccgtttgagtcgcccggaaccgatgtgggccgaattactggctcttgcagcgtctgcccagggacgtgtgtatcgcgcggaagaccctcatggtgcgctccgcggcctcttcgaagtccgtggactccttgccaaagacttagctgttgttgcattgcgcgaaggtcttgatttacctccgactgatgatccaatgcttcttgcgtacctcttggacccgtcaaacacgacgcccgaaggcgtagcccgtcgttacggcggcgagtggaccgaagatgcagcgaaacgcgcgttattggccgaacgtttgcacgcgaatttactgggacgtttgcaaggcgaggagcgtctcctctggctttacgaagaagtggagaaaccattgagtcgcgtgctcgcgcatatggaagctaccggtgtcaaattagacgtggcgtatttggagaatctcagccttgaagttgctgcccacatgcgccgcttggaggaagaagtagtccgtttagcaggccgttcctttcgccttaactctcgcgatcagttagaacgtgtgttgttcgatgaacttggtctccctcctatcggcaagacagagaagaccggtaaacgtagcacttcagcggcggttttagaagctcttcgcgaagtccatcccattgtggacaagatcttgcagtaccgcgaactcgcgaaattgaaaggcacctatattgaccgtcttccggcattagtccacccgaaaacgggacgcctccatacccgcttcaaccaaacagccacggcgaccggtcgtttgtcctcctctgatccaaaccttcagaatattccagtacgtaccaaattgggccagaagatccgccgtgcgtttgtagctgaggagggttggcgtttagtggccctcgattatcgtcaaattgaattacgtgtccttgcccatctttctggcgatgagaacctcatccgcgtgtttgaagaaggcaaagacattcacactcaaacggcaagctggatgtttggattatcagctgaagcgatcgatcctttgatgcgtcgtgcagcgaagaagatcaatttcggtgttctctacggtatgagtgcatttcgtttgtcgcaggaattaggcattccctatgaagaagctcaggcgttcattcagaaatactttcaaagctatcccaaagttaaagcatggatcgagaagactctccgtgaaggccgcacccgtggttacgtagagaccttatttggacgtcgccgctatgttcccgatttaaacggccgcgtgaaaggcaagcgtgaagccgccgaacgcatggcgttcaacatgcctgtacagggcacggcagctgacctcatgaaacttgcaatggtgcgcctttttccacaattgcgtgaagttggtgcccgcatgctcttgcaggtccatgatgaactcttgttcgaagcgccaaaagagcgtgcggaagaggtggcagccctcgcgaaagaagttatggaaggcgtgtggcccttagcggtgcctcttgaagtcgaagttggtattggcgaggattggctggctgccaaagga

SEQ ID NO: 5038 - protein, 841 aa, synthetic construct
  REGION 1..841: note = Variant of DNA polymerase I from Thermus sp. strain 2.9
MHHHHHHGGSGVLPVFEPKGRVLLVDGHHLAYRNFFALKGLTTSLGEPVQGVYGFAKSLLKALKEDGDVVIVVFDAKAPSFRHEAYEAYKAGRAPTPEDFPRQLALMKELVDLLGLERLEVPGFEADDVLATLAKKAEREGYEVQILTADRDLFQLLSPRISVLHPEGHRITPEWLWEKYGLRPEQWVDFRALAGDPSDNIPGVKGIGEKTALKLLKEWGSLENLLKNLDQVKPESVREKILAHLEDLKLSRELSRVRTDLPLEVDFGRRREPDWEGLKAFLERLEFGSLQHEFGLLESPLLAEEAPWPPPEGAFLGYRLSRPEPMWAELLALAASAQGRVYRAEDPHGALRGLFEVRGLLAKDLAVVALREGLDLPPTDDPMLLAYLLDPSNTTPEGVARRYGGEWTEDAAKRALLAERLHANLLGRLQGEERLLWLYEEVEKPLSRVLAHMEATGVKLDVAYLENLSLEVAAHMRRLEEEVVRLAGRSFRLNSRDQLERVLFDELGLPPIGKTEKTGKRSTSAAVLEALREVHPIVDKILQYRELAKLKGTYIDRLPALVHPKTGRLHTRFNQTATATGRLSSSDPNLQNIPVRTKLGQKIRRAFVAEEGWRLVALDYRQIELRVLAHLSGDENLIRVFEEGKDIHTQTASWMFGLSAEAIDPLMRRAAKKINFGVLYGMSAFRLSQELGIPYEEAQAFIQKYFQSYPKVKAWIEKTLREGRTRGYVETLFGRRRYVPDLNGRVKGKREAAERMAFNMPVQGTAADLMKLAMVRLFPQLREVGARMLLQVHDELLFEAPKERAEEVAALAKEVMEGVWPLAVPLEVEVGIGEDWLAAKG

SEQ ID NO: 5039 - DNA, 2523 bp, synthetic construct
  misc_feature 1..2523: note = Variant of DNA polymerase I from Thermus sp. strain 2.9
  source 1..2523: mol_type = other DNA
atgcaccatcatcatcatcatggcggtagcggcgtgttaccggtgttcgagcctaaaggtcgcgtgcttctggttgatggccatcatctcgcgtatcgtaacttctttgccctgaaaggattaaccaccagcctgggcgagccggtacagggtgtctacggctttgcaaagtcgctcctgaaagctctgaaagaagacggtgatgtggtgattgttgtctttgatgcgaaagcgccaagttttcgccacgaagcgtacgaagcttacaaagccgggcgtgctccaacgccggaagactttcctcgccaattggcgcttatgaaggaattagtggatttgcttggcctcgaacgcttggaagttcccggtttcgaggcagacgacgtattagcgactctcgcaaagaaagccgaacgtgagggctatgaagtccagatcttgacagcagatcgcgatcttttccagcttttatctccgcgcatctcggtgttacacccggaagggcatcgtatcaccccggaatggctctgggagaaatatggtttgcgtcccgaacaatgggtggattttcgcgccttagcaggcgataagagcgacaatattccgggagttaaaggtatcggcgagaagacggcgctcaagctccttaaagaatgggggtcgttggagaacttgcttaagaatttagatcaggtcaaaccagagtcagtgcgtgagaagattcttgctcacctcgaagacctcaaattaagccgcgaattgtcccgtgtacgcaccgatttgccgctcgaagttgatttcggtcgccgccgcgaacctgactgggagggtcttaaagcgtttttagagcgtcttgaatttggttcgctcttgcatgaattcggccttttagaaagcccgttactggccgaagaagcaccttggccaccgcccgagggcgcgtttttaggttaccgtttgagtcgcccggaaccgatgtgggccgaattactggctcttgcagcgtctgcccagggacgtgtgtatcgcgcggaagaccctcatggtgcgctccgcggcctcttcgaagtccgtggactccttgccaaagacttagctgttgttgcattgcgcgaaggtcttgatttacctccgactgatgatccaatgcttcttgcgtacctcttggacccgtcaaacacgacgcccgaaggcgtagcccgtcgttacggcggcgagtggaccgaagatgcagcgaaacgcgcgttattggccgaacgtttgcacgccaatttattaggacgtttgcaaggcgaggagcgtctcctctggctttacgaagaagtggagaaaccattgagtcgcgtgctcgcgcatatggaagctaccggtgtcaaattagacgtggcgtatttggagaatctcagccttgaagttgctgcccacatgcgccgcttggaggaagaagtattccgtttagcaggccgttcctttcgccttaactctcgcgatcagttagaacgtgtgttgttcgatgaacttggtctccctcctatcggcaagacagagaagaccggtaaacgtagcacttcagcggcggttttagaagctcttcgcgaagtccatcccattgtggacaagatcttgcagtaccgcgaactcgcgaaattgaaaggcacctatattgaccgtcttccggcattagtccacccgaaaacgggacgcctccatacccgcttcaaccaaacagccacggcgaccggtcgtttgtcctcctctgatccaaaccttcagaatattccagtacgtaccccattgggccagaagatccgccgtgcgtttgtagctgaggagggttggcgtttagtggccctcgattatcgtcaaattgaattacgtgtccttgcccatctttctggcgatgagaacctcatccgcgtgtttcaagaaggcaaagacattcacactcaaacggcaagctggatgtttggattatcagctgaagcgatcgatcctttgatgcgtcgtgcagcgaagaccatcaatttcggtgttctctacggtatgagtccatttcgtttgtcgcaggaattaggcattccctatgaagaagctcaggcgttcattcagaaatactttcaaagctatcccaaagttaaagcatggatcgagaagactctccgtgaaggccgccaccgtggttacgtagagaccttatttggacgtcgccgctatgttcccgatttaaacgctcgcgtgaaaggcaagcgtgaagccgccgaacgcatggcgttcaacatgcctgtacagggcacggcagctgacctcatgaaacttgcaatggtgcgcctttttccacaattgcgtgaagttggtgcccgcatgctcttgcaggtccacgatgaactcttgttagaagcgccaaaagagcgtgcggaagaggtggcagccctcgcgaaagaagttatggaaggcgtgtggcccttagcggtgcctcttgaagtcgaagttggtattggcgaggattggctggctgccaaagga

SEQ ID NO: 5040 - protein, 841 aa, synthetic construct
  REGION 1..841: note = Variant of DNA polymerase I from Thermus sp. strain 2.9
MHHHHHHGGSGVLPVFEPKGRVLLVDGHHLAYRNFFALKGLTTSLGEPVQGVYGFAKSLLKALKEDGDVVIVVFDAKAPSFRHEAYEAYKAGRAPTPEDFPRQLALMKELVDLLGLERLEVPGFEADDVLATLAKKAEREGYEVQILTADRDLFQLLSPRISVLHPEGHRITPEWLWEKYGLRPEQWVDFRALAGDKSDNIPGVKGIGEKTALKLLKEWGSLENLLKNLDQVKPESVREKILAHLEDLKLSRELSRVRTDLPLEVDFGRRREPDWEGLKAFLERLEFGSLLHEFGLLESPLLAEEAPWPPPEGAFLGYRLSRPEPMWAELLALAASAQGRVYRAEDPHGALRGLFEVRGLLAKDLAVVALREGLDLPPTDDPMLLAYLLDPSNTTPEGVARRYGGEWTEDAAKRALLAERLHANLLGRLQGEERLLWLYEEVEKPLSRVLAHMEATGVKLDVAYLENLSLEVAAHMRRLEEEVFRLAGRSFRLNSRDQLERVLFDELGLPPIGKTEKTGKRSTSAAVLEALREVHPIVDKILQYRELAKLKGTYIDRLPALVHPKTGRLHTRFNQTATATGRLSSSDPNLQNIPVRTPLGQKIRRAFVAEEGWRLVALDYRQIELRVLAHLSGDENLIRVFQEGKDIHTQTASWMFGLSAEAIDPLMRRAAKTINFGVLYGMSPFRLSQELGIPYEEAQAFIQKYFQSYPKVKAWIEKTLREGRHRGYVETLFGRRRYVPDLNARVKGKREAAERMAFNMPVQGTAADLMKLAMVRLFPQLREVGARMLLQVHDELLLEAPKERAEEVAALAKEVMEGVWPLAVPLEVEVGIGEDWLAAKG

SEQ ID NO: 5041 - DNA, 2523 bp, synthetic construct
  misc_feature 1..2523: note = Variant of DNA polymerase I from Thermus sp. strain 2.9
  source 1..2523: mol_type = other DNA
atgcaccatcatcatcatcatggcggtagcggcgtgttaccggtgttcgagcctaaaggtcgcgtgcttctggttgatggccatcatctcgcgtatcgtaacttctttgccctgaaaggattaaccaccagcctgggcgagccggtacagggtgtctacggctttgcaaagtcgctcctgaaagctctgaaagaagacggtgatgtggtgattgttgtctttgatgcgaaagcgccaagttttcgccacgaagcgtacgaagcttacaaagccgggcgtgctccaacgccggaagactttcctcgccaattggcgcttatgaaggaattagtggatttgcttggcctcgaacgcttggaagttcccggtttcgaggcagacgacgtattagcgactctcgcaaagaaagccgaacgtgagggctatgaagtccagatcttgacagcagatcgcgatcttttccagcttttatctccgcgcatctcggtgttacacccggaagggcatcgtatcaccccggaatggctctgggagaaatatggtttgcgtcccgaacaatgggtggattttcgcgccttagcaggcgatccgagcgacaatattccgggagttaaaggtatcggcgagaagacggcgctcaagctccttaaagaatgggggtcgttggagaacttgcttaagaatttagatcaggtcaaaccagagtcagtgcgtgagaagattcttgctcacctcgaagacctcaaattaagccgcgaattgtcccgtgtacgcaccgatttgccgctcgaagttgatttcggtcgccgccgcgaacctgactgggagggtcttaaagcgtttttagagcgtcttgaatttggttcgctcttgcatgaattcggccttttagaaagcccgttactggccgaagaagcaccttggccaccgcccgagggcgcgtttaatggttaccgtttgagtcgcccggaaccgatgtgggccgaattactggctcttgcagcgtctgcccagggacgtgtgtatcgcgcggaagaccctcatggtgcgctccgcggcctcttcgaagtccgtggactccttgccaaagacttagctgttgttgcattgcgcgaaggtcttgatttacctccgactgatgatccaatgcttcttgcgtacctcttggacccgtcaaacacgacgcccgaaggcgtagcccgtcgttacggcggcgagtggaccgaagatgcagcgaaacgcgcgttattggccgaacgtttgcacgccaatttattaggacgtttgcaaggcgaggaacgtctcctctggctttacgaagaagtggagaaaccattgagtcgcgtgctcgcgcatatggaagctaccggtgtcaaattagacgtggcgtatttggagaatctcagccttgaagttgctgcccacatgcgccgcttggaggaagaagtattccgtttagcaggccgttcctttcgccttaactctcgcgatcagttagaacgtgtgttgttcgatgaacttggtctccctcctatcggcaagacagagaagaccggtaaacgtagcacttcagcggcggttttagaagctcttcgcgaagtccatcccattgtggacaagatcttgcagtaccgcgaactcgcgaaattgaaaggcacctatattgaccgtcttccggcattagtccacccgaaaacgggacgcctccatacccgcttcaaccaaacagccacggcgaccggtcgtttgtcctcctctgatccaaaccttcagaatattccagtacgtaccccattgggccagaagatccgccgtgcgtttgtagctgaggagggttggcgtttagtggccctcgattatcgtcaaattgaattacgtgtccttgcccatctttctggcgatgagaacctcatccgcgtgtttcaggaaggcaaagacattcacactcaaacggcaagctggatgtttggattatcagctgaagcgatcgatcctttgatgcgtcgtgcagcgaagaccatcaatttcggtgttctctacggtatgagtgcctttcgtttgtcgcaggaattaggcattccctatgaagaagctcaggcgttcattcagaaatactttcaaagctatcccaaagttaaagcatggatcgagaagactctccgtgaaggccgcacacgtggttacgtagagaccttatttggacgtcgccgctatgttcccgatttaaacgctcgcgtgaaaggcaagcgtgaagccgccgaacgcatggcgttcaacatgcctgtacagggcacggcagctgacctcatgaaacttgcaatggtgcgcctttttccacaattgcgtgaagttggtgcccgcatgctcttgcaggtccacgatgaactcttgttagaagcgccaaaagagcgtgcggaagaggtggcagccctcgcgaaagaagttatggaaggcgtgtggcccttagcggtgcctcttgaagtcgaagttggtattggcgaggattggctggctgccaaagga

SEQ ID NO: 5042 - protein, 841 aa, synthetic construct
  REGION 1..841: note = Variant of DNA polymerase I from Thermus sp. strain 2.9
MHHHHHHGGSGVLPVFEPKGRVLLVDGHHLAYRNFFALKGLTTSLGEPVQGVYGFAKSLLKALKEDGDVVIVVFDAKAPSFRHEAYEAYKAGRAPTPEDFPRQLALMKELVDLLGLERLEVPGFEADDVLATLAKKAEREGYEVQILTADRDLFQLLSPRISVLHPEGHRITPEWLWEKYGLRPEQWVDFRALAGDPSDNIPGVKGIGEKTALKLLKEWGSLENLLKNLDQVKPESVREKILAHLEDLKLSRELSRVRTDLPLEVDFGRRREPDWEGLKAFLERLEFGSLLHEFGLLESPLLAEEAPWPPPEGAFNGYRLSRPEPMWAELLALAASAQGRVYRAEDPHGALRGLFEVRGLLAKDLAVVALREGLDLPPTDDPMLLAYLLDPSNTTPEGVARRYGGEWTEDAAKRALLAERLHANLLGRLQGEERLLWLYEEVEKPLSRVLAHMEATGVKLDVAYLENLSLEVAAHMRRLEEEVFRLAGRSFRLNSRDQLERVLFDELGLPPIGKTEKTGKRSTSAAVLEALREVHPIVDKILQYRELAKLKGTYIDRLPALVHPKTGRLHTRFNQTATATGRLSSSDPNLQNIPVRTPLGQKIRRAFVAEEGWRLVALDYRQIELRVLAHLSGDENLIRVFQEGKDIHTQTASWMFGLSAEAIDPLMRRAAKTINFGVLYGMSAFRLSQELGIPYEEAQAFIQKYFQSYPKVKAWIEKTLREGRTRGYVETLFGRRRYVPDLNARVKGKREAAERMAFNMPVQGTAADLMKLAMVRLFPQLREVGARMLLQVHDELLLEAPKERAEEVAALAKEVMEGVWPLAVPLEVEVGIGEDWLAAKG

SEQ ID NO: 5043 - DNA, 2523 bp, synthetic construct
  misc_feature 1..2523: note = Variant of DNA polymerase I from Thermus sp. strain 2.9
  source 1..2523: mol_type = other DNA
atgcaccatcatcatcatcatggcggtagcggcgtgttaccggtgttcgagcataaaggtcgcgtgcttctggttgatggccatcatctcgcgtatcgtaacttctttgccctgaaaggattaaccaccagcctgggcgagccggtacagggtgtctacggctttgcaaagtcgctcctgaaagctctgaaagaagacggtgatgtggtgattgttgtctttgatgcgaaagcgccaagttttcgccacgaagcgtacgaagcttacaaagccgggcgtgctccaacgccggaagactttcctcgccaattggcgcttatgaaggaattagtggatttgcttggcctcgaacgcttggaagttcccggtttcgaggcagacgacgtattagcgactctcgcaaagaaagccgaagatgagggctatgaagtccagatcttgacagcagatcgcgatcttttccagcttttatctccgcgcatctcggtgttacacccggaagggcatcgtatcaccccggaatggctctgggagaaatatggtttgcgtcccgaacaatgggtggattttcgcgccttagcaggcgataagagcgacaatattccgggagttaaaggtatcggcgagaagacggcgctcaagctccttaaagaatgggggtcgttggagaacttgcttaagaatttagatcaggtcaaaccagagtcagtgcgtgagaagattcttgctcacctcgaagacctcaaattaagccgcgaattgtcccgtgtacgcaccgatttgccgctcgaagttgatttcggtcgccgccgcgaacctgactgggagggtcttaaagcgtttttagagcgtcttgaatttggttcgctcttgcatgaattcggccttttagaaagcccgttactggccgaagaagcaccttggccaccgcccgagggcgcgtttttaggttaccgtttgagtcgcccggaaccgatgtgggccgaattactggctcttgcagcgtctgcccagggacgtgtgtatcgcgcggaagaccctcatggtgcgctccgcggcctcttcgaagtccgtggactccttgccaaagacttagctgttgttgcattgcgcgaaggtcttgatttacctccgactgatgatccaatgcttcttgcgtacctcttggacccgtcaaacacgacgcccgaaggcgtagcccgtcgttacggcggcgagtggaccgaagatgcagcgaaacgcgcgttattggccgaacgtttgcacgcgaatttacgtggacgtttgcaaggcgaggaacgtctcctctggctttacgaagaagtggagaaaccattgagtcgcgtgctcgcgcatatggaagctaccggtgtcaaattagacgtggcgtatttggagaatctcagccttgaagttgctgcccacatgcgccgcttggaggaagaagtattccgtttagcaggccgttcctttcgccttaactctcgcgatcagttagaacgtgtgttgttcgatgaacttggtctccctcctatcggcaagacagagaagaccggtaaacgtagcacttcagcggcggttttagaagctcttcgcgaagtccatcccattgtggacaagatcttgcagtaccgcgaactcgcgaaattgaaaggcacctatattgaccgtcttccggcattagtccacccgaaaacgggacgcctccatacccgcttcaaccaaacagccacggcgaccggtcgtttgtcctcctctgatccaaaccttcagaatattccagtacgtaccaaattgggccagaagatccgccgtgcgtttgtagctgaggagggttggcgtttagtggccctcgattatcgtcaaattgaattacgtgtccttgcccatctttctggcgatgagaacctcatccgcgtgtttcaggaaggcaaagacattcacactcaaacggcaagctggatgtttggattatcagctgaagcgatcgatcctttgatgcgtcgtgcagcgaagaccatcaatttcggtgttctctacggtatgagtgcctttcgtttgtcgcaggaattaggcattccctatgaagaagctcaggcgttcattcagaaatactttcaaagctatcccaaagttaaagcatggatcgagaagactctccgtgaaggccgcacacgtggttacgtagagaccttatttggacgtcgccgctatgttcccgatttaaacgctcgcgtgaaaggcaagcgtgaagccgccgaacgcatggcgttcaacatgcctgtacagggcacggcagctgacctcatgaaacttgcaatggtgcgcctttttccacaattgcgtgaagttggtgcccgcatgctcttgcaggtccacgatgaactcttgttagaagcgccaaaagagcgtgcggaagaggtggcagccctcgcgaaagaagttatggaaggcgtgtggcccttagcggtgcctcttgaagtcgaagttggtattggcgaggattggctggctgccaaagga

SEQ ID NO: 5044 - protein, 841 aa, synthetic construct
  REGION 1..841: note = Variant of DNA polymerase I from Thermus sp. strain 2.9
MHHHHHHGGSGVLPVFEHKGRVLLVDGHHLAYRNFFALKGLTTSLGEPVQGVYGFAKSLLKALKEDGDVVIVVFDAKAPSFRHEAYEAYKAGRAPTPEDFPRQLALMKELVDLLGLERLEVPGFEADDVLATLAKKAEDEGYEVQILTADRDLFQLLSPRISVLHPEGHRITPEWLWEKYGLRPEQWVDFRALAGDKSDNIPGVKGIGEKTALKLLKEWGSLENLLKNLDQVKPESVREKILAHLEDLKLSRELSRVRTDLPLEVDFGRRREPDWEGLKAFLERLEFGSLLHEFGLLESPLLAEEAPWPPPEGAFLGYRLSRPEPMWAELLALAASAQGRVYRAEDPHGALRGLFEVRGLLAKDLAVVALREGLDLPPTDDPMLLAYLLDPSNTTPEGVARRYGGEWTEDAAKRALLAERLHANLRGRLQGEERLLWLYEEVEKPLSRVLAHMEATGVKLDVAYLENLSLEVAAHMRRLEEEVFRLAGRSFRLNSRDQLERVLFDELGLPPIGKTEKTGKRSTSAAVLEALREVHPIVDKILQYRELAKLKGTYIDRLPALVHPKTGRLHTRFNQTATATGRLSSSDPNLQNIPVRTKLGQKIRRAFVAEEGWRLVALDYRQIELRVLAHLSGDENLIRVFQEGKDIHTQTASWMFGLSAEAIDPLMRRAAKTINFGVLYGMSAFRLSQELGIPYEEAQAFIQKYFQSYPKVKAWIEKTLREGRTRGYVETLFGRRRYVPDLNARVKGKREAAERMAFNMPVQGTAADLMKLAMVRLFPQLREVGARMLLQVHDELLLEAPKERAEEVAALAKEVMEGVWPLAVPLEVEVGIGEDWLAAKG

SEQ ID NO: 5045 - DNA, 2523 bp, synthetic construct
  misc_feature 1..2523: note = Variant of DNA polymerase I from Thermus sp. strain 2.9
  source 1..2523: mol_type = other DNA
atgcaccatcatcatcatcatggcggtagcggcgtgttaccggtgttcgagcctaaaggtcgcgtgcttctggttgatggccatcatctcgcgtatcgtaacttctttgccctgaaaggattaaccaccagcctgggcgagccggtacagggtgtctacggctttgcaaagtcgctcctgaaagctctgaaagaagacggtgatgtggtgattgttgtctttgatgcgaaagcgccaagttttcgccacgaagcgtacgaagcttacaaagccgggcgtgctccaacgccggaagactttcctcgccaattggcgcttatgaaggaattagtggatttgcttggcctcgaacgcttggaagttcccggtttcgaggcagacgacgtattagcgactctcgcaaagaaagccgaacgtgagggctatgaagtccagatcttgacagcagatcgcgatcttttccagcttttatctccgcgcatctcggtgttacacccggaagggcatcgtatcaccccggaatggctctgggagaaatatggtttgcgtcccgaacaatgggtggattttcgcgccttagcaggcgataagagcgacaatattccgggagttaaaggtatcggcgagaagacggcgctcaagctccttaaagaatgggggtcgttggagaacttgcttaagaatttagatcaggtcaaaccagagtcagtgcgtgagaagattcttgctcacctcgaagacctcaaattaagccgcgaattgtcccgtgtacgcaccgatttgccgctcgaagttgatttcggtcgccgccgcgaacctgactgggagggtcttaaagcgtttttagagcgtcttgaatttggttcgctcttgcatgaattcggccttttagaaagcccgttagtggccgaagaagcaccttggccaccgcccgagggcgcgtttttaggttaccgtttgagtcgcccggaaccgatgtgggccgaattactggctcttgcagcgtctgcccagggacgtgtgtatcgcgcggaagaccctcatggtgcgctccgcggcctcttcgaagtccgtggactccttgccaaagacttagctgttgttgcattgcgcgaaggtcttgatttacctccgactgatgatccaatgcttcttgcgtacctcttggactcgtcaaacacgacgcccgaaggcgtagcccgtcgttacggcggcgagtggaccgaagatgcagcgaaacgcgcgttattggccgaacgtttgcacgccaatttattaggacgtttgcaaggcgaggaacgtctcctctggctttacgaagaagtggagaaaccattgagtcgcgtgctcgcgcatatggaagctaccggtgtcaaattagacgtggcgtatttggagaatctcagccttgaagttgctgcccacatgcgccgcttggaggaagaagtattccgtttagcaggccgttcctttcgccttaactctcgcgatcagttagaacgtgtgttgttcgatgaacttggtctccctcctatcggcaagacagagaagaccggtaaacgtagcacttcagcggcggttttagaagctcttcgcgaagtccatcccattgtggacaagatcttgcagtaccgcgaaatggcgaaattgaaaggcacctatattgaccgtcttccggcattagtccacccgaaaacgggacgcctccatacccgcttcaaccaaacagccacggcgaccggtcgtttgtcctcctctgatccaaaccttcagaatattccagtacgtaccaaattgggccagaagatccgccgtgcgtttgtagctgaggagggttggcgtttagtggccctcgattatcgtcaaattgaattacgtgtccttgcccatctttctggcgatgagaacctcatccgcgtgtttcaggaaggcaaagacattcacactcaaacggcaagctggatgtttggattatcagctgaagcgatcgatcctttgatgcgtcgtgcagcgaagaccatcaatttcggtgttctctacggtatgagtgcctttcgtttgtcgcaggaattaggcattccctatgaagaagctcaggcgttcattcagaaatactttcaaagctatcccaaagttaaagcatggatcgagaagactctccgtgaaggccgcacacgtggttacgtagagaccttatttggacgtcgccgctatgttcccgatttaaacgctcgcgtgaaaggcaagcgtgaagccgccgaacgcatggcgttcaacatgcctgtacagggcacggcagctgacctcatgaaacttgcaatggtgcgcctttttccacaattgcgtgaagttggtgcccgcatgctcttgcaggtccacgatgaactcttgttagaagcgccaaaagagcgtgcggaagaggtggcagccctcgcgaaagaagttatggaaggcgtgtggcccttagcggtgcctcttgaagtcgaagttggtattggcgaggattggctggctgccaaagga

SEQ ID NO: 5046 - protein, 841 aa, synthetic construct
  REGION 1..841: note = Variant of DNA polymerase I from Thermus sp. strain 2.9
MHHHHHHGGSGVLPVFEPKGRVLLVDGHHLAYRNFFALKGLTTSLGEPVQGVYGFAKSLLKALKEDGDVVIVVFDAKAPSFRHEAYEAYKAGRAPTPEDFPRQLALMKELVDLLGLERLEVPGFEADDVLATLAKKAEREGYEVQILTADRDLFQLLSPRISVLHPEGHRITPEWLWEKYGLRPEQWVDFRALAGDKSDNIPGVKGIGEKTALKLLKEWGSLENLLKNLDQVKPESVREKILAHLEDLKLSRELSRVRTDLPLEVDFGRRREPDWEGLKAFLERLEFGSLLHEFGLLESPLVAEEAPWPPPEGAFLGYRLSRPEPMWAELLALAASAQGRVYRAEDPHGALRGLFEVRGLLAKDLAVVALREGLDLPPTDDPMLLAYLLDSSNTTPEGVARRYGGEWTEDAAKRALLAERLHANLLGRLQGEERLLWLYEEVEKPLSRVLAHMEATGVKLDVAYLENLSLEVAAHMRRLEEEVFRLAGRSFRLNSRDQLERVLFDELGLPPIGKTEKTGKRSTSAAVLEALREVHPIVDKILQYREMAKLKGTYIDRLPALVHPKTGRLHTRFNQTATATGRLSSSDPNLQNIPVRTKLGQKIRRAFVAEEGWRLVALDYRQIELRVLAHLSGDENLIRVFQEGKDIHTQTASWMFGLSAEAIDPLMRRAAKTINFGVLYGMSAFRLSQELGIPYEEAQAFIQKYFQSYPKVKAWIEKTLREGRTRGYVETLFGRRRYVPDLNARVKGKREAAERMAFNMPVQGTAADLMKLAMVRLFPQLREVGARMLLQVHDELLLEAPKERAEEVAALAKEVMEGVWPLAVPLEVEVGIGEDWLAAKG

SEQ ID NO: 5047 - DNA, 2523 bp, synthetic construct
  misc_feature 1..2523: note = Variant of DNA polymerase I from Thermus sp. strain 2.9
  source 1..2523: mol_type = other DNA
atgcaccatcatcatcatcatggcggtagcggcgtgttaccggtgttcgagcctaaaggtcgcgtgcttctggttgatggccatcatctcgcgtatcgtaacttctttgccctgaaaggattaaccaccagcctgggcgagccggtacagggtgtctacggctttgcaaagtcgctcctgaaagctctgaaagaagacggtgatgtggtgattgttgtctttgatgcgaaagcgccaagttttcgccacgaagcgtacgaagcttacaaagccgggcgtgctccaacgccggaagactttcctcgccaattggcgcttatgaaggaattagtggatttgcttggcctcgaacgcttggaagttcccggtttcgaggcagacgacgtattagcgactctcgcaaagaaagccgaacgtgagggctatgaagtccagatcttgacagcagatcgcgatcttttccagcttttatctccgcgcatctcggtgttacacccgggtgggcatcgtatcaccccggaatggctctgggagaaatatggtttgcgtcccgaacaatgggtggattttcgcgccttagcaggcgatccgagcgacaatattccgggagttaaaggtatcggcgagaagacggcgctcaagctccttaaagaatgggggtcgttggagaacttgcttaagaatttagatcaggtcaaaccagagtcagtgcgtgagaagattcttgctcacctcgaagacctcaaattaagccgcgaattgtcccgtgtacgcaccgatttgccgctcgaagttgatttcggtcgccgccgcgaacctgactgggagggtcttaaagcgtttttagagcgtcttgaatttggttcgctcttgcatgaattcggccttttagaaagcccgttactggccgaagaagcaccttggccaccgcccgagggcgcgtttttaggttaccgtttgagtcgcccggaaccgatgtgggccgaattactggctcttgcagcgtctgcccagggacgtgtgtatcgcgcggaagaccctcatggtgcgctccgcggcctcttcgaagtccgtggactccttgccaaagacttagctgttgttgcattgcgcgaaggtcttgatttacctccgactgatgatccaatgcttcttgcgtacctcttggacccgtcaaacacgacgcccgaaggcgtagcccgtcgttacggcggcgagtggaccgaagatgcagcgaaacgcgcgttattggccgaacgtttgcacgccaatttattaggacgtttgcaaggcgaggaacgtctcctctggctttacgaagaagtggagaaaccattgagtcgcgtgctcgcgcatatggaagctaccggtgtcaaattagacgtggcgtatttggagaatctcagccttgaagttgctgcccacatgcgccgcttggaggaagaagtattccgtttagcaggccgttcctttcgccttaactctcgcgatcagttagaacgtgtgttgttcgatgaacttggtctccctcctatcggcaagacagagaagaccggtaaacgtagcacttcagcggcggttttagaagctcttcgcgaagtccatcccattgtggacaagatcttgcagtaccgcgaactcgcgaaattgaaaggcacctatattgaccgtcttccggcattagtccacccgaaaacgggacgcctccatacccgcttcaaccaaacagccacggcgaccggtcgtttgtcctcctctgatccaaaccttcagaatattccagtacgtaccccattgggccagaagatccgccgtgcgtttgtagctgaggagggttggcgtttagtggccctcgattatcgtcaaattgaattacgtgtccttgcccatctttctggcgatgagaacctcatccgcgtgtttcaggaaggcaaagacattcacactcaaacggcaagctggatgtttggattatcagctgaagcgatcgatcctttgatgcgtcgtgcagcgaagaccatcaatttcggtgttctctacggtatgagtgcctttcgtttgtcgcaggaattaggcattccctatgaagaagctcaggcgttcattcagaaatactttcaaagctatcccaaagttaaagcatggatcgagaagactctccgtgaaggccgcacacgtggttacgtagagaccttatttggacgtcgccgctatgttcccgatttaaacgctcgcgtgaaaggcaagcgtgaagccgccgaacgcatggcgttcaacatgcctgtacagggcacggcagctgacctcatgaaacttgcaatggtgcgcctttttccacaattgcgtgaagttggtgcccgcatgctcttgcaggtccacgatgaactcttgttagaagcgccaaaagagcgtgcggaagaggtggcagccctcgcgaaagaagttatggaaggcgtgtggcccttagcggtgcctcttgaagtcgaagttggtattggcgaggattggctggctgccaaagga

SEQ ID NO: 5048 - protein, 841 aa, synthetic construct
  REGION 1..841: note = Variant of DNA polymerase I from Thermus sp. strain 2.9
MHHHHHHGGSGVLPVFEPKGRVLLVDGHHLAYRNFFALKGLTTSLGEPVQGVYGFAKSLLKALKEDGDVVIVVFDAKAPSFRHEAYEAYKAGRAPTPEDFPRQLALMKELVDLLGLERLEVPGFEADDVLATLAKKAEREGYEVQILTADRDLFQLLSPRISVLHPGGHRITPEWLWEKYGLRPEQWVDFRALAGDPSDNIPGVKGIGEKTALKLLKEWGSLENLLKNLDQVKPESVREKILAHLEDLKLSRELSRVRTDLPLEVDFGRRREPDWEGLKAFLERLEFGSLLHEFGLLESPLLAEEAPWPPPEGAFLGYRLSRPEPMWAELLALAASAQGRVYRAEDPHGALRGLFEVRGLLAKDLAVVALREGLDLPPTDDPMLLAYLLDPSNTTPEGVARRYGGEWTEDAAKRALLAERLHANLLGRLQGEERLLWLYEEVEKPLSRVLAHMEATGVKLDVAYLENLSLEVAAHMRRLEEEVFRLAGRSFRLNSRDQLERVLFDELGLPPIGKTEKTGKRSTSAAVLEALREVHPIVDKILQYRELAKLKGTYIDRLPALVHPKTGRLHTRFNQTATATGRLSSSDPNLQNIPVRTPLGQKIRRAFVAEEGWRLVALDYRQIELRVLAHLSGDENLIRVFQEGKDIHTQTASWMFGLSAEAIDPLMRRAAKTINFGVLYGMSAFRLSQELGIPYEEAQAFIQKYFQSYPKVKAWIEKTLREGRTRGYVETLFGRRRYVPDLNARVKGKREAAERMAFNMPVQGTAADLMKLAMVRLFPQLREVGARMLLQVHDELLLEAPKERAEEVAALAKEVMEGVWPLAVPLEVEVGIGEDWLAAKG

SEQ ID NO: 5049 - DNA, 2523 bp, synthetic construct
  misc_feature 1..2523: note = Variant of DNA polymerase I from Thermus sp. strain 2.9
  source 1..2523: mol_type = other DNA
atgcaccatcatcatcatcatggcggtagcggcgtgttaccggtgttcgagcctaaaggtcgcgtgcttctggttgatggccatcatctcgcgtatcgtaacttctttgccctgaaaggattaaccaccagcctgggcgagccggtacagggtgtctacggctttgcaaagtcgctcctgaaagctctgaaagaagacggtgatgtggtgattgttgtctttgatgcgaaagcgccaagttttcgccacgaagcgtacgaagcttacaaagccgggcgtgctccaacgccggaagactttcctcgccaattgtttcttatgaaggaattagtggatttgcttggcctcgaacgcttggaagttcccggtttcgaggcagacgacgtattagcgactctcgcaaagaaagccgaacgtgagggctatgaagtccagatcttgacagcagatcgcgatcttttccagcttttatctccgcgcatctcggtgttacacccggaagggcatcgtatcaccccggaatggctctgggagaaatatggtttgcgtcccgaacaatgggtggattttcgcgccttagcaggcgataagagcgacaatattccgggagttaaaggtatcggcgagaagacggcgctcaagctccttaaagaatgggggtcgttggagaacttgcttaagaatttagatcaggtcaaaccagagtcagtgcgtgagaagattcttgctcacctcgaagacctcgagttaagccgcgaattgtcccgtgtacgcaccgatttgccgctcgaagttgatttcggtcgccgccgcgaacctgactgggagggtcttaaagcgtttttagagcgtcttgaatttggttcgctcttgcatgaattcggccttttagaaagcccgttactggccgaagaagcaccttggccaccgcccgagggcgcgtttttaggttaccgtttgagtcgcccggaaccgatgtgggccgaattactggctcttgcagcgtctgcccagggacgtgtgtatcgcgcggaagaccctcatggtgcgctccgcggcctcttcgaagtccgtggactccttgccaaagacttagctgttgttgcattgcgcgaaggtcttgatttacctccgactgatgatccaatgcttcttgcgtacctcttggacccgtcaaacacgacgcccgaaggcgtagcccgtcgttacggcggcgagtggaccgaagatgcagcgaaacgcgcgttattggccgaacgtttgcacgagaatttacgtggacgtttgcaaggcgaggaacgtctcctctggctttacgaagaagtggagaaaccattgagtcgcgtgctcgcgcatatggaagctaccggtgtcaaattagacgtggcgtatttggagaatctcagccttgaagttgctgcccacatgcgccgcttggaggaagaagtattccgtttagcaggccgttcctttcgccttaactctcgcgatcagttagaacgtgtgttgttcgatgaacttggtctccctcctatcggcaagacagagaagaccggtaaacgtagcacttcagcggcggttttagaagctcttcgcgaagtccatcccattgtggacaagatcttgcagtaccgcgaaatggcgaaattgaaaggcacctatattgaccgtcttccggcattagtccacccgaaaacgggacgcctccatacccgcttcaaccaaacagccacggcgaccggtcgtttgtcctcctctgatccaaaccttcagaatattccagtacgtaccccattgggccagaagatccgccgtgcgtttgtagctgaggagggttggcgtttagtggccctcgattatcgtcaaattgaattacgtgtccttgcccatctttctggcgatgagaacctcatccgcgtgtttgaagaaggcaaagacattcacactcaaacggcaagctggatgtttggattatcagctgaagcgatcgatcctttgatgcgtcgtgcagcgaagaagatcaatttcggtgttctctacggtatgagtgcctttcgtttgtcgcaggaattaggcattccctatgaagaagctcaggcgttcattcagaaatactttcaaagctatcccaaagttaaagcatggatcgagaagactctccgtgaaggccgcacacgtggttacgtagagaccttatttggacgtcgccgctatgttcccgatttaaacgctcgcgtgaaaggcaagcgtgaagccgccgaacgcatggcgttcaacatgcctgtacagggcacggcagctgacctcatgaaacttgcaatggtgcgcctttttccacaattgcgtgaagttggtgcccgcatgctcttgcaggtccacgatgaactcttgttagaagcgccaaaagagcgtgcggaagaggtggcagccctcgcgaaagaagttatggaaggcgtgtggcccttagcggtgcctcttgaagtcgaagttggtattggcgaggattggctggctgccaaagga

SEQ ID NO: 5050 - protein, 841 aa, synthetic construct
  REGION 1..841: note = Variant of DNA polymerase I from Thermus sp. strain 2.9
MHHHHHHGGSGVLPVFEPKGRVLLVDGHHLAYRNFFALKGLTTSLGEPVQGVYGFAKSLLKALKEDGDVVIVVFDAKAPSFRHEAYEAYKAGRAPTPEDFPRQLFLMKELVDLLGLERLEVPGFEADDVLATLAKKAEREGYEVQILTADRDLFQLLSPRISVLHPEGHRITPEWLWEKYGLRPEQWVDFRALAGDKSDNIPGVKGIGEKTALKLLKEWGSLENLLKNLDQVKPESVREKILAHLEDLELSRELSRVRTDLPLEVDFGRRREPDWEGLKAFLERLEFGSLLHEFGLLESPLLAEEAPWPPPEGAFLGYRLSRPEPMWAELLALAASAQGRVYRAEDPHGALRGLFEVRGLLAKDLAVVALREGLDLPPTDDPMLLAYLLDPSNTTPEGVARRYGGEWTEDAAKRALLAERLHENLRGRLQGEERLLWLYEEVEKPLSRVLAHMEATGVKLDVAYLENLSLEVAAHMRRLEEEVFRLAGRSFRLNSRDQLERVLFDELGLPPIGKTEKTGKRSTSAAVLEALREVHPIVDKILQYREMAKLKGTYIDRLPALVHPKTGRLHTRFNQTATATGRLSSSDPNLQNIPVRTPLGQKIRRAFVAEEGWRLVALDYRQIELRVLAHLSGDENLIRVFEEGKDIHTQTASWMFGLSAEAIDPLMRRAAKKINFGVLYGMSAFRLSQELGIPYEEAQAFIQKYFQSYPKVKAWIEKTLREGRTRGYVETLFGRRRYVPDLNARVKGKREAAERMAFNMPVQGTAADLMKLAMVRLFPQLREVGARMLLQVHDELLLEAPKERAEEVAALAKEVMEGVWPLAVPLEVEVGIGEDWLAAKG

SEQ ID NO: 5051 - DNA, 2523 bp, synthetic construct
  misc_feature 1..2523: note = Variant of DNA polymerase I from Thermus sp. strain 2.9
  source 1..2523: mol_type = other DNA
atgcaccatcatcatcatcatggcggtagcggcgtgttaccggtgttcgagcctaaaggtcgcgtgcttctggttgatggccatcatctcgcgtatcgtaacttctttgccctgaaaggattaaccaccagcctgggcgagccggtacagggtgtctacggctttgcaaagtcgctcctgaaagctctgaaagaagacggtgatgtggtgattgttgtctttgatgcgaaagcgccaagttttcgccacgaagcgtacgaagcttacaaagccgggcgtgctccaacgccggaagactttcctcgccaattggctcttatgaaggaattagtggatttgcttggcctcgaacgcttggaagttcccggtttcgaggcagacgacgtattagcgactctcgcaaagaaagccgaacgtgagggctatgaagtccagatcttgacagcagatcgcgatcttttccagcttttatctccgcgcatctcggtgttacacccggaagggcatcgtatcaccccggaatggctctgggagaaatatggtttgcgtcccgaacaatgggtggattttcgcgccttagcaggcgataagagcgacaatattccgggagttaaaggtatcggcgagaagacggcgctcaagctccttaaagaatgggggtcgttggagaacttgcttaagaatttagatcaggtcaaaccagagtcagtgcgtgagaagattcttgctcacctcgaagacctcgagttaagccgcgaattgtcccgtgtacgcaccgatttgccgctcgaagttgatttcggtcgccgccgcgaacctgactgggagggtcttaaagcgtttttagagcgtcttgaatttggttcgctcttgcatgaattcggccttttagaaagcccgttactggccgaagaagcaccttggccaccgcccgagggcgcgtttttaggttaccgtttgagtcgcccggaaccgatgttggccgaattactggctcttgcagcgtctgcccagggacgtgtgtatcgcgcggaagaccctcatggtgcgctccgcggcctcttcgaagtccgtggactccttgccaaagacttagctgttgttgcattgcgcgaaggtcttgatttacctccgactgatgatccaatgcttcttgcgtacctcttggacccgtcaaacacgacgcccgaaggcgtagcccgtcgttacggcggcgagtggaccgaagatgcagcgaaacgcgcgttattggccgaacgtttgcacgagaatttactgggacgtttgcaaggcgaggaacgtctcctctggctttacgaagaagtggagaaaccattgagtcgcgtgctcgctcatatggaagctaccggtgtcaaattagacgtggcgtatttggagaatctcagccttgaagttgctgcccacatgcgccgcttggaggaagaagtattccgtttagcaggccgttcctttcgccttaactctcgcgatcagttagaacgtgtgttgttcgatgaacttggtctccctcctatcggcaagacagagaagaccggtaaacgtagcacttcagcggcggttttagaagctcttcgcgaagtccatcccattgtggacaagatcttgcagtaccgcgaactcgcgaaattgaaaggcacctatattgaccgtcttccggcattagtccacccgaaaacgggacgcctccatacccgcttcaaccaaacagccacggcgaccggtcgtttgtcctcctctgatccaaaccttcagaatattccagtacgtaccccattgggccagaagatccgccgtgcgtttgtagctgaggagggttggcgtttagtggccctcgattatcgtcaaattgaattacgtgtccttgcccatctttctggcgatgagaacctcatccgcgtgtttcaggaaggcaaagacattcacactcaaacggcaagctggatgtttggattaagcgctgaagcgatcgatcctttgatgcgtcgtgcagcgaagaagatcaatttcggtgttctctacggtatgagtgcctttcgtttgtcgcaggggttaggcattccctatgaagaagctcaggcgttcattcagaaatactttcaaagctatcccaaagttaaagcatggatcgagaagactctccgtgaaggccgcacacgtggttacgtagagaccttatttggacgtcgccgctatgttcccgatttaaacgctcgcgtgaaaggcaagcgtgaagccgccgaacgcatggcgttcaacatgcctgtacagggcacggcagctgacctcatgaaacttgcaatggtgcgcctttttccacaattgcgtgaagttggtgcccgcatgctcttgcaggtccacgatgaactcttgttagaagcgccaaaagagcgtgcggaagaggtggcagccctcgcgaaagaagttatggaaggcgtgtggcccttagcggtgcctcttgaagtcgaagttggtattggcgaggattggctggctgccaaagga

SEQ ID NO: 5052 - protein, 841 aa, synthetic construct
  REGION 1..841: note = Variant of DNA polymerase I from Thermus sp. strain 2.9
MHHHHHHGGSGVLPVFEPKGRVLLVDGHHLAYRNFFALKGLTTSLGEPVQGVYGFAKSLLKALKEDGDVVIVVFDAKAPSFRHEAYEAYKAGRAPTPEDFPRQLALMKELVDLLGLERLEVPGFEADDVLATLAKKAEREGYEVQILTADRDLFQLLSPRISVLHPEGHRITPEWLWEKYGLRPEQWVDFRALAGDKSDNIPGVKGIGEKTALKLLKEWGSLENLLKNLDQVKPESVREKILAHLEDLELSRELSRVRTDLPLEVDFGRRREPDWEGLKAFLERLEFGSLLHEFGLLESPLLAEEAPWPPPEGAFLGYRLSRPEPMLAELLALAASAQGRVYRAEDPHGALRGLFEVRGLLAKDLAVVALREGLDLPPTDDPMLLAYLLDPSNTTPEGVARRYGGEWTEDAAKRALLAERLHENLLGRLQGEERLLWLYEEVEKPLSRVLAHMEATGVKLDVAYLENLSLEVAAHMRRLEEEVFRLAGRSFRLNSRDQLERVLFDELGLPPIGKTEKTGKRSTSAAVLEALREVHPIVDKILQYRELAKLKGTYIDRLPALVHPKTGRLHTRFNQTATATGRLSSSDPNLQNIPVRTPLGQKIRRAFVAEEGWRLVALDYRQIELRVLAHLSGDENLIRVFQEGKDIHTQTASWMFGLSAEAIDPLMRRAAKKINFGVLYGMSAFRLSQGLGIPYEEAQAFIQKYFQSYPKVKAWIEKTLREGRTRGYVETLFGRRRYVPDLNARVKGKREAAERMAFNMPVQGTAADLMKLAMVRLFPQLREVGARMLLQVHDELLLEAPKERAEEVAALAKEVMEGVWPLAVPLEVEVGIGEDWLAAKG

SEQ ID NO: 5053 - DNA, 2523 bp, synthetic construct
  misc_feature 1..2523: note = Variant of DNA polymerase I from Thermus sp. strain 2.9
  source 1..2523: mol_type = other DNA
atgcaccatcatcatcatcatggcggtagcggcgtgttaccggtgttcgagcctaaaggtcgcgtgcttctggttgatggccatcatctcgcgtatcgtaacttctttgccctgaaaggattaaccaccagcctgggcgagccggtacagggtgtctacggctttgcaaagtcgctcctgaaagctctgaaagaagacggtgatgtggtgattgttgtctttgatgcgaaagcgccaagttttcgccacgaagcgtacgaagcttacaaagccgggcgtgctccaacgccggaagactttcctcgccaattggcgcttatgaaggaattagtggatttgcttggcctcgaacgcttggaagttcccggtttcgaggcagacgacgtattagcgactctcgcaaagaaagccgaacgtgagggctatgaagtccagatcttgacagcagatcgcgatcttttccagcttttatctccgcgcatctcggtgttacacccggaagggcatcgtatcaccccggaatggctctgggagaaatatggtttgcgtcccgaacaatgggtggattttcgcgccttagcaggcgatccgagcgacaatattccgggagttaaaggtatcggcgagaagacggcgctcaagctccttaaagaatgggggtcgttggagaacttgcttaagaatttagatcaggtcaaaccagagtcagtgcgtgagaagattcttgctcacctcgaagacctcaaattaagccgcgaattgtcccgtgtacgcaccgatttgccgctcgaagttgatttcggtcgccgccgcgaacctgactgggagggtcttaaagcgtttttagagcgtcttgaatttggttcgctcttgcatgaattcggccttttagaaagcccgttactggccgaagaagcaccttggccaccgcccgagggcgcgtttttaggttaccgtttgagtcgcccggaaccgatgtgggccgaattactggctcttgcagcgtctgcccagggacgtgtgtatcgcgcggaagaccctcatggtgcgctccgcggcctcttcgaagtccgtggactccttgccttggacttagctgttgttgcattgcgcgaaggtcttgatttacctccgactgatgatccaatgcttcttgcgtacctcttggacccgtcaaacacgacgcccgaaggcgtagcccgtcgttacggcggcgagtggaccgaagatgcagcgaaacgcgcgttattggccgaacgtttgcacgccaatttattaggacgtttgcaaggcgaggaacgtctcctctggctttacgaagaagtggagaaaccattgagtcgcgtgctcgcgcatatggaagctaccggtgtcaaattagacgtggcgtatttggagaatctcagccttgaagttgctgcccacatgcgccgcttggaggaagaagtattccgtttagcaggccgttcctttcgccttaactctcgcgatcagttagaacgtgtgttgttcgatgaacttggtctccctcctatcggcaagacagagaagaccggtaaacgtagcacttcagcggcggttttagaagctcttcgcgaagtccatcccattgtggacaagatcttgcagtaccgcgaactcgcgaaattgaaaggcacctatattgaccgtcttccggcattagtccacccgaaaacgggacgcctccatacccgcttcaaccaaacagccacggcgaccggtcgtttgtcctcctctgatccaaaccttcagaatattccagtacgtaccccattgggccagaagatccgccgtgcgtttgtagctgaggagggttggcgtttagtggccctcgattatcgtcaaattgaattacgtgtccttgcccatctttctggcgatgagaacctcatccgcgtgtttcaggaaggcaaagacattcacactcaaacggcaagctggatgtttggattatcagctgaagcgatcgatcctttgatgcgtcgtgcagcgaagaccatcaatttcggtgttctctacggtatgagtgcctttcgtttgtcgcaggaattaggcattccctatgaagaagctcaggcgttcattcagaaatactttcaaagctatcccaaagttaaagcatggatcgagaagactctccgtgaaggccgcacacgtggttacgtagagaccttatttggacgtcgccgctatgttcccgatttaaacgctcgcgtgaaaggcaagcgtgaagccgccgaacgcatggcgttcaacatgcctgtacagggcacggcagctgacctcatgaaacttgcaatggtgcgcctttttccacaattgcgtgaagttggtgcccgcatgctcttgcaggtccacgatgaactcttgttagaagcgccaaaagagcgtgcggaagaggtggcagccctcgcgaaagaagttatggaaggcgtgtggcccttagcggtgcctcttgaagtcgaagttggtattggcgaggattggctggctgccaaagga

SEQ ID NO: 5054 - protein, 841 aa, synthetic construct
  REGION 1..841: note = Variant of DNA polymerase I from Thermus sp. strain 2.9
MHHHHHHGGSGVLPVFEPKGRVLLVDGHHLAYRNFFALKGLTTSLGEPVQGVYGFAKSLLKALKEDGDVVIVVFDAKAPSFRHEAYEAYKAGRAPTPEDFPRQLALMKELVDLLGLERLEVPGFEADDVLATLAKKAEREGYEVQILTADRDLFQLLSPRISVLHPEGHRITPEWLWEKYGLRPEQWVDFRALAGDPSDNIPGVKGIGEKTALKLLKEWGSLENLLKNLDQVKPESVREKILAHLEDLKLSRELSRVRTDLPLEVDFGRRREPDWEGLKAFLERLEFGSLLHEFGLLESPLLAEEAPWPPPEGAFLGYRLSRPEPMWAELLALAASAQGRVYRAEDPHGALRGLFEVRGLLALDLAVVALREGLDLPPTDDPMLLAYLLDPSNTTPEGVARRYGGEWTEDAAKRALLAERLHANLLGRLQGEERLLWLYEEVEKPLSRVLAHMEATGVKLDVAYLENLSLEVAAHMRRLEEEVFRLAGRSFRLNSRDQLERVLFDELGLPPIGKTEKTGKRSTSAAVLEALREVHPIVDKILQYRELAKLKGTYIDRLPALVHPKTGRLHTRFNQTATATGRLSSSDPNLQNIPVRTPLGQKIRRAFVAEEGWRLVALDYRQIELRVLAHLSGDENLIRVFQEGKDIHTQTASWMFGLSAEAIDPLMRRAAKTINFGVLYGMSAFRLSQELGIPYEEAQAFIQKYFQSYPKVKAWIEKTLREGRTRGYVETLFGRRRYVPDLNARVKGKREAAERMAFNMPVQGTAADLMKLAMVRLFPQLREVGARMLLQVHDELLLEAPKERAEEVAALAKEVMEGVWPLAVPLEVEVGIGEDWLAAKG

SEQ ID NO: 5055 - DNA, 2523 bp, synthetic construct
  misc_feature 1..2523: note = Variant of DNA polymerase I from Thermus sp. strain 2.9
  source 1..2523: mol_type = other DNA
atgcaccatcatcatcatcatggcggtagcggcgtgttaccggtgttcgagcctaaaggtcgcgtgcttctggttgatggccatcatctcgcgtatcgtaacttctttgccctgaaaggattaaccaccagcctgggcgagccggtacagggtgtctacggctttgcaaagtcgctcctgaaagctctgaaagaagacggtgatgtggtgattgttgtctttgatgcgaaagcgccaagttttcgccacgaagcgtacgaagcttacaaagccgggcgtgctccaacgccggaagactttcctcgccaattggcgcttatgaaggaattagtggatttgcttggcctcgaacgcttggaagttcccggtttcgaggcagacgacgtattagcgactctcgcaaagaaagccgaacgtgagggctatgaagtccagatcttgacagcagatcgcgatcttttccagcttttatctccgcgcatctcggtgttacacccggaagggcatcgtatcaccccggaatggctctgggagaaatatggtttgcgtcccgaacaatgggtggattttcgcgccttagcaggcgatccgagcgacaatattccgggagttaaaggtatcggcgagaagacggcgctcaagctccttaaagaatgggggtcgttggagaacttgcttaagaatttagatcaggtcaaaccagagtcagtgcgtgagaagattcttgctcacctcgaagacctcaaattaagccgcgaattgtcccgtgtacgcaccgatttgccgctcgaagttgatttcggtcgccgccgcgaacctgactgggagggtcttaaagcgtttttagagcgtcttgaatttggttcgctcttgcatgaattcggccttttagaaagcccgttactggccgaagaagcaccttggccaccgcccgagggcgcgtttttaggttaccgtttgagtcgcccggaaccgatgtgggccgaattactggctcttgcagcgtctgcccagggacgtgtgtatcgcgcggaagaccctcatggtgcgctccgcggcctcttcgaagtccgtggactccttgccaaagacttagctgttgttgcattgcgcgaaggtcttgatttacctccgactgatgatccaatgcttcttgcgtacctcttggacccgtcaaacacgacgcccgaaggcgtagcccgtcgttacggcggcgagtggaccgaagatgcagcgaaacgcgcgttattggccgaacgtttgcacgccaatttattaggacgtttgcaaggcgaggaacgtctcctctggctttacgaagaagtggagaaaccattgagtcgcgtgctcgcgcatatggaagctaccggtgtcaaattagacgtggcgtatttggagaatctcagccttgaagttgctgcccacatgcgccgcttggaggaagaagtattccgtttagcaggccgttcctttcgccttaactctcgcgatcagttagaacgtgtgttgttcgatgaacttggtctccctcctatcggcaagacagagaagaccggtaaacgtagcacttcagcggcggttttagaagctcttcgcgaagtccatcccattgtggacaagatcttgcagtaccgcgaactcgcgaaattgaaaggcacctatattgaccgtcttccggcattagtccacccgaaaacgggacgcctccatacccgcttcaaccaaacagccacggcgaccggtcgtttgtcctcctctgatccaaaccttcagaatattccagtacgtaccccattgggccagaagatccgccgtgcgtttgtagctgaggagggttggcgtttagtggccctcgattatcgtcaaattgaattacgtgtccttgcccatctttctggcgatgagaacctcatccgcgtgtttcaggaaggcaaagacattcacactcaaacggcaagctggatgtttggattatcagctgaagcgatcgatcctttgatgcgtcgtgcagcgaagaccatcaatttcggtgttctctacggtatgagtgcctttcgtttgtcgcaggaattaggcattccctatgaagaagctcaggcgttcattcagaaatactttcaaagctatcccaaagttaaagcatggatcgagaagactctccgtgaaggccgcacacgtggttacgtagagaccttatttggacgtcgccgctatgttcccgatttaaacgctcgcgtgaaaggcaagcgtgaagccgccgaacgcatggcgttcaacatgcctgtacagggcacggcagctgacctcatgaaacttgcaatggtgcgcctttttccacaattgcgtgaagttggtgcccgcatgctcttgcaggtccacgatgaactcttgttagaagcgccaaaagagcgtgcggaagaggtggcagccctcgcgaaagaagttatggaaggcgtgtggcccttagcggtgcctcttgaagtcccggttggtattggcgaggattggctggctgccaaagga

SEQ ID NO: 5056 - protein, 841 aa, synthetic construct
  REGION 1..841: note = Variant of DNA polymerase I from Thermus sp. strain 2.9
MHHHHHHGGSGVLPVFEPKGRVLLVDGHHLAYRNFFALKGLTTSLGEPVQGVYGFAKSLLKALKEDGDVVIVVFDAKAPSFRHEAYEAYKAGRAPTPEDFPRQLALMKELVDLLGLERLEVPGFEADDVLATLAKKAEREGYEVQILTADRDLFQLLSPRISVLHPEGHRITPEWLWEKYGLRPEQWVDFRALAGDPSDNIPGVKGIGEKTALKLLKEWGSLENLLKNLDQVKPESVREKILAHLEDLKLSRELSRVRTDLPLEVDFGRRREPDWEGLKAFLERLEFGSLLHEFGLLESPLLAEEAPWPPPEGAFLGYRLSRPEPMWAELLALAASAQGRVYRAEDPHGALRGLFEVRGLLAKDLAVVALREGLDLPPTDDPMLLAYLLDPSNTTPEGVARRYGGEWTEDAAKRALLAERLHANLLGRLQGEERLLWLYEEVEKPLSRVLAHMEATGVKLDVAYLENLSLEVAAHMRRLEEEVFRLAGRSFRLNSRDQLERVLFDELGLPPIGKTEKTGKRSTSAAVLEALREVHPIVDKILQYRELAKLKGTYIDRLPALVHPKTGRLHTRFNQTATATGRLSSSDPNLQNIPVRTPLGQKIRRAFVAEEGWRLVALDYRQIELRVLAHLSGDENLIRVFQEGKDIHTQTASWMFGLSAEAIDPLMRRAAKTINFGVLYGMSAFRLSQELGIPYEEAQAFIQKYFQSYPKVKAWIEKTLREGRTRGYVETLFGRRRYVPDLNARVKGKREAAERMAFNMPVQGTAADLMKLAMVRLFPQLREVGARMLLQVHDELLLEAPKERAEEVAALAKEVMEGVWPLAVPLEVPVGIGEDWLAAKG

SEQ ID NO: 5057 - DNA, 2523 bp, synthetic construct
  misc_feature 1..2523: note = Variant of DNA polymerase I from Thermus sp. strain 2.9
  source 1..2523: mol_type = other DNA
atgcaccatcatcatcatcatggcggtagcggcgtgttaccggtgttcgagcctaaaggtcgcgtgcttctggttgatggccatcatctcgcgtatcgtaacttctttgccctgaaaggattaaccaccagcctgggcgagccggtacagggtgtctacggctttgcaaagtcgctcctgaaagctctgaaagaagacggtgatgtggtgattgttgtctttgatgcgaaagcgccaagttttcgccacgaagcgtacgaagcttacaaagccgggcgtgctccaacgccggaagactttcctcgccaattggcgcttatgaaggaattagtggatttgcttggcctcgaacgcttggaagttcccggtttcgaggcagacgacgtattagcgactctcgcaaagaaagccgaacgtgagggctatgaagtccagatcttgacagcagatcgcgatcttttccagcttttatctccgcgcatctcggtgttacacccggcggggcatcgtatcaccccggaatggctctgggagaaatatggtttgcgtcccgaacaatgggtggattttcgcgccttagcaggcgatccgagcgacaatattccgggagttaaaggtatcggcgagaagacggcgctcaagctccttaaagaatgggggtcgttggagaacttgcttaagaatttagatcaggtcaaaccagagtcagtgcgtgagaagattcttgctcacctcgaagacctcaaattaagccgcgaattgtcccgtgtacgcaccgatttgccgctcgaagttgatttcggtcgccgccgcgaacctgactgggagggtcttaaagcgtttttagagcgtcttgaatttggttcgctcttgcatgaattcggccttttagaaagcccgttactggccgaagaagcaccttggccaccgcccgagggcgcgtttttaggttaccgtttgagtcgcccggaaccgatgtgggccgaattactggctcttgcagcgtctgcccagggacgtgtgtatcgcgcggaagaccctcatggtgcgctccgcggcctcttcgaagtccgtggactccttgccaaagacttagctgttgttgcattgcgcgaaggtcttgatttacctccgactgatgatccaatgcttcttgcgtacctcttggacccgtcaaacacgacgcccgaaggcgtagcccgtcgttacggcggcgagtggaccgaagatgcagcgaaacgcgcgttattggccgaacgtttgcacgccaatttattaggacgtttgcaaggcgaggaacgtctcctctggctttacgaagaagtggagaaaccattgagtcgcgtgctcgcgcatatggaagctaccggtgtcaaattagacgtggcgtatttggagaatctcagccttgaagttgctgcccacatgcgccgcttggaggaagaagtattccgtttagcaggccgttcctttcgccttaactctcgcgatcagttagaacgtgtgttgttcgatgaacttggtctccctcctatcggcaagacagagaagaccggtaaacgtagcacttcagcggcggttttagaagctcttcgcgaagtccatcccattgtggacaagatcttgcagtaccgcgaactcgcgaaattgaaaggcacctatattgaccgtcttccggcattagtccacccgaaaacgggacgcctccatacccgcttcaaccaaacagccacggcgaccggtcgtttgtcctcctctgatccaaaccttcagaatattccagtacgtaccccattgggccagaagatccgccgtgcgtttgtagctgaggagggttggcgtttagtggccctcgattatcgtcaaattgaattacgtgtccttgcccatctttctggcgatgagaacctcatccgcgtgtttcaggaaggcaaagacattcacactcaaacggcaagctggatgtttggattatcagctgaagcgatcgatcctttgatgcgtcgtgcagcgaagaccatcaatttcggtgttctctacggtatgagtgcctttcgtttgtcgcaggaattaggcattccctatgaagaagctcaggcgttcattcagaaatactttcaaagctatcccaaagttaaagcatggatcgagaagactctccgtgaaggccgcacacgtggttacgtagagaccttatttggacgtcgccgctatgttcccgatttaaacgctcgcgtgaaaggcaagcgtgaagccgccgaacgcatggcgttcaacatgcctgtacagggcacggcagctgacctcatgaaacttgcaatggtgcgcctttttccacaattgcgtgaagttggtgcccgcatgctcttgcaggtccacgatgaactcttgttagaagcgccaaaagagcgtgcggaagaggtggcagccctcgcgaaagaagttatggaaggcgtgtggcccttagcggtgcctcttgaagtcgaagttggtattggcgaggattggctggctgccaaagga

SEQ ID NO: 5058 - protein, 841 aa, synthetic construct
  REGION 1..841: note = Variant of DNA polymerase I from Thermus sp. strain 2.9
MHHHHHHGGSGVLPVFEPKGRVLLVDGHHLAYRNFFALKGLTTSLGEPVQGVYGFAKSLLKALKEDGDVVIVVFDAKAPSFRHEAYEAYKAGRAPTPEDFPRQLALMKELVDLLGLERLEVPGFEADDVLATLAKKAEREGYEVQILTADRDLFQLLSPRISVLHPAGHRITPEWLWEKYGLRPEQWVDFRALAGDPSDNIPGVKGIGEKTALKLLKEWGSLENLLKNLDQVKPESVREKILAHLEDLKLSRELSRVRTDLPLEVDFGRRREPDWEGLKAFLERLEFGSLLHEFGLLESPLLAEEAPWPPPEGAFLGYRLSRPEPMWAELLALAASAQGRVYRAEDPHGALRGLFEVRGLLAKDLAVVALREGLDLPPTDDPMLLAYLLDPSNTTPEGVARRYGGEWTEDAAKRALLAERLHANLLGRLQGEERLLWLYEEVEKPLSRVLAHMEATGVKLDVAYLENLSLEVAAHMRRLEEEVFRLAGRSFRLNSRDQLERVLFDELGLPPIGKTEKTGKRSTSAAVLEALREVHPIVDKILQYRELAKLKGTYIDRLPALVHPKTGRLHTRFNQTATATGRLSSSDPNLQNIPVRTPLGQKIRRAFVAEEGWRLVALDYRQIELRVLAHLSGDENLIRVFQEGKDIHTQTASWMFGLSAEAIDPLMRRAAKTINFGVLYGMSAFRLSQELGIPYEEAQAFIQKYFQSYPKVKAWIEKTLREGRTRGYVETLFGRRRYVPDLNARVKGKREAAERMAFNMPVQGTAADLMKLAMVRLFPQLREVGARMLLQVHDELLLEAPKERAEEVAALAKEVMEGVWPLAVPLEVEVGIGEDWLAAKG

SEQ ID NO: 5059 - DNA, 2523 bp, synthetic construct
  misc_feature 1..2523: note = Variant of DNA polymerase I from Thermus sp. strain 2.9
  source 1..2523: mol_type = other DNA
atgcaccatcatcatcatcatggcggtagcggcgtgttaccggtgttcgagcctaaaggtcgcgtgcttctggttgatggccatcatctcgcgtatcgtaacttctttgccctgaaaggattaaccaccagcctgggcgagccggtacagggtgtctacggctttgcaaagtcgctcctgaaagctctgaaagaagacggtgatgtggtgattgttgtctttgatgcgaaagcgccaagttttcgccacgaagcgtacgaagcttacaaagccgggcgtgctccaacgccggaagactttcctcgccaattggcgcttatgaaggaattagtggatttgcttggcctcgaacgcttggaagttcccggtttcgaggcagacgacgtattagcgactctcgcaaagaaagccgaacgtgagggctatgaagtccagatcttgacagcagatcgcgatcttttccagcttttatctccgcgcatctcggtgttacacccggaagggcatcgtatcaccccggaatggctctgggagaaatatggtttgcgtcccgaacaatgggtggattttcgcgccttagcaggcgatccgagcgacaatattccgggagttaaaggtatcggcgagaagacggcgctcaagctccttaaagaatgggggtcgttggagaacttgcttaagaatttagatcaggtcaaaccagagtcagtgcgtgagaagattcttgctcacctcgaagacctcaaattaagccgcgaattgtcccgtgtacgcaccgatttgccgctcgaagttgatttcggtcgccgccgcgaacctgactgggagggtcttaaagcgtttttagagcgtcttgaatttggttcgctcttgcatgaattcggccttttagaaagcccgttactggccgaagaagcaccttggccaccgcccgagggcgcgtttttaggttaccgtttgagtcgcccggaaccgatgtgggccgaattactggctcttgcagcgtctgcccagggacgtgtgtatcgcgcggaagaccctcatggtgcgctccgcggcctcttcgaagtccgtggactccttgccaaagacttagctgttgttgcattgcgcgaaggtcttgatttacctccgactgatgatccaatgcttcttgcgtacctcttggacccgtcaaacacgacgcccgaaggcgtagcccgtcgttacggcggcgagtggaccgaagatgcagcgaaacgcgcgttattggccgaacgtttgcacgccaatttattaggacgtttgcaaggcgaggaacgtctcctctggctttacgaagaagtggagaaaccattgagtcgcgtgctcgcgcatatggaagctaccggtgtcaaattagacgtggcgtatttggagaatctcagccttgaagttgctgcccacatgcgccgcttggaggaagaagtattccgtttagcaggccgttcctttcgccttaactctcgcgatcagttagaacgtgtgttgttcgatgaacttggtctccctcctatcggcaagacagagaagaccggtaaacgtagcacttcagcggcggttttagaagctcttcgcgaagtccatcccattgtggacaagatcttgcagtaccgcgaactcgcgaaattgaaaggcacctatattgaccgtcttccggcattagtccacccgaaaacgggacgcctccatacccgcttcaaccaaacagccacggcgaccggtcgtttgtcctcctctgatccaaaccttcagaatattccagtacgtaccccattgggccagaagatccgccgtgcgtttgtagctgaggagggttggcgtttagtggccctcgattatcgtcaattggaattacgtgtccttgcccatctttctggcgatgagaacctcatccgcgtgtttcaggaaggcaaagacattcacactcaaacggcaagctggatgtttggattatcagctgaagcgatcgatcctttgatgcgtcgtgcagcgaagaccatcaatttcggtgttctctacggtatgagtgcctttcgtttgtcgcaggaattaggcattccctatgaagaagctcaggcgttcattcagaaatactttcaaagctatcccaaagttaaagcatggatcgagaagactctccgtgaaggccgcacacgtggttacgtagagaccttatttggacgtcgccgctatgttcccgatttaaacgctcgcgtgaaaggcaagcgtgaagccgccgaacgcatggcgttcaacatgcctgtacagggcacggcagctgacctcatgaaacttgcaatggtgcgcctttttccacaattgcgtgaagttggtgcccgcatgctcttgcaggtccacgatgaactcttgttagaagcgccaaaagagcgtgcggaagaggtggcagccctcgcgaaagaagttatggaaggcgtgtggcccttagcggtgcctcttgaagtcgaagttggtattggcgaggattggctggctgccaaagga

SEQ ID NO: 5060 - protein, 841 aa, synthetic construct
  REGION 1..841: note = Variant of DNA polymerase I from Thermus sp. strain 2.9
MHHHHHHGGSGVLPVFEPKGRVLLVDGHHLAYRNFFALKGLTTSLGEPVQGVYGFAKSLLKALKEDGDVVIVVFDAKAPSFRHEAYEAYKAGRAPTPEDFPRQLALMKELVDLLGLERLEVPGFEADDVLATLAKKAEREGYEVQILTADRDLFQLLSPRISVLHPEGHRITPEWLWEKYGLRPEQWVDFRALAGDPSDNIPGVKGIGEKTALKLLKEWGSLENLLKNLDQVKPESVREKILAHLEDLKLSRELSRVRTDLPLEVDFGRRREPDWEGLKAFLERLEFGSLLHEFGLLESPLLAEEAPWPPPEGAFLGYRLSRPEPMWAELLALAASAQGRVYRAEDPHGALRGLFEVRGLLAKDLAVVALREGLDLPPTDDPMLLAYLLDPSNTTPEGVARRYGGEWTEDAAKRALLAERLHANLLGRLQGEERLLWLYEEVEKPLSRVLAHMEATGVKLDVAYLENLSLEVAAHMRRLEEEVFRLAGRSFRLNSRDQLERVLFDELGLPPIGKTEKTGKRSTSAAVLEALREVHPIVDKILQYRELAKLKGTYIDRLPALVHPKTGRLHTRFNQTATATGRLSSSDPNLQNIPVRTPLGQKIRRAFVAEEGWRLVALDYRQLELRVLAHLSGDENLIRVFQEGKDIHTQTASWMFGLSAEAIDPLMRRAAKTINFGVLYGMSAFRLSQELGIPYEEAQAFIQKYFQSYPKVKAWIEKTLREGRTRGYVETLFGRRRYVPDLNARVKGKREAAERMAFNMPVQGTAADLMKLAMVRLFPQLREVGARMLLQVHDELLLEAPKERAEEVAALAKEVMEGVWPLAVPLEVEVGIGEDWLAAKG

SEQ ID NO: 5061 - DNA, 2523 bp, synthetic construct
  misc_feature 1..2523: note = Variant of DNA polymerase I from Thermus sp. strain 2.9
  source 1..2523: mol_type = other DNA
atgcaccatcatcatcatcatggcggtagcggcgtgttaccggtgttcgagcctaaaggtcgcgtgcttctggttgatggccatcatctcgcgtatcgtaacttctttgccctgaaaggattaaccaccagcctgggcgagccggtacagggtgtctacggctttgcaaagtcgctcctgaaagctctgaaagaagacggtgatgtggtgattgttgtctttgatgcgaaagcgccaagttttcgccacgaagcgtacgaagcttacaaagccgggcgtgctccaacgccggaagactttcctcgccaattggcgcttatgaaggaattagtggatttgcttggcctcgaacgcttggaagttcccggtttcgaggcagacgacgtattagcgactctcgcaaagaaagccgaacgtgagggctatgaagtccagatcttgacagcagatcgcgatcttttccagcttttatctccgcgcatctcggtgttacacccggaagggcatcgtatcaccccggaatggctctgggagaaatatggtttgcgtcccgaacaatgggtggattttcgcgccttagcaggcgatccgagcgacaatattccgggagttaaaggtatcggcgagaagacggcgctcaagctccttaaagaatgggggtcgttggagaacttgcttaagaatttagatcaggtcaaaccagagtcagtgcgtgagaagattcttgctcacctcgaagacctcaaattaagccgcgaattgtcccgtgtacgcaccgatttgccgctcgaagttgatttcggtcgccgccgcgaacctgactgggagggtcttaaagcgtttttagagcgtcttgaatttggttcgctcttgcatgaattcggccttttagaaagcccgttactggccgaagaagcaccttggccaccgcccgagggcgcgtttttaggttaccgtttgagtcgcccggaaccgatgtgggccgaattactggctcttgcagcgtctgcccagggacgtgtgtatcgcgcggaagaccctcatggtgcgctccgcggcctcttcgaagtccgtggactccttgccaaagacttagctgttgttgcattgcgcgaaggtcttgatttacctccgactgatgatccaatgcttcttgcgtacctcttggacccgtcaaacacgacgcccgaaggcgtagcccgtcgttacggcggcgagtggaccgaagatgcagcgaaacgcgcgttattggccgaacgtttgcacgccaatttattaggacgtttgcaaggcgaggaacgtctcctctggctttacgaagaagtggagaaaccattgagtcgcgtgctcgcgcatatggaagctaccggtgtcaaattagacgtggcgtatttggagaatctcagccttgaagttgctgcccacatgcgccgcttggaggaagaagtattccgtttagcaggccgttcctttcgccttaactctcgcgatcagttagaacgtgtgttgttcgatgaacttggtctccctcctatcggcaagacagagaagaccggtaaacgtagcacttcagcggcggttttagaagctcttcgcgaagtccatcccattgtggacaagatcttgcagtaccgcgaactcgcgaaattgaaaggcacctatattgaccgtcttccggcattagtccacccgaaaacgggacgcctccatacccgcttcaaccaaacagccacggcgaccggtcgtttgtcctcctctgatccaaaccttcagaatattccagtacgtaccccattgggccagaagatccgccgtgcgtttgtagctgaggagggttggcgtttagtggccctcgattatcgtcaaattgaattacgtgtccttgcccatctttctggcgatgagaacctcatccgcgtgtttcaggaaggcaaagacattcacactcaaacggcaagctggatgtttggattatcagctgaagcgatcgatcctttgatgcgtcgtgcagcgaagaccatcaatttcggtgttctctacggtatgagtgcctttcgtttgtcgcaggaattaggcattccctatgaagaagctcaggcgttcattcagaaatactttcaaagctatcccaaagttaaagcatggatcgagaagactctccgtgaaggccgcacacgtggttacgtagagaccttatttggacgtcgccgctatgttcccgatttaaacgctcgcgtgaaaggcaagcgtgaagccgccgaacgcatggcgttcaacatgcctgtacagggcacggcagctgacgggatgaaacttgcaatggtgcgcctttttccacaattgcgtgaagttggtgcccgcatgctcttgcaggtccacgatgaactcttgttagaagcgccaaaagagcgtgcggaagaggtggcagccctcgcgaaagaagttatggaaggcgtgtggcccttagcggtgcctcttgaagtcgaagttggtattggcgaggattggctggctgccaaagga

SEQ ID NO: 5062 - protein, 841 aa, synthetic construct
  REGION 1..841: note = Variant of DNA polymerase I from Thermus sp. strain 2.9
MHHHHHHGGSGVLPVFEPKGRVLLVDGHHLAYRNFFALKGLTTSLGEPVQGVYGFAKSLLKALKEDGDVVIVVFDAKAPSFRHEAYEAYKAGRAPTPEDFPRQLALMKELVDLLGLERLEVPGFEADDVLATLAKKAEREGYEVQILTADRDLFQLLSPRISVLHPEGHRITPEWLWEKYGLRPEQWVDFRALAGDPSDNIPGVKGIGEKTALKLLKEWGSLENLLKNLDQVKPESVREKILAHLEDLKLSRELSRVRTDLPLEVDFGRRREPDWEGLKAFLERLEFGSLLHEFGLLESPLLAEEAPWPPPEGAFLGYRLSRPEPMWAELLALAASAQGRVYRAEDPHGALRGLFEVRGLLAKDLAVVALREGLDLPPTDDPMLLAYLLDPSNTTPEGVARRYGGEWTEDAAKRALLAERLHANLLGRLQGEERLLWLYEEVEKPLSRVLAHMEATGVKLDVAYLENLSLEVAAHMRRLEEEVFRLAGRSFRLNSRDQLERVLFDELGLPPIGKTEKTGKRSTSAAVLEALREVHPIVDKILQYRELAKLKGTYIDRLPALVHPKTGRLHTRFNQTATATGRLSSSDPNLQNIPVRTPLGQKIRRAFVAEEGWRLVALDYRQIELRVLAHLSGDENLIRVFQEGKDIHTQTASWMFGLSAEAIDPLMRRAAKTINFGVLYGMSAFRLSQELGIPYEEAQAFIQKYFQSYPKVKAWIEKTLREGRTRGYVETLFGRRRYVPDLNARVKGKREAAERMAFNMPVQGTAADGMKLAMVRLFPQLREVGARMLLQVHDELLLEAPKERAEEVAALAKEVMEGVWPLAVPLEVEVGIGEDWLAAKG

SEQ ID NO: 5063 - DNA, 2523 bp, synthetic construct
  misc_feature 1..2523: note = Variant of DNA polymerase I from Thermus sp. strain 2.9
  source 1..2523: mol_type = other DNA
atgcaccatcatcatcatcatggcggtagcggcgtgttaccggtgttcgagcctaaaggtcgcgtgcttctggttgatggccatcatctcgcgtatcgtaacttctttgccctgaaaggattaaccaccagcctgggcgagccggtacagggtgtctacggctttgcaaagtcgctcctgaaagctctgaaagaagacggtgatgtggtgattgttgtctttgatgcgaaagcgccaagttttcgccacgaagcgtacgaagcttacaaagccgggcgtgctccaacgccggaagactttcctcgccaattggcgcttatgaaggaattagtggatttgcttggcctcgaacgcttggaagttcccggtttcgaggcagacgacgtattagcgactctcgcaaagaaagccgaacgtgagggctatgaagtccagatcttgacagcagatcgcgatcttttccagcttttatctccgcgcatctcggtgttacacccggaagggcatcgtatcaccccggaatggctctgggagaaatatggtttgcgtcccgaacaatgggtggattttcgcgccttagcaggcgatccgagcgacaatattccgggagttaaaggtatcggcgagaagacggcgctcaagctccttaaagaatgggggtcgttggagaacttgcttaagaatttagatcaggtcaaaccagagtcagtgcgtgagaagattcttgctcacctcgaagacctcaaattaagccgcgaattgtcccgtgtacgcaccgatttgccgctcgaagttgatttcggtcgccgccgcgaacctgactgggagggtcttaaagcgtttttagagcgtcttgaatttggttcgctcttgcatgaattcggccttttagaaagcccgttactggccgaagaagcaccttggccaccgcccgagggcgcgtttttaggttaccgtttgagtcgcccggaaccgatgtgggccgaattactggctcttgcagcgtctgcccagggacgtgtgtatcgcgcggaagaccctcatggtgcgctccgcggcctcttcgaagtccgtggactccttgccaaagacttagctgttgttgcattgcgcgaaggtcttgatttacctccgactgatgatccaatgcttcttgcgtacctcttggacccgtcaaacacgacgcccgaaggcgtagcccgtcgttacggcggcgagtggaccgaagatgcagcgaaacgcgcgttattggccgaacgtttgcacgccaatttattaggacgtttgcaaggcgaggaacgtctcctctggctttacgaagaagtggagaaaccattgagtcgcgtgctcgcgcatatggaagctaccggtgtcaaattagacgtggcgtatttggagaatctcagccttgaagttgctgcccacatgcgccgcttggaggaagaagtattccgtttagcaggccgttcctttcgccttaactctcgcgatcagttagaacgtgtgttgttcgatgaacttggtctccctcctatcggcaagacagagaagaccggtaaacgtagcacttcagcggcggttttagaagctcttcgcgaagtccatcccattgtggacaagatcttgcagtaccgcgaactcgcgaaattgaaaggcacctatattgaccgtcttccggcattagtccacccgaaaacgggacgcctccatacccgcttcaaccaaacagccacggcgaccggtcgtttgtcctcctctgatccaaaccttcagaatattccagtacgtaccccattgggccagaagatccgccgtgcgtttgtagctgaggagggttggcgtttagtggccctcgattatcgtcaaattgaattacgtgtccttgcccatctttctggcgatgagaacctcatccgcgtgtttcaggaaggcaaagacattcacactcaaacggcaagctggatgtttggattatcagctgaagcgatcgatcctttgatgcgtcgtgcagcgaagaccatcaatttcggtgttctctacggtatgagtgcctttcgtttgtcgcaggaattaggcattccctatgaagaagctcaggcgttcattcagaaatactttcaaagctatcccaaagttaaagcatggatcgagaagactctccgtgaaggccgcacacgtggtcgtgtagagaccttatttggacgtcgccgctatgttcccgatttaaacgctcgcgtgaaaggcaagcgtgaagccgccgaacgcatggcgttcaacatgcctgtacagggcacggcagctgacctcatgaaacttgcaatggtgcgcctttttccacaattgcgtgaagttggtgcccgcatgctcttgcaggtccacgatgaactcttgttagaagcgccaaaagagcgtgcggaagaggtggcagccctcgcgaaagaagttatggaaggcgtgtggcccttagcggtgcctcttgaagtcgaagttggtattggcgaggattggctggctgccaaagga

SEQ ID NO: 5064 - protein, 841 aa, synthetic construct
  REGION 1..841: note = Variant of DNA polymerase I from Thermus sp. strain 2.9
MHHHHHHGGSGVLPVFEPKGRVLLVDGHHLAYRNFFALKGLTTSLGEPVQGVYGFAKSLLKALKEDGDVVIVVFDAKAPSFRHEAYEAYKAGRAPTPEDFPRQLALMKELVDLLGLERLEVPGFEADDVLATLAKKAEREGYEVQILTADRDLFQLLSPRISVLHPEGHRITPEWLWEKYGLRPEQWVDFRALAGDPSDNIPGVKGIGEKTALKLLKEWGSLENLLKNLDQVKPESVREKILAHLEDLKLSRELSRVRTDLPLEVDFGRRREPDWEGLKAFLERLEFGSLLHEFGLLESPLLAEEAPWPPPEGAFLGYRLSRPEPMWAELLALAASAQGRVYRAEDPHGALRGLFEVRGLLAKDLAVVALREGLDLPPTDDPMLLAYLLDPSNTTPEGVARRYGGEWTEDAAKRALLAERLHANLLGRLQGEERLLWLYEEVEKPLSRVLAHMEATGVKLDVAYLENLSLEVAAHMRRLEEEVFRLAGRSFRLNSRDQLERVLFDELGLPPIGKTEKTGKRSTSAAVLEALREVHPIVDKILQYRELAKLKGTYIDRLPALVHPKTGRLHTRFNQTATATGRLSSSDPNLQNIPVRTPLGQKIRRAFVAEEGWRLVALDYRQIELRVLAHLSGDENLIRVFQEGKDIHTQTASWMFGLSAEAIDPLMRRAAKTINFGVLYGMSAFRLSQELGIPYEEAQAFIQKYFQSYPKVKAWIEKTLREGRTRGRVETLFGRRRYVPDLNARVKGKREAAERMAFNMPVQGTAADLMKLAMVRLFPQLREVGARMLLQVHDELLLEAPKERAEEVAALAKEVMEGVWPLAVPLEVEVGIGEDWLAAKG

SEQ ID NO: 5065 - DNA, 2523 bp, synthetic construct
  misc_feature 1..2523: note = Variant of DNA polymerase I from Thermus sp. strain 2.9
  source 1..2523: mol_type = other DNA
atgcaccatcatcatcatcatggcggtagcggcgtgttaccggtgttcgagcctaaaggtcgcgtgcttctggttgatggccatcatctcgcgtatcgtaacttctttgccctgaaaggattaaccaccagcctgggcgagccggtacagggtgtctacggctttgcaaagtcgctcctgaaagctctgaaagaagacggtgatgtggtgattgttgtctttgatgcgaaagcgccaagttttcgccacgaagcgtacgaagcttacaaagccgggcgtgctccaacgccggaagactttcctcgccaattggcgcttatgaaggaattagtggatttgcttggcctcgaacgcttggaagttcccggtttcgaggcagacgacgtattagcgactctcgcaaagaaagccgaacgtgagggctatgaagtccagatcttgacagcagatcgcgatcttttccagcttttatctccgcgcatctcggtggtacacccggaagggcatcgtatctttccggaatggctctgggagaaatatggtttgcgtcccgaacaatgggtggattttcgcgccttagcaggcgatccgagcgacaatattccgggagttaaaggtatcggcgagaagacggcgctcaagctccttaaagaatgggggtcgttggagaacttgcttaagaatttagatcaggtcaaaccagagtcagtgcgtgagaagattcttgctcacctcgaagacctcaaattaagccgcgaattgtcccgtgtacgcaccgatttgccgctcgaagttgatttcggtcgccgccgcgaacctgactgggagggtcttaaagcgtttttagagcgtcttgaatttggttcgctcttgcatgaattcggccttttagaaagcccgttactggccgaagaagcaccttggccaccgcccgagggcgcgtttttaggttaccgtttgagtcgcccggaaccgatgtgggccgaattactggctcttgcagcgtctgcccagggacgtgtgtatcgcgcggaagaccctcatggtgcgctccgcggcctcttcgaagtccgtggactccttgccaaagacttagctgttgttgcattgcgcgaaggtcttgatttacctccgactgatgatccaatgcttcttgcgtacctcttggacccgtcaaacacgacgcccgaaggcgtagcccgtcgttacggcggcgagtggaccgaagatgcagcgaaacgcgcgttattggccgaacgtttgcacgccaatttattaggacgtttgcaaggcgaggaacgtctcctctggctttacgaagaagtggagaaaccattgagtcgcgtgctcgcgcatatggaagctaccggtgtcaaattagacgtggcgtatttggagaatctcagccttgaagttgctgcccacatgcgccgcttggaggaagaagtattccgtttagcaggccgttcctttcgccttaactctcgcgatcagttagaacgtgtgttgttcgatgaacttggtctccctcctatcggcaagacagagaagaccggtaaacgtagcacttcagcggcggttttagaagctcttcgcgaagtccatcccattgtggacaagatcttgcagtaccgcgaactcgcgaaattgaaaggcacctatattgaccgtcttccggcattagtccacccgaaaacgggacgcctccatacccgcttcaaccaaacagccacggcgaccggtcgtttgtcctcctctgatccaaaccttcagaatattccagtacgtaccccattgggccagaagatccgccgtgcgtttgtagctgaggagggttggcgtttagtggccctcgattatcgtcaaattgaattacgtgtccttgcccatctttctggcgatgagaacctcatccgcgtgtttcaggaaggcaaagacattcacactcaaacggcaagctggatgtttggattatcagctgaagcgatcgatcctttgatgcgtcgtgcagcgaagaccatcaatttcggtgttctctacggtatgagtgcctttcgtttgtcgcaggaattaggcattccctatgaagaagctcaggcgttcattcagaaatactttcaaagctatcccaaagttaaagcatggatcgagaagactctccgtgaaggccgcacacgtggttacgtagagaccttatttggacgtcgccgctatgttcccgatttaaacgctcgcgtgaaaggcaagcgtgaagccgccgaacgcatggcgttcaacatgcctgtacagggcacggcagctgacctcatgaaacttgcaatggtgcgcctttttccacaattgcgtgaagttggtgcccgcatgctcttgcaggtccacgatgaactcttgttagaagcgccaaaagagcgtgcggaagaggtggcagccctcgcgaaagaagttatggaaggcgtgtggcccttagcggtgcctcttgaagtcgaagttggtattggcgaggattggctggctgccaaagga

SEQ ID NO: 5066 - protein, 841 aa, synthetic construct
  REGION 1..841: note = Variant of DNA polymerase I from Thermus sp. strain 2.9
MHHHHHHGGSGVLPVFEPKGRVLLVDGHHLAYRNFFALKGLTTSLGEPVQGVYGFAKSLLKALKEDGDVVIVVFDAKAPSFRHEAYEAYKAGRAPTPEDFPRQLALMKELVDLLGLERLEVPGFEADDVLATLAKKAEREGYEVQILTADRDLFQLLSPRISVVHPEGHRIFPEWLWEKYGLRPEQWVDFRALAGDPSDNIPGVKGIGEKTALKLLKEWGSLENLLKNLDQVKPESVREKILAHLEDLKLSRELSRVRTDLPLEVDFGRRREPDWEGLKAFLERLEFGSLLHEFGLLESPLLAEEAPWPPPEGAFLGYRLSRPEPMWAELLALAASAQGRVYRAEDPHGALRGLFEVRGLLAKDLAVVALREGLDLPPTDDPMLLAYLLDPSNTTPEGVARRYGGEWTEDAAKRALLAERLHANLLGRLQGEERLLWLYEEVEKPLSRVLAHMEATGVKLDVAYLENLSLEVAAHMRRLEEEVFRLAGRSFRLNSRDQLERVLFDELGLPPIGKTEKTGKRSTSAAVLEALREVHPIVDKILQYRELAKLKGTYIDRLPALVHPKTGRLHTRFNQTATATGRLSSSDPNLQNIPVRTPLGQKIRRAFVAEEGWRLVALDYRQIELRVLAHLSGDENLIRVFQEGKDIHTQTASWMFGLSAEAIDPLMRRAAKTINFGVLYGMSAFRLSQELGIPYEEAQAFIQKYFQSYPKVKAWIEKTLREGRTRGYVETLFGRRRYVPDLNARVKGKREAAERMAFNMPVQGTAADLMKLAMVRLFPQLREVGARMLLQVHDELLLEAPKERAEEVAALAKEVMEGVWPLAVPLEVEVGIGEDWLAAKG

SEQ ID NO: 5067 - DNA, 2523 bp, synthetic construct
  misc_feature 1..2523: note = Variant of DNA polymerase I from Thermus sp. strain 2.9
  source 1..2523: mol_type = other DNA
atgcaccatcatcatcatcatggcggtagcggcgtgttaccggtgttcgagcctaaaggtcgcgtgcttctggttgatggccatcatctcgcgtatcgtaacttctttgccctgaaaggattaaccaccagcctgggcgagccggtacagggtgtctacggctttgcaaagtcgctcctgaaagctctgaaagaagacggtgatgtggtgattgttgtctttgatgcgaaagcgccaagttttcgccacgaagcgtacgaagcttacaaagccgggcgtgctccaacgccggaagactttcctcgccaattggcgcttatgaaggaattagtggatttgcttggcctcgaacgcttggaagttcccggtttcgaggcagacgacgtattagcgactctcgcaaagaaagccgaacgtgagggctatgaagtccagatcttgacagcagatcgcgatcttttccagcttttatctccgcgcatctcggtgttacacccggaagggcatcgtatcaccccggaatggctctgggagaaatatggtttgcgtcccgaacaatgggtggattttcgcgccttagcaggcgatccgagcgacaatattccgggagttaaaggtatcggcgagaagacggcgctcaagctccttaaagaatgggggtcgttggagaacttgcttaagaatttagatcaggtcaaaccagagtcagtgcgtgagaagattcttgctcacctcgaagacctcaaattaagccgcgaattgtcccgtgtacgcaccgatttgccgctcgaagttgatttcggtcgccgccgcgaacctgactgggagggtcttaaagcgtttttagagcgtcttgaatttggttcgctcttgcatgaattcggccttttagaaagcccgttactggccgaagaagcaccttggccaccgcccgagggcgcgtttttaggttaccgtttgagtcgcccggaaccgatgtgggccgaattactggctcttgcagcgtctgcccagggacgtgtgtatcgcgcggaagaccctcatggtgcgctccgcggcctcttcgaagtccgtggactccttgccaaagacttagctgttgttgcattgcgcgaaggtcttgatttacctccgactgatgatccaatgcttcttgcgtacctcttggacccgtcaaacacgacgcccgaaggcgtagcccgtcgttacggcggcgagtggaccgaagatgcagcgaaacgcgcgttattggccgaacgtttgcacgccaatttattaggacgtttgcaaggcgaggaacgtctcctctggctttacgaagaagtggagaaaccattgagtcgcgtgctcgcgcatatggaagctaccggtgtcaaattagacgtggcgtatttggagaatctcagccttgaagttgctgcccacatgcgccgcttggaggaagaagtattccgtttagcaggccgttcctttcgccttaactctcgcgatcagttagaacgtgtgttgttcgatgaacttggtctccctcctatcggcaagacagagaagaccggtaaacgtagcacttcagcggcggttttagaagctcttcgcgaagtccatcccattgtggacaagatcttgcagtaccgcgaactcgcgaaattgaaaggcacctatattgaccgtcttccggcattagtccacccgaaaacgggacgcctccatacccgcttcaaccaaacagccacggcgaccggtcgtttgtcctcctctgatccaaaccttcagaatattccagtacgtaccccattgggccagaagatccgccgtgcgtttgtagctgaggagggttggcgtttagtggccctcgatatgcgtcaaattgaattacgtgtccttgcccatctttctggcgatgagaacctcatccgcgtgtttcaggaaggcaaagacattcacactcaaacggcaagctggatgtttggattatcagctgaagcgatcgatcctttgatgcgtcgtgcagcgaagaccatcaatttcggtgttctctacggtatgagtgcctttcgtttgtcgcaggaattaggcattccctatgaagaagctcaggcgttcattcagaaatactttcaaagctatcccaaagttaaagcatggatcgagaagactctccgtgaaggccgcacacgtggttacgtagagaccttatttggacgtcgccgctatgttcccgatttaaacgctcgcgtgaaaggcaagcgtgaagccgccgaacgcatggcgttcaacatgcctgtacagggcacggcagctgacctcatgaaacttgcaatggtgcgcctttttccacaattgcgtgaagttggtgcccgcatgctcttgcaggtccacgatgaactcttgttagaagcgccaaaagagcgtgcggaagaggtggcagccctcgcgaaagaagttatggaaggcgtgtggcccttagcggtgcctcttgaagtcgaagttggtattggcgaggattggctggctgccaaagga

SEQ ID NO: 5068 - protein, 841 aa, synthetic construct
  REGION 1..841: note = Variant of DNA polymerase I from Thermus sp. strain 2.9
MHHHHHHGGSGVLPVFEPKGRVLLVDGHHLAYRNFFALKGLTTSLGEPVQGVYGFAKSLLKALKEDGDVVIVVFDAKAPSFRHEAYEAYKAGRAPTPEDFPRQLALMKELVDLLGLERLEVPGFEADDVLATLAKKAEREGYEVQILTADRDLFQLLSPRISVLHPEGHRITPEWLWEKYGLRPEQWVDFRALAGDPSDNIPGVKGIGEKTALKLLKEWGSLENLLKNLDQVKPESVREKILAHLEDLKLSRELSRVRTDLPLEVDFGRRREPDWEGLKAFLERLEFGSLLHEFGLLESPLLAEEAPWPPPEGAFLGYRLSRPEPMWAELLALAASAQGRVYRAEDPHGALRGLFEVRGLLAKDLAVVALREGLDLPPTDDPMLLAYLLDPSNTTPEGVARRYGGEWTEDAAKRALLAERLHANLLGRLQGEERLLWLYEEVEKPLSRVLAHMEATGVKLDVAYLENLSLEVAAHMRRLEEEVFRLAGRSFRLNSRDQLERVLFDELGLPPIGKTEKTGKRSTSAAVLEALREVHPIVDKILQYRELAKLKGTYIDRLPALVHPKTGRLHTRFNQTATATGRLSSSDPNLQNIPVRTPLGQKIRRAFVAEEGWRLVALDMRQIELRVLAHLSGDENLIRVFQEGKDIHTQTASWMFGLSAEAIDPLMRRAAKTINFGVLYGMSAFRLSQELGIPYEEAQAFIQKYFQSYPKVKAWIEKTLREGRTRGYVETLFGRRRYVPDLNARVKGKREAAERMAFNMPVQGTAADLMKLAMVRLFPQLREVGARMLLQVHDELLLEAPKERAEEVAALAKEVMEGVWPLAVPLEVEVGIGEDWLAAKG

SEQ ID NO: 5069 - DNA, 2523 bp, synthetic construct
  misc_feature 1..2523: note = Variant of DNA polymerase I from Thermus sp. strain 2.9
  source 1..2523: mol_type = other DNA
atgcaccatcatcatcatcatggcggtagcggcgtgttaccggtgttcgagcataaaggtcgcgtgcttctggttgatggccatcatctcgcgtatcgtaacttctttgccctgaaaggattaaccaccagcctgggcgagccggtacagggtgtctacggctttgcaaagtcgctcctgaaagctctgaaagaagacggtgatgtggtgattgttgtctttgatgcgaaagcgccaagttttcgccacgaagcgtacgaagcttacaaagccgggcgtgctccaacgccggaagactttcctcgccaattggcgcttatgaaggaattagtggatttgcttggcctcgaacgcttggaagttcccggtttcgaggcagacgacgtattagcgactctcgcaaagaaagccgaagatgagggctatgaagtccagatcttgacagcagatcgcgatcttttccagcttttatctccgcgcatctcggtgttacacccggaagggcatcgtatcaccccggaatggctctgggagaaatatggtttgcgtcccgaacaatgggtggattttcgcgccttagcaggcgataagagcgacaatattccgggagttaaaggtatcggcgagaagacggcgctcaagctccttaaagaatgggggtcgttggagaacttgcttaagaatttagatcaggtcaaaccagagtcagtgcgtgagaagattcttgctcacctcgaagacctcaagttaagccgcgaattgtcccgtgtacgcaccgatttgccgctcgaagttgatttcggtcgccgccgcgaacctgactgggagggtcttaaagcgtttttagagcgtcttgaatttggttcgctcttgcatgaattcggccttttagaaagcccgttactggccgaagaagcaccttggccaccgcccgagggcgcgtttttaggttaccgtttgagtcgcccggaaccgatgtgggccgaattactggctcttgcagcgtctgcccagggacgtgtgtatcgcgcggaagaccctcatggtgcgctccgcggcctcttcgaagtccgtggactccttgccaaagacttagctgttgttgcattgcgcgaaggtcttgatttacctccgactgatgatccaatgcttcttgcgtacctcttggacccgtcaaacacgacgcccgaaggcgtagcccgtcgttacggcggcgagtggaccgaagatgcagcgaaacgcgcgttattggccgaacgtttgcacgccaatttattaggacgtttgcaaggcgaggagcgtctcctctggctttacgaagaagtggagaaaccattgagtcgcgtgctcgcgcatatggaagctaccggtgtcaaattagacgtggcgtatttggagaatctcagccttgaagttgctgcccacatgcgccgcttggaggaagaagtattccgtttagcaggccgttcctttcgccttaactctcgcgatcagttagaacgtgtgttgttcgatgaacttggtctccctcctatcggcaagacagagaagaccggtaaacgtagcacttcagcggcggttttagaagctcttcgcgaagtccatcccattgtggacaagatcttgcagtaccgcgaactcgcgaaattgaaaggcacctatattgaccgtcttccggcattagtccacccgaaaacgggacgcctccatacccgcttcaaccaaacagccacggcgaccggtcgtttgtcctcctctgatccaaaccttcagaatattccagtacgtaccccattgggccagaagatccgccgtgcgtttgtagctgaggagggttggcgtttagtggccctcgattatcgtcaaattgaattacgtgtccttgcccatctttctggcgatgagaacctcatccgcgtgtttgaagaaggcaaagacattcacactcaaacggcaagctggatgtttggattatcagctgaagcgatcgatcctttgatgcgtcgtgcagcgaagaccatcaatttcggtgttctctacggtatgagtgcctttcgtttgtcgcaggaattaggcattccctatgaagaagctcaggcgttcattcagaaatactttcaaagctatcccaaagttaaagcatggatcgagaagactctccgtgaaggccgcacacgtggttacgtagagaccttatttggacgtcgccgctatgttcccgatttaaacgctcgcgtgaaaggcaagcgtgaagccgccgaacgcatggcgttcaacatgcctgtacagggcacggcagctgacctcatgaaacttgcaatggtgcgcctttttccacaattgcgtgaagttggtgcccgcatgctcttgcaggtccacgatgaactcttgttagaagcgccaaaagagcgtgcggaagaggtggcagccctcgcgaaagaagttatggaaggcgtgtggcccttagcggtgcctcttgaagtcgaagttggtattggcgaggattggctggctgccaaagga

SEQ ID NO: 5070 - protein, 841 aa, synthetic construct
  REGION 1..841: note = Variant of DNA polymerase I from Thermus sp. strain 2.9
MHHHHHHGGSGVLPVFEHKGRVLLVDGHHLAYRNFFALKGLTTSLGEPVQGVYGFAKSLLKALKEDGDVVIVVFDAKAPSFRHEAYEAYKAGRAPTPEDFPRQLALMKELVDLLGLERLEVPGFEADDVLATLAKKAEDEGYEVQILTADRDLFQLLSPRISVLHPEGHRITPEWLWEKYGLRPEQWVDFRALAGDKSDNIPGVKGIGEKTALKLLKEWGSLENLLKNLDQVKPESVREKILAHLEDLKLSRELSRVRTDLPLEVDFGRRREPDWEGLKAFLERLEFGSLLHEFGLLESPLLAEEAPWPPPEGAFLGYRLSRPEPMWAELLALAASAQGRVYRAEDPHGALRGLFEVRGLLAKDLAVVALREGLDLPPTDDPMLLAYLLDPSNTTPEGVARRYGGEWTEDAAKRALLAERLHANLLGRLQGEERLLWLYEEVEKPLSRVLAHMEATGVKLDVAYLENLSLEVAAHMRRLEEEVFRLAGRSFRLNSRDQLERVLFDELGLPPIGKTEKTGKRSTSAAVLEALREVHPIVDKILQYRELAKLKGTYIDRLPALVHPKTGRLHTRFNQTATATGRLSSSDPNLQNIPVRTPLGQKIRRAFVAEEGWRLVALDYRQIELRVLAHLSGDENLIRVFEEGKDIHTQTASWMFGLSAEAIDPLMRRAAKTINFGVLYGMSAFRLSQELGIPYEEAQAFIQKYFQSYPKVKAWIEKTLREGRTRGYVETLFGRRRYVPDLNARVKGKREAAERMAFNMPVQGTAADLMKLAMVRLFPQLREVGARMLLQVHDELLLEAPKERAEEVAALAKEVMEGVWPLAVPLEVEVGIGEDWLAAKG

SEQ ID NO: 5071 - DNA, 2523 bp, synthetic construct
  misc_feature 1..2523: note = Variant of DNA polymerase I from Thermus sp. strain 2.9
  source 1..2523: mol_type = other DNA
atgcaccatcatcatcatcatggcggtagcggcgtgttaccggtgttcgagcctaaaggtcgcgtgcttctggttgatggccatcatctcgcgtatcgtaacttctttgccctgaaaggattaaccaccagcctgggcgagccggtacagggtgtctacggctttgcaaagtcgctcctgaaagctctgaaagaagacggtgatgtggtgattgttgtctttgatgcgaaagcgccaagttttcgccacgaagcgtacgaagcttacaaagccgggcgtgctccaacgccggaagactttcctcgccaattggcgcttatgaaggaattagtggatttgcttggcctcgaacgcttggaagttcccggtttcgaggcagacgacgtattagcgactctcgcaaagaaagccgaacgtgagggctatgaagtccagatcttgacagcagatcgcgatcttttccagcttttatctccgcgcatctcggtgttacacccggaagggcatcgtatcaccccggaatggctctgggagaaatatggtttgcgtcccgaacaatgggtggattttcgcgccttagcaggcgatccgagcgacaatattccgggagttaaaggtatcggcgagaagacggcgctcaagctccttaaagaatgggggtcgttggagaacttgcttaagaatttagatcaggtcaaaccagagtcagtgcgtgagaagattcttgctcacctcgaagacctcaaattaagccgcgaattgtcccgtgtacgcaccgatttgccgctcgaagttgatttcggtcgccgccgcgaacctgactgggagggtcttaaagcgtttttagagcgtcttgaatttggttcgctcttgcatgaattcggccttttagaaagcccgttactggccgaagaagcaccttggccaccgcccgagggcgcgtttttaggttaccgtttgagtcgcccggaaccgatgtgggccgaattactggctcttgcagcgtctgcccagggacgtgtgtatcgcgcggaagaccctcatggtgcgctccgcggcctcttcgaagtccgtggactccttgccaaagacttagctgttgttgcattgcgcgaaggtcttgatttacctccgactgatgatccaatgcttcttgcgtacctcttggacccgtcaaacacgacgcccgaaggcgtagcccgtcgttacggcggcgagtggaccgaagatgcagcgaaacgcgcgttattggccgaacgtttgcacgccaatttattaggacgtttgcaaggcgaggaacgtctcctctggctttacgaagaagtggagaaaccattgagtcgcgtgctcgcgcatatggaagctaccggtgtcaaattagacgtggcgtatttggagaatctcagccttgaagttgctgcccacatgcgccgcttggaggaagaagtattccgtttagcaggccgttcctttcgccttaactctcgcgatcagttagaacgtgtgttgttcgatgaacttggtctccctcctatcggcaagacagagaagaccggtaaacgtagcacttcagcggcggttttagaagctcttcgcgaagtccatcccattgtggacaagatcttgcagtaccgcgaactcgcgaaaccgaaaggcacctatattgaccgtcttccggcattagtccacccgaaaacgggacgcctccatacccgcttcaaccaaacagccacggcgaccggtcgtttgtcctcctctgatccaaaccttcagaatattccagtacgtaccccattgggccagaagatccgccgtgcgtttgtagctgaggagggttggcgtttagtggccctcgattatcgtcaaattgaattacgtgtccttgcccatctttctggcgatgagaacctcatccgcgtgtttcaggaaggcaaagacattcacactcaaacggcaagctggatgtttggattatcagctgaagcgatcgatcctttgatgcgtcgtgcagcgaagaccatcaatttcggtgttctctacggtatgagtgcctttcgtttgtcgcaggaattaggcattccctatgaagaagctcaggcgttcattcagaaatactttcaaagctatcccaaagttaaagcatggatcgagaagactctccgtgaaggccgcacacgtggttacgtagagaccttatttggacgtcgccgctatgttcccgatttaaacgctcgcgtgaaaggcaagcgtgaagccgccgaacgcatggcgttcaacatgcctgtacagggcacggcagctgacctcatgaaacttgcaatggtgcgcctttttccacaattgcgtgaagttggtgcccgcatgctcttgcaggtccacgatgaactcttgttagaagcgccaaaagagcgtgcggaagaggtggcagccctcgcgaaagaagttatggaaggcgtgtggcccttagcggtgcctcttgaagtcgaagttggtattggcgaggattggctggctgccaaagga

SEQ ID NO: 5072 - protein, 841 aa, synthetic construct
  REGION 1..841: note = Variant of DNA polymerase I from Thermus sp. strain 2.9
MHHHHHHGGSGVLPVFEPKGRVLLVDGHHLAYRNFFALKGLTTSLGEPVQGVYGFAKSLLKALKEDGDVVIVVFDAKAPSFRHEAYEAYKAGRAPTPEDFPRQLALMKELVDLLGLERLEVPGFEADDVLATLAKKAEREGYEVQILTADRDLFQLLSPRISVLHPEGHRITPEWLWEKYGLRPEQWVDFRALAGDPSDNIPGVKGIGEKTALKLLKEWGSLENLLKNLDQVKPESVREKILAHLEDLKLSRELSRVRTDLPLEVDFGRRREPDWEGLKAFLERLEFGSLLHEFGLLESPLLAEEAPWPPPEGAFLGYRLSRPEPMWAELLALAASAQGRVYRAEDPHGALRGLFEVRGLLAKDLAVVALREGLDLPPTDDPMLLAYLLDPSNTTPEGVARRYGGEWTEDAAKRALLAERLHANLLGRLQGEERLLWLYEEVEKPLSRVLAHMEATGVKLDVAYLENLSLEVAAHMRRLEEEVFRLAGRSFRLNSRDQLERVLFDELGLPPIGKTEKTGKRSTSAAVLEALREVHPIVDKILQYRELAKPKGTYIDRLPALVHPKTGRLHTRFNQTATATGRLSSSDPNLQNIPVRTPLGQKIRRAFVAEEGWRLVALDYRQIELRVLAHLSGDENLIRVFQEGKDIHTQTASWMFGLSAEAIDPLMRRAAKTINFGVLYGMSAFRLSQELGIPYEEAQAFIQKYFQSYPKVKAWIEKTLREGRTRGYVETLFGRRRYVPDLNARVKGKREAAERMAFNMPVQGTAADLMKLAMVRLFPQLREVGARMLLQVHDELLLEAPKERAEEVAALAKEVMEGVWPLAVPLEVEVGIGEDWLAAKG

SEQ ID NO: 5073 - DNA, 2523 bp, synthetic construct
  misc_feature 1..2523: note = Variant of DNA polymerase I from Thermus sp. strain 2.9
  source 1..2523: mol_type = other DNA
atgcaccatcatcatcatcatggcggtagcggcgtgttaccggtgttcgagcataaaggtcgcgtgcttctggttgatggccatcatctcgcgtatcgtaacttctttgccctgaaaggattaaccaccagcctgggcgagccggtacagggtgtctacggctttgcaaagtcgctcctgaaagctctgaaagaagacggtgatgtggtgattgttgtctttgatgcgaaagcgccaagttttcgccacgaagcgtacgaagcttacaaagccgggcgtgctccaacgccggaagactttcctcgccaattggcgcttatgaaggaattagtggatttgcttggcctcgaacgcttggaagttcccggtttcgaggcagacgacgtattagcgactctcgcaaagaaagccgaacgtgagggctatgaagtccagatcttgacaggggatcgcgatcttttccagcttttatctccgcgcatctcggtgttacacccggaagggcatcgtatcaccccggaatggctctgggagaaatatggtttgcgtcccgaacaatgggtggattttcgcgccttagcaggcgatccgagcgacaatattccgggagttaaaggtatcggcgagaagacggcgctcaagctccttaaagaatgggggtcgttggagaacttgcttaagaatttagatcaggtcaaaccagagtcagtgcgtgagaagattcttgctcacctcgaagacctcaaattaagccgcgaattgtcccgcgtacgcaccgatttgccgctcgaagttgatttcggtcgccgccgcgaacctgactgggagggtcttaaagcgtttttagagcgtcttgaatttggttcgctcttgcatgaattcggccttttagaaagcccgttactggccgaagaagcaccttggccaccgcccgagggcgcgtttttaggttaccgtttgagtcgcccggaaccgatgtgggccgaattactggctcttgcagcgtctgcccagggacgtgtgtatcgcgcggaagaccctcatggtgcgctccgtggcctcttcgaagtccgtggactccttgccaaagacttagctgttgttgcattgcgcgaaggtcttgatttacctccgactgatgatccaatgcttcttgcgtacctcttggacccgtcaaacaccacgcccgaaggcgtagcccgtcgttacggcggcgagtggaccgaagatgcagcgaaacgcgcgttattggccgaacgtttgcacgaaaatttattaggacgtttgcaaggcgaggaacgtctcctctggctttacgaagaagtggagaaaccattgagtcgcgtgctcgcgcatatggaagctaccggtgtcaaattagacgtggcgtatttggagaatctcagccttgaagttgctgcccacatgcgccgcttggaggaagaagtagtccgtttagcaggcctttcctttcgccttaactctcgcgatcagttagaacgtgtgttgttcgatgaacttggtctccctcctatcggcaagacagagaagaccggtaaacgtagcacttcagcggcggttttagaagctcttcgcgaagtccatcccattgtggacaagatcttgcagtaccgcgagatggcgaaattgaaaggcacctatattgaccgtcttccggcattagtccacccgaaaacgggacgcctccatacccgcttcaaccaaacagccacggcgaccggtcgtttgtcctcctctgatccaaaccttcagaatattccagtacgtaccccattgggccagaagatccgccgtgcgtttgtagctgaggagggttggcgtttagtggccctcgattatcgtcaaattgaattacgtgtccttgcccatctttctggcgatgagaacctcatccgcgtgtttcaggaaggcaaagacattcacactcaaacggcaagctggatgtttggattatcagctgaagcgatcgatcctttgatgcgtcgtgcagcgaagaccatcaatttcggtgttctctacggtatgagtgcctttcgtttgtcgcaggaattaggcattccctatgaagaagctcaggcgttcattcaaaaatactttcaaagctatcccaaagttaaagcatggatcgagaagactctccgtgaaggccgcacacgtggttacgtagagaccttatttggacgtcgccgctatgttcccgatttagcagctcgcgtgaaaggcaagcgtgaagccgccgaacgcatggcgttcaacatgcctgtacagggcacggcagctgacctcatgaaacttgcaatggtgcgcctttttccacaattgcgtgaagttggtgcccgcatgctcttgcaggtccacgatgaactcttgttagaagcgccaaaagagcgtgcggaagaggtggcagccctcgcgaaagaagttatggaaggcgtgtggcccttagcggtgcctcttgaagtcgaagttggtattggcgaggattggctggctgccaaagga

SEQ ID NO: 5074 - protein, 841 aa, synthetic construct
  REGION 1..841: note = Variant of DNA polymerase I from Thermus sp. strain 2.9
MHHHHHHGGSGVLPVFEHKGRVLLVDGHHLAYRNFFALKGLTTSLGEPVQGVYGFAKSLLKALKEDGDVVIVVFDAKAPSFRHEAYEAYKAGRAPTPEDFPRQLALMKELVDLLGLERLEVPGFEADDVLATLAKKAEREGYEVQILTGDRDLFQLLSPRISVLHPEGHRITPEWLWEKYGLRPEQWVDFRALAGDPSDNIPGVKGIGEKTALKLLKEWGSLENLLKNLDQVKPESVREKILAHLEDLKLSRELSRVRTDLPLEVDFGRRREPDWEGLKAFLERLEFGSLLHEFGLLESPLLAEEAPWPPPEGAFLGYRLSRPEPMWAELLALAASAQGRVYRAEDPHGALRGLFEVRGLLAKDLAVVALREGLDLPPTDDPMLLAYLLDPSNTTPEGVARRYGGEWTEDAAKRALLAERLHENLLGRLQGEERLLWLYEEVEKPLSRVLAHMEATGVKLDVAYLENLSLEVAAHMRRLEEEVVRLAGLSFRLNSRDQLERVLFDELGLPPIGKTEKTGKRSTSAAVLEALREVHPIVDKILQYREMAKLKGTYIDRLPALVHPKTGRLHTRFNQTATATGRLSSSDPNLQNIPVRTPLGQKIRRAFVAEEGWRLVALDYRQIELRVLAHLSGDENLIRVFQEGKDIHTQTASWMFGLSAEAIDPLMRRAAKTINFGVLYGMSAFRLSQELGIPYEEAQAFIQKYFQSYPKVKAWIEKTLREGRTRGYVETLFGRRRYVPDLAARVKGKREAAERMAFNMPVQGTAADLMKLAMVRLFPQLREVGARMLLQVHDELLLEAPKERAEEVAALAKEVMEGVWPLAVPLEVEVGIGEDWLAAKG

SEQ ID NO: 5075 - DNA, 2523 bp, synthetic construct
  misc_feature 1..2523: note = Variant of DNA polymerase I from Thermus sp. strain 2.9
  source 1..2523: mol_type = other DNA
atgcaccatcatcatcatcatggcggtagcggcgtgttaccggtgttcgagcataaaggtcgcgtgcttctggttgatggccatcatctcgcgtatcgtaacttctttgccctgaaaggattaaccaccagcctgggcgagccggtacagggtgtctacggctttgcaaagtcgctcctgaaagctctgaaagaagacggtgatgtggtgattgttgtctttgatgcgaaagcgccaagttttcgccacgaagcgtacgaagcttacaaagccgggcgtgctccaacgccggaagactttcctcgccaattggcgcttatgaaggaattagtggatttgcttggcctcgaacgcttggaagttcccggtttcgaggcagacgacgtattagcgactctcgcaaagaaagccgaacgtgagggctatgaagtccagatcttgacaggggatcgcgatcttttccagcttttatctccgcgcatctcggtgttacacccggaagggcatcgtatcaccccggaatggctctgggagaaatatggtttgcgtcccgaacaatgggtggattttcgcgccttagcaggcgatccgagcgacaatattccgggagttaaaggtatcggcgagaagacggcgctcaagctccttaaagaatgggggtcgttggagaacttgcttaagaatttagatcaggtcaaaccagagtcagtgcgtgagaagattcttgctcacctcgaagacctcaaattaagccgcgaattgtcccgcgtacgcaccgatttgccgctcgaagttgatttcggtcgccgccgcgaacctgactgggagggtcttaaagcgtttttagagcgtcttgaatttggttcgctcttgcatgaattcggccttttagaaagcgggttactggccgaagaagcaccttggccaccgcccgagggcgcgtttttaggttaccgtttgagtcgcccggaaccgatgtgggccgaattactggctcttgcagcgtctgcccagggacgtgtgtatcgcgcggaagaccctcatggtgcgctccgcggcctcttcgaagtccgtggactccttgccaaagacttagctgttgttgcattgcgcgaaggtcttgatttacctccgactgatgatccaatgcttcttgcgtacctcttggacccgtcaaacacgacgcccgaaggcgtagcccgtcgttacggcggcgagtggaccgaagatgcagcgaaacgcgcgttattggccgaacgtttgcacgcaaatttattaggacgtttgcaaggcgaggaacgtctcctctggctttacgaagaagtggagaaaccattgagtcgcgtgctcgcgcatatggaagcgaccggtgtcaaattagacgtggcgtatttggagaatctcagccttgaagttgctgcccacatgcgccgcttggaggaagaagtattccgtttagcaggccgttcctttcgccttaactctcgcgatcagttagaacgtgtgttgttcgatgaacttggtctccctcctatcggcaagacagagaagaccggtaaacgtagcacttcagcggcggttttagaagctcttcgcgaagtccatcccattgtggacaagatcttgcagtaccgcgagatggcgaaattgaaaggcacctatattgaccgtcttccggcattagtccacccgaaaacgggacgcctccatacccgcttcaaccaaacagccacggcgaccggtcgtttgtcctcctctgatccaaaccttcagaatattccagtacgtaccccattgggccagaagatccgccgtgcgtttgtagctgaggagggttggcgtttagtggccctcgattatcgtcaaattgaactgcgtgtccttgcccatctttctggcgatgagaacctcatccgcgtgtttcaggaaggcaaagacattcacactcaaacggcaagctggatgtttggattatcagctgaagcgatcgatcctttgatgcgtcgtgcagcgaagaccatcaatttcggtgttctctacggtatgagtgcctttcgtttgtcgcaggagttaggcattccctatgaagaagctcaggcgttcattcagaaatactttcaaagctatcccaaagttaaagcatggatcgagaagactctccgtgaaggccgcacacgtggttacgtagagaccttatttggacgtcgccgctatgttcccgatttagcagctcgcgtgaaaggcaagcgtgaagccgccgaacgcatggcgttcaacatgcctgtacagggcacggcagctgactgtatgaaacttgcaatggtgcgcctttttccacaattgcgtgaagttggtgcccgcatgctcttgcaggtccacgatgaactcttgttagaagcgccaaaagagcgtgcggaagaggtggcagccctcgcgaaagaagttatggaaggcgtatggcccttagcggtgcctcttgaagtcgaagttggtattggcgaggattggctggctgccaaagga

SEQ ID NO: 5076 - protein, 841 aa, synthetic construct
  REGION 1..841: note = Variant of DNA polymerase I from Thermus sp. strain 2.9
MHHHHHHGGSGVLPVFEHKGRVLLVDGHHLAYRNFFALKGLTTSLGEPVQGVYGFAKSLLKALKEDGDVVIVVFDAKAPSFRHEAYEAYKAGRAPTPEDFPRQLALMKELVDLLGLERLEVPGFEADDVLATLAKKAEREGYEVQILTGDRDLFQLLSPRISVLHPEGHRITPEWLWEKYGLRPEQWVDFRALAGDPSDNIPGVKGIGEKTALKLLKEWGSLENLLKNLDQVKPESVREKILAHLEDLKLSRELSRVRTDLPLEVDFGRRREPDWEGLKAFLERLEFGSLLHEFGLLESGLLAEEAPWPPPEGAFLGYRLSRPEPMWAELLALAASAQGRVYRAEDPHGALRGLFEVRGLLAKDLAVVALREGLDLPPTDDPMLLAYLLDPSNTTPEGVARRYGGEWTEDAAKRALLAERLHANLLGRLQGEERLLWLYEEVEKPLSRVLAHMEATGVKLDVAYLENLSLEVAAHMRRLEEEVFRLAGRSFRLNSRDQLERVLFDELGLPPIGKTEKTGKRSTSAAVLEALREVHPIVDKILQYREMAKLKGTYIDRLPALVHPKTGRLHTRFNQTATATGRLSSSDPNLQNIPVRTPLGQKIRRAFVAEEGWRLVALDYRQIELRVLAHLSGDENLIRVFQEGKDIHTQTASWMFGLSAEAIDPLMRRAAKTINFGVLYGMSAFRLSQELGIPYEEAQAFIQKYFQSYPKVKAWIEKTLREGRTRGYVETLFGRRRYVPDLAARVKGKREAAERMAFNMPVQGTAADCMKLAMVRLFPQLREVGARMLLQVHDELLLEAPKERAEEVAALAKEVMEGVWPLAVPLEVEVGIGEDWLAAKG

SEQ ID NO: 5077 - DNA, 2523 bp, synthetic construct
  misc_feature 1..2523: note = Variant of DNA polymerase I from Thermus sp. strain 2.9
  source 1..2523: mol_type = other DNA
atgcaccatcatcatcatcatggcggtagcggcgtgttaccggtgttcgagcataaaggtcgcgtgcttctggttgatggccatcatctcgcgtatcgtaacttctttgccctgaaaggattaaccaccagcctgggcgagccggtacagggtgtctacggctttgcaaagtcgctcctgaaagctctgaaagaagacggtgatgtggtgattgttgtctttgatgcgaaagcgccaagttttcgccacgaagcgtacgaagcttacaaagccgggcgtgctccaacgccggaagactttcctcgccaattggcgcttatgaaggaattagtggatttgcttggcctcgaacgcttggaagttcccggtttcgaggcagacgacgtattagcgactctcgcaaagaaagccgaacgtgagggctatgaagtccagatcttgacagcggatcgcgatcttttccagcttttatctccgcgcatctcggtgttacacccggaagggcatcgtatcaccccggaatggctctgggagaaatatggtttgcgtcccgaacaatgggtggattttcgcgccttagcaggcgatccgagcgacaatattccgggagttaaaggtatcggcgagaagacggcgctcaagctccttaaagaatgggggtcgttggagaacttgcttaagaatttagatcaggtcaaaccagagtcagtgcgtgagaagattcttgctcacctcgaagacctcaaattaagccgcgaattgtcccgcgtacgcaccgatttgccgctcgaagttgatttcggtcgccgccgcgaacctgactgggagggtcttaaagcgtttttagagcgtcttgaatttggttcgctcttgcatgaattcggccttttagaaagcccgttactggccgaagaagcaccttggccaccgcccgagggcgcgtttttaggttaccgtttgagtcgcccggaaccgatgtgggccgaattactggctcttgcagcgtctgcccagggacgtgtgtatcgcgcggaagaccctcatggtgcgctccgcggcctcttcgaagtccgtggactccttgccaaagacttagctgttgttgcattgcgcagcggtcttgatttacctccgactgatgatccaatgcttcttgcgtacctcttggacccgtcaaacacgacgcccgaaggcgtagcccgtcgttacggcggcgagtggaccgaagatgcagcgaaacgcgcgttattggccgaacgtttgcacgaaaatttattaggacgtttgcaaggcgaggaacgtctcctctggctttacgaagaagtggagaaaccattgagtcgcgtgctcgcgcatatggaagctaccggtgtcaaattagacgtggcgtatttggagaatctcagccttgaagttgctgcccacatgcgccgcttggaggaagaagtattccgtttagcaggccgttcctttcgccttaactctcgcgatcagttagaacgtgtgttgttcgatgaacttggtctccctcctatcggcaagacagagaagaccggtaaacgtagcacttcagcggcggttttagaagctcttcgctgggtccatcccattgtggacaagatcttgcagtaccgctgcatggcgaaattgaaaggcacctatattgaccgtcttccggcattagtccacccgaaaacgggacgcctccatacccgcttcaaccaaacagccacggcgaccggtcgtttgtcctcctctgatccaaaccttcagaatattccagtacgtaccccattggctcagaagatccgccgtgcgtttgtagctgaggagggttggcgtttagtggccctcgattatcgtcaaattgaattacgtgtccttgcccatctttctggcgatgagaacctcatccgcgtgtttcaggaaggcaaagacattcacactcaaacggcaagctggatgtttggattatcagctgaagcgatcgatcctttgatgcgtcgtgcagcgaagaagatcaatttcggtgttctctacggtatgagtgcctttcgtttgtcgcaggaattaggcattccctatgaagaagctcaggcgttcattcagaaatactttcaaagctatcccaaagttaaagcatggatcgagaagactctccgtgaaggccgcacacgtggttacgtagagaccttatttggacgtcgccgctatgttcccgatttaaacgctcgcgtgaaaggcaagcgtgaagccgccgaacgcatggcgttcaacatgcctgtacagggcacggcagctgactgtatgaaacttgcaatggtgcgcctttttccacaattgcgtgaagttggtgcccgcatgctcttgcaggtccacgatgaactcttgttagaagcgccaaaagagcgtgcggaagaggtggcagccctcgcgaaagaagttatggaaggcgtgtggcccttagcggtgcctcttgaagtcgaagttggtattggcgaggattggctggctgccaaagga

SEQ ID NO: 5078 - protein, 841 aa, synthetic construct
  REGION 1..841: note = Variant of DNA polymerase I from Thermus sp. strain 2.9
MHHHHHHGGSGVLPVFEHKGRVLLVDGHHLAYRNFFALKGLTTSLGEPVQGVYGFAKSLLKALKEDGDVVIVVFDAKAPSFRHEAYEAYKAGRAPTPEDFPRQLALMKELVDLLGLERLEVPGFEADDVLATLAKKAEREGYEVQILTADRDLFQLLSPRISVLHPEGHRITPEWLWEKYGLRPEQWVDFRALAGDPSDNIPGVKGIGEKTALKLLKEWGSLENLLKNLDQVKPESVREKILAHLEDLKLSRELSRVRTDLPLEVDFGRRREPDWEGLKAFLERLEFGSLLHEFGLLESPLLAEEAPWPPPEGAFLGYRLSRPEPMWAELLALAASAQGRVYRAEDPHGALRGLFEVRGLLAKDLAVVALRSGLDLPPTDDPMLLAYLLDPSNTTPEGVARRYGGEWTEDAAKRALLAERLHENLLGRLQGEERLLWLYEEVEKPLSRVLAHMEATGVKLDVAYLENLSLEVAAHMRRLEEEVFRLAGRSFRLNSRDQLERVLFDELGLPPIGKTEKTGKRSTSAAVLEALRWVHPIVDKILQYRCMAKLKGTYIDRLPALVHPKTGRLHTRFNQTATATGRLSSSDPNLQNIPVRTPLAQKIRRAFVAEEGWRLVALDYRQIELRVLAHLSGDENLIRVFQEGKDIHTQTASWMFGLSAEAIDPLMRRAAKKINFGVLYGMSAFRLSQELGIPYEEAQAFIQKYFQSYPKVKAWIEKTLREGRTRGYVETLFGRRRYVPDLNARVKGKREAAERMAFNMPVQGTAADCMKLAMVRLFPQLREVGARMLLQVHDELLLEAPKERAEEVAALAKEVMEGVWPLAVPLEVEVGIGEDWLAAKG

SEQ ID NO: 5079 - DNA, 2523 bp, synthetic construct
  misc_feature 1..2523: note = Variant of DNA polymerase I from Thermus sp. strain 2.9
  source 1..2523: mol_type = other DNA
atgcaccatcatcatcatcatggcggtagcggcgtgttaccggtgttcgagcctaaaggtcgcgtgcttctggttgatggccatcatctcgcgtatcgtaacttctttgccctgaaaggattaaccaccagcctgggcgagccggtacagggtgtctacggctttgcaaagtcgctcctgaaagctctgaaagaagacggtgatgtggtgattgttgtctttgatgcgaaagcgccaagttttcgccacgaagcgtacgaagcttacaaagccgggcgtgctccaacgccggaagactttcctcgccaattggcgcttatgaaggaattagtggatttgcttggcctcgaacgcttggaagttcccggtttcgaggcagacgacgtattagcgactctcgcaaagaaagccgaacgtgagggctatgaagtccagatcttgacagcggatcgcgatcttttccagcttttatctccgcgcatctcggtgttacacccggaagggcatcgtatcaccccggaatggctctgggagaaatatggtttgcgtcccgaacaatgggtggattttcgcgccttagcaggcgatccgagcgacaatattccgggagttaaaggtatcggcgagaagacggcgctcaagctccttaaagaatgggggtcgttggagaacttgcttaagaatttagatcaggtcaaaccagagtcagtgcgtgagaagattcttgctcacctcgaagacctcaaattaagccgcgaattgtccagcgtacgcaccgatttgccgctcgaagttgatttcggtcgccgccgcgaacctgactgggagggtcttaaagcgtttttagagcgtcttgaatttggttcgctcttgcatgaattcggccttttagaaagcgggttactggccgaagaagcaccttggccaccgcccgagggcgcgtttttaggttaccgtttgagtcgcccggaaccgatgtgggccgaattactggctcttgcagcgtctgcccagggacgtgtgtatcgcgcggaagaccctcatggtgcgctccgcggcctcttcgaagtccgtggactccttgccctggacttagctgttgttgcattgcgcgaaggtcttgatttacctccgactgatgatccaatgcttcttgcgtacctcttggacccgtcaaacaccacgcccgaaggcgtagcccgtcgttacggcggcgagtggaccgaagatgcagcgaaacgcgcgttattggccgaacgtttgcacgcaaatttattaggacgtttgcaaggcgaggaacgtctcctctggctttacgaagaagtggagaaaccattgagtcgcgtgctcgcgcatatggaagctaccggtgtcaaattagacgtggcgtatttggagaatctcagccttgaagttgctgcccacatgcgccgcttggaggaagaagtattccgtttagcaggccgttcctttcgccttaactctcgcgatcagttagaacgtgtgttgttcgatgaacttggtctccctcctatcggcaagacagagaagaccggtaaacgtagcacttcagcggcggttttagaagctcttcgcgaagtccatcccattgtggacaagatcttgcagtaccgctgtatggcgaaattgaaaggcacctatattgaccgtcttccggcattagtccacccgaaaacgggacgcctccatacccgcttcaaccaaacagccacggcgaccggtcgtttgtcctcctctgatccaaaccttcagaatattccagtacgtaccccattgggtcagaagatccgccgtgcgtttgtagctgaggagggttggcgtttagtggccctcgattatcgtcaaattgaattacgtgtccttgcccatctttctggcgatgagaacctcatccgcgtgtttcaggaaggcaaagacattcacactcaaacggcaagctggatgtttggattatcagctgaagcgatcgatcctttgatgcgtcgtgcagcgaagaagatcaatttcggtgttctctacggtatgagtgcctttcgtttgtcgcaggtgttaggcattccctatgaagaagctcaggcgttcattcaaaaatactttcaaagctatcccaaagttaaagcatggatcgagaagactctccgtgaaggccgcacacgtggttacgtagagaccttatttggacgtcgccgctatgttcccgatttaaatgctcgcgtgaaaggcaagcgtgaagccgccgaacgcatggcgttcaacatgcctgtacagggcacggcagctgacctgatgaaacttgcaatggtgcgcctttttccacaattgcgtgaagttggtgcccgcatgctcttgcaggtccacgatgaactcttgttagaagcgccaaaagagcgtgcggaagaggtggcagccctcgcgaaagaagttatggaaggcgtatggcccttagcggtgcctcttgaagtcgaagttggtattggcgaggattggctggctgccaaagga

SEQ ID NO: 5080 - protein, 841 aa, synthetic construct
  REGION 1..841: note = Variant of DNA polymerase I from Thermus sp. strain 2.9
MHHHHHHGGSGVLPVFEPKGRVLLVDGHHLAYRNFFALKGLTTSLGEPVQGVYGFAKSLLKALKEDGDVVIVVFDAKAPSFRHEAYEAYKAGRAPTPEDFPRQLALMKELVDLLGLERLEVPGFEADDVLATLAKKAEREGYEVQILTADRDLFQLLSPRISVLHPEGHRITPEWLWEKYGLRPEQWVDFRALAGDPSDNIPGVKGIGEKTALKLLKEWGSLENLLKNLDQVKPESVREKILAHLEDLKLSRELSSVRTDLPLEVDFGRRREPDWEGLKAFLERLEFGSLLHEFGLLESGLLAEEAPWPPPEGAFLGYRLSRPEPMWAELLALAASAQGRVYRAEDPHGALRGLFEVRGLLALDLAVVALREGLDLPPTDDPMLLAYLLDPSNTTPEGVARRYGGEWTEDAAKRALLAERLHANLLGRLQGEERLLWLYEEVEKPLSRVLAHMEATGVKLDVAYLENLSLEVAAHMRRLEEEVFRLAGRSFRLNSRDQLERVLFDELGLPPIGKTEKTGKRSTSAAVLEALREVHPIVDKILQYRCMAKLKGTYIDRLPALVHPKTGRLHTRFNQTATATGRLSSSDPNLQNIPVRTPLGQKIRRAFVAEEGWRLVALDYRQIELRVLAHLSGDENLIRVFQEGKDIHTQTASWMFGLSAEAIDPLMRRAAKKINFGVLYGMSAFRLSQVLGIPYEEAQAFIQKYFQSYPKVKAWIEKTLREGRTRGYVETLFGRRRYVPDLNARVKGKREAAERMAFNMPVQGTAADLMKLAMVRLFPQLREVGARMLLQVHDELLLEAPKERAEEVAALAKEVMEGVWPLAVPLEVEVGIGEDWLAAKG

SEQ ID NO: 5081 - DNA, 2523 bp, synthetic construct
  misc_feature 1..2523: note = Variant of DNA polymerase I from Thermus sp. strain 2.9
  source 1..2523: mol_type = other DNA
atgcaccatcatcatcatcatggcggtagcggcgtgttaccggtgttcgagcctaaaggtcgcgtgcttctggttgatggccatcatctcgcgtatcgtaacttctttgccctgaaaggattaaccaccagcctgggcgagccggtacagggtgtctacggctttgcaaagtcgctcctgaaagctctgaaagaagacggtgatgtggtgattgttgtctttgatgcgaaagcgccaagttttcgccacgaagcgtacgaagcttacaaagccgggcgtgctccaacgccggaagactttcctcgccaattggcgcttatgaaggaattagtggatttgcttggcctcgaacgcttggaagttcccggtttcgaggcagacgacgtattagcgactctcgcaaagaaagccgaacgtgagggctatgaagtccagatcttgacagcagatcgcgatcttttccagcttttatctccgcgcatctcggtgttacacccggaagggcatcgtatcaccccggaatggctctgggagaaatatggtttgcgtcccgaacaatgggtggattttcgcgccttagcaggcgatccgagcgacaatattccgggagttaaaggtatcggcgagaagacggcgctcaagctccttaaagaatgggggtcgttggagaacttgcttaagaatttagatcaggtcaaaccagagtcagtgcgtgagaagattcttgctcacctcgaagacctcaaattaagccgcgaattgtcccgtgtacgcaccgatttgccgctcgaagttgatttcggtcgccgccgcgaacctgactgggagggtcttaaagcgtttttagagcgtcttgaatttggttcgctcttgcatgaattcggccttttagaaagcccgttactggccgaagaagcaccttggccaccgcccgagggcgcgtttttaggttaccgtttgagtcgcccggaaccgatgtgggccgaattactggctcttgcagcgtctgcccagggacgtgtgtatcgcgcggaagaccctcatggtgcgctccgcggcctcttcgaagtccgtggactccttgccaaagacttagctgttgttgcattgcgcgaaggtcttgatttacctccgactgatgatccaatgcttcttgcgtacctcttggacccgtcaaacacgacgcccgaaggcgtagcccgtcgttacggcggcgagtggaccgaagatgcagcgaaacgcgcgttattggccgaacgtttgcacgaaaatttattaggacgtttgcaaggcgaggaacgtctcctctggctttacgaagaagtggagaaaccattgagtcgcgtgctcgcgcatatggaagctaccggtgtcaaattagacgtggcgtatttggagaatctcagccttgaagttgctgcccacatgcgccgcttggaggaagaagtattccgtttagcaggccgttcctttcgccttaactctcgcgatcagttagaacgtgtgttgttcgatgaacttggtctccctcctatcggcaagacagagaagaccggtaaacgtagcacttcagcggcggttttagaagctcttcgcgaagtccatcccattgtggacaagatcttgcagtaccgcgaaatggcgaaattgaaaggcacctatattgaccgtcttccggcattagtccacccgaaaacgggacgcctccatacccgcttcaaccaaacagccacggcgaccggtcgtttgtcctcctctgatccaaaccttcagaatattccagtacgtaccccattgggccagaagatccgccgtgcgtttgtagctgaggagggttggcgtttagtggccctcgattatcgtcaaattgaattacgtgtccttgcccatctttctggcgatgagaacctcatccgcgtgtttcaggaaggcaaagacattcacactcaaacggcaagctggatgtttggattatcagctgaagcgatcgatcctttgatgcgtcgtgcagcgaagaccatcaatttcggtgttctctacggtatgagtgcctttcgtttgtcgcaggaattaggcattccctatgaagaagctcaggcgttcattcagaaatactttcaaagctatcccaaagttaaagcatggatcgagaagactctccgtgaagaccgcacacgtggttacgtagagaccttatttggacgtcgccgctatgttcccgatttaaacgctcgcgtgaaaggcaagcgtgaagccgccgaacgcatggcgttcaacatgcctgtacagggcacggcagctgacctcatgaaacttgcaatggtgcgcctttttccacaattgcgtgaagttggtgcccgcatgctcttgcaggtccacgatgaactcttgttagaagcgccaaaagagcgtgcggaagaggtggcagccctcgcgaaagaagttatggaaggcgtgtggcccttagcggtgcctcttgaagtcgaagttggtattggcgaggattggctggctgccaaagga

SEQ ID NO: 5082 - protein, 841 aa, synthetic construct
  REGION 1..841: note = Variant of DNA polymerase I from Thermus sp. strain 2.9
MHHHHHHGGSGVLPVFEPKGRVLLVDGHHLAYRNFFALKGLTTSLGEPVQGVYGFAKSLLKALKEDGDVVIVVFDAKAPSFRHEAYEAYKAGRAPTPEDFPRQLALMKELVDLLGLERLEVPGFEADDVLATLAKKAEREGYEVQILTADRDLFQLLSPRISVLHPEGHRITPEWLWEKYGLRPEQWVDFRALAGDPSDNIPGVKGIGEKTALKLLKEWGSLENLLKNLDQVKPESVREKILAHLEDLKLSRELSRVRTDLPLEVDFGRRREPDWEGLKAFLERLEFGSLLHEFGLLESPLLAEEAPWPPPEGAFLGYRLSRPEPMWAELLALAASAQGRVYRAEDPHGALRGLFEVRGLLAKDLAVVALREGLDLPPTDDPMLLAYLLDPSNTTPEGVARRYGGEWTEDAAKRALLAERLHENLLGRLQGEERLLWLYEEVEKPLSRVLAHMEATGVKLDVAYLENLSLEVAAHMRRLEEEVFRLAGRSFRLNSRDQLERVLFDELGLPPIGKTEKTGKRSTSAAVLEALREVHPIVDKILQYREMAKLKGTYIDRLPALVHPKTGRLHTRFNQTATATGRLSSSDPNLQNIPVRTPLGQKIRRAFVAEEGWRLVALDYRQIELRVLAHLSGDENLIRVFQEGKDIHTQTASWMFGLSAEAIDPLMRRAAKTINFGVLYGMSAFRLSQELGIPYEEAQAFIQKYFQSYPKVKAWIEKTLREDRTRGYVETLFGRRRYVPDLNARVKGKREAAERMAFNMPVQGTAADLMKLAMVRLFPQLREVGARMLLQVHDELLLEAPKERAEEVAALAKEVMEGVWPLAVPLEVEVGIGEDWLAAKG

SEQ ID NO: 5083 - DNA, 2523 bp, synthetic construct
  misc_feature 1..2523: note = Variant of DNA polymerase I from Thermus sp. strain 2.9
  source 1..2523: mol_type = other DNA
atgcaccatcatcatcatcatggcggtagcggcgtgttaccggtgttcgagcataaaggtcgcgtgcttctggttgatggccatcatctcgcgtatcgtaacttctttgccctgaaaggattaaccaccagcctgggcgagccggtacagggtgtctacggctttgcaaagtcgctcctgaaagctctgaaagaagacggtgatgtggtgattgttgtctttgatgcgaaagcgccaagttttcgccacgaagcgtacgaagcttacaaagccgggcgtgctccaacgccggaagactttcctcgccaattggcgcttatgaaggaattagtggatttgcttggcctcgaacgcttggaagttcccggtttcgaggcagacgacgtattagcgactctcgcaaagaaagccgaacgtgagggctatgaagtccagatcttgacagcggatcgcgatcttttccagcttttatctccgcgcatctcggtgttacacccggaagggcatcgtatcaccccggaatggctctgggagaaatatggtttgcgtcccgaacaatgggtggattttcgcgccttagcaggcgatccgagcgacaatattccgggagttaaaggtatcggcgagaagacggcgctcaagctccttaaagaatgggggtcgttggagaacttgcttaagaatttagatcaggtcaaaccagagtcagtgcgtgagaagattcttgctcacctcgaagacctcaaattaagccgcgaattgtccagcgtacgcaccgatttgccgctcgaagttgatttcggtcgccgccgcgaacctgactgggagggtcttaaagcgtttttagagcgtcttgaatttggttcgctcttgcatgaattcggccttttagaaagcccattactggccgaagaagcaccttggccaccgcccgagggcgcgtttttaggttaccgtttgagtcgcccggaaccgatgtgggccgaattactggctcttgcagcgtctgcccagggacgtgtgtatcgcgcggaagaccctcatggtgcgctccgtggcctcttcgaagtccgtggactccttgccaaagacttagctgttgttgcattgcgcgaaggtcttgatttacctccgactgatgatccaatgcttcttgcgtacctcttggacccgtcaaacacgacgcccgaaggcgtagcccgtcgttacggcggcgagtggaccgaagatgcagcgaaacgcgcgttattggccgaacgtttgcacgcaaatttattaggacgtttgcaaggcgaggaacgtctcctctggctttacgaagaagtggagaaaccattgagtcgcgtgctcgcgcatatggaatcgaccggtgtcaaattagacgtggcgtatttggagaatctcagccttgaagttgctgcccacatgcgccgcttggaggaagaagtattccgtttagcaggccgttcctttcgccttaactctcgcgatcagttagaacgtgtgttgttcgatgaacttggtctccctcctatcggcaagacagagaagaccggtaaacgtagcacttcagcggcggttttagaagctcttcgcgaagtccatcccattgtggacaagatcttgcagtaccgcgagatggcgaaattgaaaggcacctatattgaccgtcttccggcattagtccacccgaaaacgggacgcctccatacccgcttcaaccaaacagccacggcgaccggtcgtttgtcctcctctgatccaaaccttcagaatattccagtacgtaccccattgggccagaagatccgccgtgcgtttgtagctgaggagggttggcgtttagtggccctcgattatcgtcaaattgaattacgtgtccttgcccatctttctggcgatgagaacctcatccgcgtgtttcaggaaggcaaagacattcacactcaaacggcaagctggatgtttggattatcagctgaagcgatcgatcctttgatgcgtcgtgcagcgaagaagatcaatttcggtgttctctacggtatgagtgcctttcgtttgtcgcaggagttaggcattccctatgaagaagctcaggcgttcattcagaaatactttcaaagctatcccaaagttaaagcatggatcgagaagactctccgtgaaggccgcacacgtggttacgtagagaccttatttggacgtcgccgctatgttcccgatttaaatgctcgcgtgaaaggcaagcgtgaagccgccgaacgcatggcgttcaacatgcctgtacagggcacggcagctgacctcatgaaacttgcaatggtgcgcctttttccacaattgcgtgaagttggtgcccgcatgctcttgcaggtccacgatgaactcttgttagaagcgccaaaagagcgtgcggaagaggtggcagccctcgcgaaagaagttatggaaggcgtgtggcccttagcggtgcctcttgaagtcgaagttggtattggcgaggattggctggctgccaaagga

SEQ ID NO: 5084 - protein, 841 aa, synthetic construct
  REGION 1..841: note = Variant of DNA polymerase I from Thermus sp. strain 2.9
MHHHHHHGGSGVLPVFEHKGRVLLVDGHHLAYRNFFALKGLTTSLGEPVQGVYGFAKSLLKALKEDGDVVIVVFDAKAPSFRHEAYEAYKAGRAPTPEDFPRQLALMKELVDLLGLERLEVPGFEADDVLATLAKKAEREGYEVQILTADRDLFQLLSPRISVLHPEGHRITPEWLWEKYGLRPEQWVDFRALAGDPSDNIPGVKGIGEKTALKLLKEWGSLENLLKNLDQVKPESVREKILAHLEDLKLSRELSSVRTDLPLEVDFGRRREPDWEGLKAFLERLEFGSLLHEFGLLESPLLAEEAPWPPPEGAFLGYRLSRPEPMWAELLALAASAQGRVYRAEDPHGALRGLFEVRGLLAKDLAVVALREGLDLPPTDDPMLLAYLLDPSNTTPEGVARRYGGEWTEDAAKRALLAERLHANLLGRLQGEERLLWLYEEVEKPLSRVLAHMESTGVKLDVAYLENLSLEVAAHMRRLEEEVFRLAGRSFRLNSRDQLERVLFDELGLPPIGKTEKTGKRSTSAAVLEALREVHPIVDKILQYREMAKLKGTYIDRLPALVHPKTGRLHTRFNQTATATGRLSSSDPNLQNIPVRTPLGQKIRRAFVAEEGWRLVALDYRQIELRVLAHLSGDENLIRVFQEGKDIHTQTASWMFGLSAEAIDPLMRRAAKKINFGVLYGMSAFRLSQELGIPYEEAQAFIQKYFQSYPKVKAWIEKTLREGRTRGYVETLFGRRRYVPDLNARVKGKREAAERMAFNMPVQGTAADLMKLAMVRLFPQLREVGARMLLQVHDELLLEAPKERAEEVAALAKEVMEGVWPLAVPLEVEVGIGEDWLAAKG

SEQ ID NO: 5085 - DNA, 2523 bp, synthetic construct
  misc_feature 1..2523: note = Variant of DNA polymerase I from Thermus sp. strain 2.9
  source 1..2523: mol_type = other DNA
atgcaccatcatcatcatcatggcggtagcggcgtgttaccggtgttcgagcctaaaggtcgcgtgcttctggttgatggccatcatctcgcgtatcgtaacttctttgccctgaaaggattaaccaccagcctgggcgagccggtacagggtgtctacggctttgcaaagtcgctcctgaaagctctgaaagaagacggtgatgtggtgattgttgtctttgatgcgaaagcgccaagttttcgccacgaagcgtacgaagcttacaaagccgggcgtgctccaacgccggaagactttcctcgccaattggcgcttatgaaggaattagtggatttgcttggcctcgaacgcttggaagttcccggtttcgaggcagacgacgtattagcgactctcgcaaagaaagccgaacgtgagggctatgaagtccagatcttgacaggggatcgcgatcttttccagcttttatctccgcgcatctcggtgttacacccggaagggcatcgtatcaccccggaatggctctgggagaaatatggtttgcgtcccgaacaatgggtggattttcgcgccttagcaggcgatccgagcgacaatattccgggagttaaaggtatcggcgagaagacggcgctcaagctccttaaagaatgggggtcgttggagaacttgcttaagaatttagatcaggtcaaaccagagtcagtgcgtgagaagattcttgctcacctcgaagacctcaaattaagccgcgaattgtccagcgtacgcaccgatttgccgctcgaagttgatttcggtcgccgccgcgaacctgactgggagggtcttaaagcgtttttagagcgtcttgaatttggttcgctcttgcatgaattcggccttttagaaagcgggttactggccgaagaagcaccttggccaccgcccgagggcgcgtttttaggttaccgtttgagtcgcccggaaccgatgtgggccgaattactggctcttgcagcgtctgcccagggacgtgtgtatcgcgcggaagaccctcatggtgcgctccgcggcctcttcgaagtccgtggactccttgccaaagacttagctgttgttgcattgcgcagcggtcttgatttacctccgactgatgatccaatgcttcttgcgtacctcttggacccgtcaaacacgacgcccgaaggcgtagcccgtcgttacggcggcgagtggaccgaagatgcagcgaaacgcgcgttattggccgaacgtttgcacgaaaatttattaggacgtttgcaaggcgaggaacgtctcctctggctttacgaagaagtggagaaaccattgagtcgcgtgctcgcgcatatggaagctaccggtgtcaaattagacgtggcgtatttggagaatctcagccttgaagttgctgcccacatgcgccgcttggaggaagaagtattccgtttagcaggccgttcctttcgccttaactctcgcgatcagttagaacgtgtgttgttcgatgaacttggtctccctcctatcggcaagacagagaagaccggtaaacgtagcacttcagcggcggttttagaagctcttcgcgaagtccatcccattgtggacaagatcttgcagtaccgctgtatggcgaaattgaaaggcacctatattgaccgtcttccggcattagtccacccgaaaacgggacgcctccatacccgcttcaaccaaacagccacggcgaccggtcgtttgtcctcctctgatccaaaccttcagaatattccagtacgtaccccattgggccagaagatccgccgtgcgtttgtagctgaggagggttggcgtttagtggccctcgattatcgtcaaattgaattacgtgtccttgcccatctttctggcgatgagaacctcatccgcgtgtttcaggaaggcaaagacattcacactcaaacggcaagctggatgtttggattatcagctgaagcgatcgatcctttgatgcgtcgtgcagcgaagacgatcaatttcggtgttctctacggtatgagtgcctttcgtttgtcgcaggaattaggcattccctatgaagaagctcaggcgttcattcagaaatactttcaaagctatcccaaagttaaagcatggatcgagaagactctccgtgaaggccgcacacgtggttacgtagagaccttatttggacgtcgccgctatgttcccgatttaaacgctcgcgtgaaaggcaagcgtgaagccgccgaacgcatggcgttcaacatgcctgtacagggcacggcagctgacctcatgaaacttgcaatggtgcgcctttttccacaattgcgtgaagttggtgcccgcatgctcttgcaggtccacgatgaactcttgttagaagcgccaaaagagcgtgcggaagaggtggcagccctcgcgaaagaagttatggaaggcgtatggcccttagcggtgcctcttgaagtcgaagttggtattggcgaggattggctggctgccaaagga

SEQ ID NO: 5086 - protein, 841 aa, synthetic construct
  REGION 1..841: note = Variant of DNA polymerase I from Thermus sp. strain 2.9
MHHHHHHGGSGVLPVFEPKGRVLLVDGHHLAYRNFFALKGLTTSLGEPVQGVYGFAKSLLKALKEDGDVVIVVFDAKAPSFRHEAYEAYKAGRAPTPEDFPRQLALMKELVDLLGLERLEVPGFEADDVLATLAKKAEREGYEVQILTGDRDLFQLLSPRISVLHPEGHRITPEWLWEKYGLRPEQWVDFRALAGDPSDNIPGVKGIGEKTALKLLKEWGSLENLLKNLDQVKPESVREKILAHLEDLKLSRELSSVRTDLPLEVDFGRRREPDWEGLKAFLERLEFGSLLHEFGLLESGLLAEEAPWPPPEGAFLGYRLSRPEPMWAELLALAASAQGRVYRAEDPHGALRGLFEVRGLLAKDLAVVALRSGLDLPPTDDPMLLAYLLDPSNTTPEGVARRYGGEWTEDAAKRALLAERLHENLLGRLQGEERLLWLYEEVEKPLSRVLAHMEATGVKLDVAYLENLSLEVAAHMRRLEEEVFRLAGRSFRLNSRDQLERVLFDELGLPPIGKTEKTGKRSTSAAVLEALREVHPIVDKILQYRCMAKLKGTYIDRLPALVHPKTGRLHTRFNQTATATGRLSSSDPNLQNIPVRTPLGQKIRRAFVAEEGWRLVALDYRQIELRVLAHLSGDENLIRVFQEGKDIHTQTASWMFGLSAEAIDPLMRRAAKTINFGVLYGMSAFRLSQELGIPYEEAQAFIQKYFQSYPKVKAWIEKTLREGRTRGYVETLFGRRRYVPDLNARVKGKREAAERMAFNMPVQGTAADLMKLAMVRLFPQLREVGARMLLQVHDELLLEAPKERAEEVAALAKEVMEGVWPLAVPLEVEVGIGEDWLAAKG

SEQ ID NO: 5087 - DNA, 2523 bp, synthetic construct
  misc_feature 1..2523: note = Variant of DNA polymerase I from Thermus sp. strain 2.9
  source 1..2523: mol_type = other DNA
atgcaccatcatcatcatcatggcggtagcggcgtgttaccggtgttcgagcctaaaggtcgcgtgcttctggttgatggccatcatctcgcgtatcgtaacttctttgccctgaaaggattaaccaccagcctgggcgagccggtacagggtgtctacggctttgcaaagtcgctcctgaaagctctgaaagaagacggtgatgtggtgattgttgtctttgatgcgaaagcgccaagttttcgccacgaagcgtacgaagcttacaaagccgggcgtgctccaacgccggaagactttcctcgccaattggcgcttatgaaggaattagtggatttgcttggcctcgaacgcttggaagttcccggtttcgaggcagacgacgtattagcgactctcgcaaagaaagccgaacgtgagggctatgaagtccagatcttgacaggggatcgcgatcttttccagcttttatctccgcgcatctcggtgttacacccggaagggcatcgtatcaccccggaatggctctgggagaaatatggtttgcgtcccgaacaatgggtggattttcgcgccttagcaggcgatccgagcgacaatattccgggagttaaaggtatcggcgagaagacggcgctcaagctccttaaagaatgggggtcgttggagaacttgcttaagaatttagatcaggtcaaaccagagtcagtgcgtgagaagattcttgctcacctcgaagacctcaaattaagccgcgaattgtcccgtgtacgcaccgatttgccgctcgaagttgatttcggtcgccgccgcgaacctgactgggagggtcttaaagcgtttttagagcgtcttgaatttggttcgctcttgcatgaattcggccttttagaaagcccgttactggccgaagaagcaccttggccaccgcccgagggcgcgtttttaggttaccgtttgagtcgcccggaaccgatgtgggccgaattactggctcttgcagcgtctgcccagggacgtgtgtatcgcgcggaagaccctcatggtgcgctccgcggcctcttcgaagtccgtggactccttgccaaagacttagctgttgttgcattgcgcgaaggtcttgatttacctccgactgatgatccaatgcttcttgcgtacctcttggacccgtcaaacacgacgcccgaaggcgtagcccgtcgttacggcggcgagtggaccgaagatgcagcgaaacgcgcgttattggccgaacgtttgcacgaaaatttattaggacgtttgcaaggcgaggaacgtctcctctggctttacgaagaagtggagaaaccattgagtcgcgtgctcgcgcatatggaagctaccggtgtcaaattagacgtggcgtatttggagaatctcagccttgaagttgctgcccacatgcgccgcttggaggaagaagtattccgtttagcaggccgttcctttcgccttaactctcgcgatcagttagaacgtgtgttgttcgatgaacttggtctccctcctatcggcaagacagagaagaccggtaaacgtagcacttcagcggcggttttagaagctcttcgcgaagtccatcccattgtggacaagatcttgcagtaccgcgaaatggcgaaattgaaaggcacctatattgaccgtcttccggcattagtccacccgaaaacgggacgcctccatacccgcttcaaccaaacagccacggcgaccggtcgtttgtcctcctctgatccaaaccttcagaatattccagtacgtaccccattgggccagaagatccgccgtgcgtttgtagctgaggagggttggcgtttagtggccctcgattatcgtcaaattgaattacgtgtccttgcccatctttctggcgatgagaacctcatccgcgtgtttcaggaaggcaaagacattcacactcaaacggcaagctggatgtttggattatcagctgaagcgatcgatcctttgatgcgtcgtgcagcgaagaccatcaatttcggtgttctctacggtatgagtgcctttcgtttgtcgcaggaattaggcattccctatgaagaagctcaggcgttcattcagaaatactttcaaagctatcccaaagttaaagcatggatcgagaagactctccgtgaaggccgcacacgtggttacgtagagaccttatttggacgtcgccgctatgttcccgatttaaacgctcgcgtgaaaggcaagcgtgaagccgccgaacgcatggcgttcaacatgcctgtacagggcacggcagctgacctcatgaaacttgcaatggtgcgcctttttccacaattgcgtgaagttggtgcccgcatgctcttgcaggtccacgatgaactcttgttagaagcgccaaaagagcgtgcggaagaggtggcagccctcgcgaaagaagttatggaaggcgtgtggcccttagcggtgcctcttgaagtcgaagttggtattggcgaggattggctggctgccaaagga

SEQ ID NO: 5088 - protein, 841 aa, synthetic construct
  REGION 1..841: note = Variant of DNA polymerase I from Thermus sp. strain 2.9
MHHHHHHGGSGVLPVFEPKGRVLLVDGHHLAYRNFFALKGLTTSLGEPVQGVYGFAKSLLKALKEDGDVVIVVFDAKAPSFRHEAYEAYKAGRAPTPEDFPRQLALMKELVDLLGLERLEVPGFEADDVLATLAKKAEREGYEVQILTGDRDLFQLLSPRISVLHPEGHRITPEWLWEKYGLRPEQWVDFRALAGDPSDNIPGVKGIGEKTALKLLKEWGSLENLLKNLDQVKPESVREKILAHLEDLKLSRELSRVRTDLPLEVDFGRRREPDWEGLKAFLERLEFGSLLHEFGLLESPLLAEEAPWPPPEGAFLGYRLSRPEPMWAELLALAASAQGRVYRAEDPHGALRGLFEVRGLLAKDLAVVALREGLDLPPTDDPMLLAYLLDPSNTTPEGVARRYGGEWTEDAAKRALLAERLHENLLGRLQGEERLLWLYEEVEKPLSRVLAHMEATGVKLDVAYLENLSLEVAAHMRRLEEEVFRLAGRSFRLNSRDQLERVLFDELGLPPIGKTEKTGKRSTSAAVLEALREVHPIVDKILQYREMAKLKGTYIDRLPALVHPKTGRLHTRFNQTATATGRLSSSDPNLQNIPVRTPLGQKIRRAFVAEEGWRLVALDYRQIELRVLAHLSGDENLIRVFQEGKDIHTQTASWMFGLSAEAIDPLMRRAAKTINFGVLYGMSAFRLSQELGIPYEEAQAFIQKYFQSYPKVKAWIEKTLREGRTRGYVETLFGRRRYVPDLNARVKGKREAAERMAFNMPVQGTAADLMKLAMVRLFPQLREVGARMLLQVHDELLLEAPKERAEEVAALAKEVMEGVWPLAVPLEVEVGIGEDWLAAKG

SEQ ID NO: 5089 - DNA, 2523 bp, synthetic construct
  misc_feature 1..2523: note = Variant of DNA polymerase I from Thermus sp. strain 2.9
  source 1..2523: mol_type = other DNA
atgcaccatcatcatcatcatggcggtagcggcgtgttaccggtgttcgagcctaaaggtcgcgtgcttctggttgatggccatcatctcgcgtatcgtaacttctttgccctgaaaggattaaccaccagcctgggcgagccggtacagggtgtctacggctttgcaaagtcgctcctgaaagctctgaaagaagacggtgatgtggtgattgttgtctttgatgcgaaagcgccaagttttcgccacgaagcgtacgaagcttacaaagccgggcgtgctccaacgccggaagactttcctcgccaattggcgcttatgaaggaattagtggatttgcttggcctcgaacgcttggaagttcccggtttcgaggcagacgacgtattagcgactctcgcaaagaaagccgaacgtgagggctatgaagtccagatcttgacagcagatcgcgatcttttccagcttttatctccgcgcatctcggtgttacacccggaagggcatcgtatcaccccggaatggctctgggagaaatatggtttgcgtcccgaacaatgggtggattttcgcgccttagcaggcgatccgagcgacaatattccgggagttaaaggtatcggcgagaagacggcgctcaagctccttaaagaatgggggtcgttggagaacttgcttaagaatttagatcaggtcaaaccagagtcagtgcgtgagaagattcttgctcacctcgaagacctcaaattaagccgcgaattgtcccgtgtacgcaccgatttgccgctcgaagttgatttcggtcgccgccgcgaacctgactgggagggtcttaaagcgtttttagagcgtcttgaatttggttcgctcttgcatgaattcggccttttagaaagcccgttactggccgaagaagcaccttggccaccgcccgagggcgcgtttttaggttaccgtttgagtcgcccggaaccgatgtgggccgaattactggctcttgcagcgtctgcccagggacgtgtgtatcgcgcggaagaccctcatggtgcgctccgcggcctcttcgaagtccgtggactccttgccaaagacttagctgttgttgcattgcgcgaaggtcttgatttacctccgactgatgatccaatgcttcttgcgtacctcttggacccgtcaaacacgacgcccgaaggcgtagcccgtcgttacggcggcgagtggaccgaagatgcagcgaaacgcgcgttattggccgaacgtttgcacgaaaatttattaggacgtttgcaaggcgaggaacgtctcctctggctttacgaagaagtggagaaaccattgagtcgcgtgctcgcgcatatggaagctaccggtgtcaaattagacgtggcgtatttggagaatctcagccttgaagttgctgcccacatgcgccgcttggaggaagaagtattccgtttagcaggccgttcctttcgccttaactctcgcgatcagttagaacgtgtgttgttcgatgaacttggtctccctcctatcggcaagacagagaagaccggtaaacgtagcacttcagcggcggttttagaagctcttcgctgggtccatcccattgtggacaagatcttgcagtaccgcgaaatggcgaaattgaaaggcacctatattgaccgtcttccggcattagtccacccgaaaacgggacgcctccatacccgcttcaaccaaacagccacggcgaccggtcgtttgtcctcctctgatccaaaccttcagaatattccagtacgtaccccattgggccagaagatccgccgtgcgtttgtagctgaggagggttggcgtttagtggccctcgattatcgtcaaattgaattacgtgtccttgcccatctttctggcgatgagaacctcatccgcgtgtttcaggaaggcaaagacattcacactcaaacggcaagctggatgtttggattatcagctgaagcgatcgatcctttgatgcgtcgtgcagcgaagaccatcaatttcggtgttctctacggtatgagtgcctttcgtttgtcgcaggaattaggcattccctatgaagaagctcaggcgttcattcagaaatactttcaaagctatcccaaagttaaagcatggatcgagaagactctccgtgaaggccgcacacgtggttacgtagagaccttatttggacgtcgccgctatgttcccgatttaaacgctcgcgtgaaaggcaagcgtgaagccgccgaacgcatggcgttcaacatgcctgtacagggcacggcagctgacctcatgaaacttgcaatggtgcgcctttttccacaattgcgtgaagttggtgcccgcatgctcttgcaggtccacgatgaactcttgttagaagcgccaaaagagcgtgcggaagaggtggcagccctcgcgaaagaagttatggaaggcgtgtggcccttagcggtgcctcttgaagtcgaagttggtattggcgaggattggctggctgccaaagga

SEQ ID NO: 5090 - protein, 841 aa, synthetic construct
  REGION 1..841: note = Variant of DNA polymerase I from Thermus sp. strain 2.9
MHHHHHHGGSGVLPVFEPKGRVLLVDGHHLAYRNFFALKGLTTSLGEPVQGVYGFAKSLLKALKEDGDVVIVVFDAKAPSFRHEAYEAYKAGRAPTPEDFPRQLALMKELVDLLGLERLEVPGFEADDVLATLAKKAEREGYEVQILTADRDLFQLLSPRISVLHPEGHRITPEWLWEKYGLRPEQWVDFRALAGDPSDNIPGVKGIGEKTALKLLKEWGSLENLLKNLDQVKPESVREKILAHLEDLKLSRELSRVRTDLPLEVDFGRRREPDWEGLKAFLERLEFGSLLHEFGLLESPLLAEEAPWPPPEGAFLGYRLSRPEPMWAELLALAASAQGRVYRAEDPHGALRGLFEVRGLLAKDLAVVALREGLDLPPTDDPMLLAYLLDPSNTTPEGVARRYGGEWTEDAAKRALLAERLHENLLGRLQGEERLLWLYEEVEKPLSRVLAHMEATGVKLDVAYLENLSLEVAAHMRRLEEEVFRLAGRSFRLNSRDQLERVLFDELGLPPIGKTEKTGKRSTSAAVLEALRWVHPIVDKILQYREMAKLKGTYIDRLPALVHPKTGRLHTRFNQTATATGRLSSSDPNLQNIPVRTPLGQKIRRAFVAEEGWRLVALDYRQIELRVLAHLSGDENLIRVFQEGKDIHTQTASWMFGLSAEAIDPLMRRAAKTINFGVLYGMSAFRLSQELGIPYEEAQAFIQKYFQSYPKVKAWIEKTLREGRTRGYVETLFGRRRYVPDLNARVKGKREAAERMAFNMPVQGTAADLMKLAMVRLFPQLREVGARMLLQVHDELLLEAPKERAEEVAALAKEVMEGVWPLAVPLEVEVGIGEDWLAAKG

SEQ ID NO: 5091 - DNA, 2523 bp, synthetic construct
  misc_feature 1..2523: note = Variant of DNA polymerase I from Thermus sp. strain 2.9
  source 1..2523: mol_type = other DNA
atgcaccatcatcatcatcatggcggtagcggcgtgttaccggtgttcgagcataaaggtcgcgtgcttctggttgatggccatcatctcgcgtatcgtaacttctttgccctgaaaggattaaccaccagcctgggcgagccggtacagggtgtctacggctttgcaaagtcgctcctgaaagctctgaaagaagacggtgatgtggtgattgttgtctttgatgcgaaagcgccaagttttcgccacgaagcgtacgaagcttacaaagccgggcgtgctccaacgccggaagactttcctcgccaattggcgcttatgaaggaattagtggatttgcttggcctcgaacgcttggaagttcccggtttcgaggcagacgacgtattagcgactctcgcaaagaaagccgaacgtgagggctatgaagtccagatcttgacagcagatcgcgatcttttccagcttttatctccgcgcatctcggtgttacacccggaagggcatcgtatcaccccggaatggctctgggagaaatatggtttgcgtcccgaacaatgggtggattttcgcgccttagcaggcgatccgagcgacaatattccgggagttaaaggtatcggcgagaagacggcgctcaagctccttaaagaatgggggtcgttggagaacttgcttaagaatttagatcaggtcaaaccagagtcagtgcgtgagaagattcttgctcacctcgaagacctcaaattaagccgcgaattgtcccgtgtacgcaccgatttgccgctcgaagttgatttcggtcgccgccgcgaacctgactgggagggtcttaaagcgtttttagagcgtcttgaatttggttcgctcttgcatgaattcggccttttagaaagcccgttactggccgaagaagcaccttggccaccgcccgagggcgcgtttttaggttaccgtttgagtcgcccggaaccgatgtgggccgaattactggctcttgcagcgtctgcccagggacgtgtgtatcgcgcggaagaccctcatggtgcgctccgcggcctcttcgaagtccgtggactccttgccaaagacttagctgttgttgcattgcgcgaaggtcttgatttacctccgactgatgatccaatgcttcttgcgtacctcttggacccgtcaaacacgacgcccgaaggcgtagcccgtcgttacggcggcgagtggaccgaagatgcagcgaaacgcgcgttattggccgaacgtttgcacgaaaatttattaggacgtttgcaaggcgaggaacgtctcctctggctttacgaagaagtggagaaaccattgagtcgcgtgctcgcgcatatggaagctaccggtgtcaaattagacgtggcgtatttggagaatctcagccttgaagttgctgcccacatgcgccgcttggaggaagaagtattccgtttagcaggccgttcctttcgccttaactctcgcgatcagttagaacgtgtgttgttcgatgaacttggtctccctcctatcggcaagacagagaagaccggtaaacgtagcacttcagcggcggttttagaagctcttcgcgaagtccatcccattgtggacaagatcttgcagtaccgcgaaatggcgaaattgaaaggcacctatattgaccgtcttccggcattagtccacccgaaaacgggacgcctccatacccgcttcaaccaaacagccacggcgaccggtcgtttgtcctcctctgatccaaaccttcagaatattccagtacgtaccccattgggccagaagatccgccgtgcgtttgtagctgaggagggttggcgtttagtggccctcgattatcgtcaaattgaattacgtgtccttgcccatctttctggcgatgagaacctcatccgcgtgtttcaggaaggcaaagacattcacactcaaacggcaagctggatgtttggattatcagctgaagcgatcgatcctttgatgcgtcgtgcagcgaagaccatcaatttcggtgttctctacggtatgagtgcctttcgtttgtcgcaggaattaggcattccctatgaagaagctcaggcgttcattcagaaatactttcaaagctatcccaaagttaaagcatggatcgagaagactctccgtgaaggccgcacacgtggttacgtagagaccttatttggacgtcgccgctatgttcccgatttaaacgctcgcgtgaaaggcaagcgtgaagccgccgaacgcatggcgttcaacatgcctgtacagggcacggcagctgacctcatgaaacttgcaatggtgcgcctttttccacaattgcgtgaagttggtgcccgcatgctcttgcaggtccacgatgaactcttgttagaagcgccaaaagagcgtgcggaagaggtggcagccctcgcgaaagaagttatggaaggcgtgtggcccttagcggtgcctcttgaagtcgaagttggtattggcgaggattggctggctgccaaagga

SEQ ID NO: 5092 - protein, 841 aa, synthetic construct
  REGION 1..841: note = Variant of DNA polymerase I from Thermus sp. strain 2.9
MHHHHHHGGSGVLPVFEHKGRVLLVDGHHLAYRNFFALKGLTTSLGEPVQGVYGFAKSLLKALKEDGDVVIVVFDAKAPSFRHEAYEAYKAGRAPTPEDFPRQLALMKELVDLLGLERLEVPGFEADDVLATLAKKAEREGYEVQILTADRDLFQLLSPRISVLHPEGHRITPEWLWEKYGLRPEQWVDFRALAGDPSDNIPGVKGIGEKTALKLLKEWGSLENLLKNLDQVKPESVREKILAHLEDLKLSRELSRVRTDLPLEVDFGRRREPDWEGLKAFLERLEFGSLLHEFGLLESPLLAEEAPWPPPEGAFLGYRLSRPEPMWAELLALAASAQGRVYRAEDPHGALRGLFEVRGLLAKDLAVVALREGLDLPPTDDPMLLAYLLDPSNTTPEGVARRYGGEWTEDAAKRALLAERLHENLLGRLQGEERLLWLYEEVEKPLSRVLAHMEATGVKLDVAYLENLSLEVAAHMRRLEEEVFRLAGRSFRLNSRDQLERVLFDELGLPPIGKTEKTGKRSTSAAVLEALREVHPIVDKILQYREMAKLKGTYIDRLPALVHPKTGRLHTRFNQTATATGRLSSSDPNLQNIPVRTPLGQKIRRAFVAEEGWRLVALDYRQIELRVLAHLSGDENLIRVFQEGKDIHTQTASWMFGLSAEAIDPLMRRAAKTINFGVLYGMSAFRLSQELGIPYEEAQAFIQKYFQSYPKVKAWIEKTLREGRTRGYVETLFGRRRYVPDLNARVKGKREAAERMAFNMPVQGTAADLMKLAMVRLFPQLREVGARMLLQVHDELLLEAPKERAEEVAALAKEVMEGVWPLAVPLEVEVGIGEDWLAAKG

SEQ ID NO: 5093 - DNA, 2523 bp, synthetic construct
  misc_feature 1..2523: note = Variant of DNA polymerase I from Thermus sp. strain 2.9
  source 1..2523: mol_type = other DNA
atgcaccatcatcatcatcatggcggtagcggcgtgttaccggtgttcgagcctaaaggtcgcgtgcttctggttgatggccatcatctcgcgtatcgtaacttctttgccctgaaaggattaaccaccagcctgggcgagccggtacagggtgtctacggctttgcaaagtcgctcctgaaagctctgaaagaagacggtgatgtggtgattgttgtctttgatgcgaaagcgccaagttttcgccacgaagcgtacgaagcttacaaagccgggcgtgctccaacgccggaagactttcctcgccaattggcgcttatgaaggaattagtggatttgcttggcctcgaacgcttggaagttcccggtttcgaggcagacgacgtattagcgactctcgcaaagaaagccgaacgtgagggctatgaagtccagatcttgacagcagatcgcgatcttttccagcttttatctccgcgcatctcggtgttacacccggaagggcatcgtatcaccccggaatggctctgggagaaatatggtttgcgtcccgaacaatgggtggattttcgcgccttagcaggcgatccgagcgacaatattccgggagttaaaggtatcggcgagaagacggcgctcaagctccttaaagaatgggggtcgttggagaacttgcttaagaatttagatcaggtcaaaccagagtcagtgcgtgagaagattcttgctcacctcgaagacctcaaattaagccgcgaattgtcccgtgtacgcaccgatttgccgctcgaagttgatttcggtcgccgccgcgaacctgactgggagggtcttaaagcgtttttagagcgtcttgaatttggttcgctcttgcatgaattcggccttttagaaagcccgttactggccgaagaagcaccttggccaccgcccgagggcgcgtttttaggttaccgtttgagtcgcccggaaccgatgtgggccgaattactggctcttgcagcgtctgcccagggacgtgtgtatcgcgcggaagaccctcatggtgcgctccgcggcctcttcgaagtccgtggactccttgccaaagacttagctgttgttgcattgcgcgaaggtcttgatttacctccgactgatgatccaatgcttcttgcgtacctcttggacccgtcaaacacgacgcccgaaggcgtagcccgtcgttacggcggcgagtggaccgaagatgcagcgaaacgcgcgttattggccgaacgtttgcacgaaaatttattaggacgtttgcaaggcgaggaacgtctcctctggctttacgaagaagtggagaaaccattgagtcgcgtgctcgcgcatatggaagctaccggtgtcaaattagacgtggcgtatttggagaatctcagccttgaagttgctgcccacatgcgccgcttggaggaagaagtattccgtttagcaggccgttcctttcgccttaactctcgcgatcagttagaacgtgtgttgttcgatgaacttggtctccctcctatcggcaagacagagaagaccggtaaacgtagcacttcagcggcggttttagaagctcttcgcgaagtccatcccattgtggacaagatcttgcagtaccgcgaaatggcgaaattgaaaggcacctatattgaccgtcttccggcattagtccacccgaaaacgggacgcctccatacccgcttcaaccaaacagccacggcgaccggtcgtttgtcctcctctgatccaaaccttcagaatattccagtacgtaccccattgggccagaagatccgccgtgcgtttgtagctgaggagggttggcgtttagtggccctcgattatcgtcaaattgaattacgtgtccttgcccatctttctggcgatgagaacctcatccgcgtgtttcaggaaggcaaagacattcacactcaaacggcaagctggatgtttggattatcagctgaagcgatcgatcctttgatgcgtcgtgcagcgaagaccatcaatttcggtgttctctacggtatgagtgcctttcgtttgtcgcaggaattaggcattccctatgaagaagctcaggcgttcattcagaaatactttcaaagctatcccaaagttaaagcatggatcgagaagactctccgtgaaggccgcacacgtggttacgtagagaccttatttggacgtcgccgctatgttcccgatttaaacgctcgcgtgaaaggcaagcgtgaagccgccgaacgcatggcgttcaacatgcctgtacagggcacggcagctgacctcatgaaacttgcaatggtgcgcctttttccacaattgcgtgaagttggtgcccgcatgctcttgcaggtccacgatgaactcttgttagaagcgccaaaagagcgtgcggaagaggtggcagccctcgcgaaagaagttatggaaggcgtgtggcccttagcggtgcctcttgaagtcgaagttggtattggcgaggattggctggctgccaaagga

SEQ ID NO: 5094 - protein, 841 aa, synthetic construct
  REGION 1..841: note = Variant of DNA polymerase I from Thermus sp. strain 2.9
MHHHHHHGGSGVLPVFEPKGRVLLVDGHHLAYRNFFALKGLTTSLGEPVQGVYGFAKSLLKALKEDGDVVIVVFDAKAPSFRHEAYEAYKAGRAPTPEDFPRQLALMKELVDLLGLERLEVPGFEADDVLATLAKKAEREGYEVQILTADRDLFQLLSPRISVLHPEGHRITPEWLWEKYGLRPEQWVDFRALAGDPSDNIPGVKGIGEKTALKLLKEWGSLENLLKNLDQVKPESVREKILAHLEDLKLSRELSRVRTDLPLEVDFGRRREPDWEGLKAFLERLEFGSLLHEFGLLESPLLAEEAPWPPPEGAFLGYRLSRPEPMWAELLALAASAQGRVYRAEDPHGALRGLFEVRGLLAKDLAVVALREGLDLPPTDDPMLLAYLLDPSNTTPEGVARRYGGEWTEDAAKRALLAERLHENLLGRLQGEERLLWLYEEVEKPLSRVLAHMEATGVKLDVAYLENLSLEVAAHMRRLEEEVFRLAGRSFRLNSRDQLERVLFDELGLPPIGKTEKTGKRSTSAAVLEALREVHPIVDKILQYREMAKLKGTYIDRLPALVHPKTGRLHTRFNQTATATGRLSSSDPNLQNIPVRTPLGQKIRRAFVAEEGWRLVALDYRQIELRVLAHLSGDENLIRVFQEGKDIHTQTASWMFGLSAEAIDPLMRRAAKTINFGVLYGMSAFRLSQELGIPYEEAQAFIQKYFQSYPKVKAWIEKTLREGRTRGYVETLFGRRRYVPDLNARVKGKREAAERMAFNMPVQGTAADLMKLAMVRLFPQLREVGARMLLQVHDELLLEAPKERAEEVAALAKEVMEGVWPLAVPLEVEVGIGEDWLAAKG

SEQ ID NO: 5095 - DNA, 2523 bp, synthetic construct
  misc_feature 1..2523: note = Variant of DNA polymerase I from Thermus sp. strain 2.9
  source 1..2523: mol_type = other DNA
atgcaccatcatcatcatcatggcggtagcggcgtgttaccggtgttcgagcctaaaggtcgcgtgcttctggttgatggccatcatctcgcgtatcgtaacttctttgccctgaaaggattaaccaccagcctgggcgagccggtacagggtgtctacggctttgcaaagtcgctcctgaaagctctgaaagaagacggtgatgtggtgattgttgtctttgatgcgaaagcgccaagttttcgccacgaagcgtacgaagcttacaaagccgggcgtgctccaacgccggaagactttcctcgccaattggcgcttatgaaggaattagtggatttgcttggcctcgaacgcttggaagttcccggtttcgaggcagacgacgtattagcgactctcgcaaagaaagccgaacgtgagggctatgaagtccagatcttgacaggggatcgcgatcttttccagcttttatctccgcgcatctcggtgttacacccggaagggcatcgtatcaccccggaatggctctgggagaaatatggtttgcgtcccgaacaatgggtggattttcgcgccttagcaggcgatccgagcgacaatattccgggagttaaaggtatcggcgagaagacggcgctcaagctccttaaagaatgggggtcgttggagaacttgcttaagaatttagatcaggtcaaaccagagtcagtgcgtgagaagattcttgctcacctcgaagacctcaaattaagccgcgaattgtccagcgtacgcaccgatttgccgctcgaagttgatttcggtcgccgccgcgaacctgactgggagggtcttaaagcgtttttagagcgtcttgaatttggttcgctcttgcatgaattcggccttttagaaagcgggttaggtgccgaagaagcaccttggccaccgcccgagggcgcgtttttaggttaccgtttgagtcgcccggaaccgatgtgggccgaattactggctcttgcagcgtctgcccagggacgtgtgtatcgcgcggaagaccctcatggtgcgctccgcggcctcttcgaagtccgtggactccttgccaaagacttagctgttgttgcattgcgcgaaggtcttgatttacctccgactgatgatccaatgcttcttgcgtacctcttggacccgtcaaacacgacgcccgaaggcgtagcccgtcgttacggcggcgagtggaccgaagatgcagcgaaacgcgcgttattggccgaacgtttgcacgaaaatttattaggacgtttgcaaggcgaggaacgtctcctctggctttacgaagaagtggagaaaccattgagtcgcgtgctcgcgcatatggaagctaccggtgtcaaattagacgtggcgtatttggagaatctcagccttgaagttgctgcccacatgcgccgcttggaggaagaagtagtccgtttagcaggccgttcctttcgccttaactctcgcgatcagttagaacgtgtgttgttcgatgaacttggtctccctcctatcggcaagacagagaagaccggtaaacgtagcacttcagcggcggttttagaagctcttcgcgaagtccatcccattgtggacaagatcttgcagtaccgcgaaatggcgaaattgaaaggcacctatattgaccgtcttccggcattagtccacccgaaaacgggacgcctccatacccgcttcaaccaaacagccacggcgaccggtcgtttgtcctcctctgatccaaaccttcagaatattccagtacgtaccccattgggccagaagatccgccgtgcgtttgtagctgaggagggttggcgtttagtggccctcgattatcgtcaaattgaattacgtgtccttgcccatctttctggcgatgagaacctcatccgcgtgtttcaggaaggcaaagacattcacactcaaacggcaagctggatgtttggattatcagctgaagcgatcgatcctttgatgcgtcgtgcagcgaagaccatcaatttcggtgttctctacggtatgagtgcctttcgtttgtcgcaggaattaggcattccctatgaagaagctcaggcgttcattcagaaatactttcaaagctatcccaaagttaaagcatggatcgagaagactctccgtgaaggccgcacacgtggttacgtagagaccttatttggacgtcgccgctatgttcccgatttaaacgctcgcgtgaaaggcaagcgtgaagccgccgaacgcatggcgttcaacatgcctgtacagggcacggcagctgactgtatgaaacttgcaatggtgcgcctttttccacaattgcgtgaagttggtgcccgcatgctcttgcaggtccacgatgaactcttgttagaagcgccaaaagagcgtgcggaagaggtggcagccctcgcgaaagaagttatggaaggcgtgtggcccttagcggtgcctcttgaagtcgaagttggtattggcgaggattggctggctgccaaagga

SEQ ID NO: 5096 - protein, 841 aa, synthetic construct
  REGION 1..841: note = Variant of DNA polymerase I from Thermus sp. strain 2.9
MHHHHHHGGSGVLPVFEPKGRVLLVDGHHLAYRNFFALKGLTTSLGEPVQGVYGFAKSLLKALKEDGDVVIVVFDAKAPSFRHEAYEAYKAGRAPTPEDFPRQLALMKELVDLLGLERLEVPGFEADDVLATLAKKAEREGYEVQILTGDRDLFQLLSPRISVLHPEGHRITPEWLWEKYGLRPEQWVDFRALAGDPSDNIPGVKGIGEKTALKLLKEWGSLENLLKNLDQVKPESVREKILAHLEDLKLSRELSSVRTDLPLEVDFGRRREPDWEGLKAFLERLEFGSLLHEFGLLESGLGAEEAPWPPPEGAFLGYRLSRPEPMWAELLALAASAQGRVYRAEDPHGALRGLFEVRGLLAKDLAVVALREGLDLPPTDDPMLLAYLLDPSNTTPEGVARRYGGEWTEDAAKRALLAERLHENLLGRLQGEERLLWLYEEVEKPLSRVLAHMEATGVKLDVAYLENLSLEVAAHMRRLEEEVVRLAGRSFRLNSRDQLERVLFDELGLPPIGKTEKTGKRSTSAAVLEALREVHPIVDKILQYREMAKLKGTYIDRLPALVHPKTGRLHTRFNQTATATGRLSSSDPNLQNIPVRTPLGQKIRRAFVAEEGWRLVALDYRQIELRVLAHLSGDENLIRVFQEGKDIHTQTASWMFGLSAEAIDPLMRRAAKTINFGVLYGMSAFRLSQELGIPYEEAQAFIQKYFQSYPKVKAWIEKTLREGRTRGYVETLFGRRRYVPDLNARVKGKREAAERMAFNMPVQGTAADCMKLAMVRLFPQLREVGARMLLQVHDELLLEAPKERAEEVAALAKEVMEGVWPLAVPLEVEVGIGEDWLAAKG

SEQ ID NO: 5097 - DNA, 2523 bp, synthetic construct
  misc_feature 1..2523: note = Variant of DNA polymerase I from Thermus sp. strain 2.9
  source 1..2523: mol_type = other DNA
atgcaccatcatcatcatcatggcggtagcggcgtgttaccggtgttcgagcctaaaggtcgcgtgcttctggttgatggccatcatctcgcgtatcgtaacttctttgccctgaaaggattaaccaccagcctgggcgagccggtacagggtgtctacggctttgcaaagtcgctcctgaaagctctgaaagaagacggtgatgtggtgattgttgtctttgatgcgaaagcgccaagttttcgccacgaagcgtacgaagcttacaaagccgggcgtgctccaacgccggaagactttcctcgccaattggcgcttatgaaggaattagtggatttgcttggcctcgaacgcttggaagttcccggtttcgaggcagacgacgtattagcgactctcgcaaagaaagccgaacgtgagggctatgaagtccagatcttgacagcagatcgcgatcttttccagcttttatctccgcgcatctcggtgttacacccggaagggcatcgtatcaccccggaatggctctgggagaaatatggtttgcgtcccgaacaatgggtggattttcgcgccttagcaggcgatccgagcgacaatattccgggagttaaaggtatcggcgagaagacggcgctcaagctccttaaagaatgggggtcgttggagaacttgcttaagaatttagatcaggtcaaaccagagtcagtgcgtgagaagattcttgctcacctcgaagacctcaaattaagccgcgaattgtcccgtgtacgcaccgatttgccgctcgaagttgatttcggtcgccgccgcgaacctgactgggagggtcttaaagcgtttttagagcgtcttgaatttggttcgctcttgcatgaattcggccttttagaaagcccgttactggccgaagaagcaccttggccaccgcccgagggcgcgtttttaggttaccgtttgagtcgcccggaaccgatgtgggccgaattactggctcttgcagcgtctgcccagggacgtgtgtatcgcgcggaagaccctcatggtgcgctccgcggcctcttcgaagtccgtggactccttgccaaagacttagctgttgttgcattgcgcgaaggtcttgatttacctccgactgatgatccaatgcttcttgcgtacctcttggacccgtcaaacacgacgcccgaaggcgtagcccgtcgttacggcggcgagtggaccgaagatgcagcgaaacgcgcgttattggccgaacgtttgcacgaaaatttattaggacgtttgcaaggcgaggaacgtctcctctggctttacgaagaagtggagaaaccattgagtcgcgtgctcgcgcatatggaagctaccggtgtcaaattagacgtggcgtatttggagaatctcagccttgaagttgctgcccacatgcgccgcttggaggaagaagtattccgtttagcaggccgttcctttcgccttaactctcgcgatcagttagaacgtgtgttgttcgatgaacttggtctccctcctatcggcaagacagagaagaccggtaaacgtagcacttcagcggcggttttagaagctcttcgcgaagtccatcccattgtggacaagatcttgcagtaccgcgaaatggcgaaattgaaaggcacctatattgaccgtcttccggcattagtccacccgaaaacgggacgcctccatacccgcttcaaccaaacagccacggcgaccggtcgtttgtcctcctctgatccaaaccttcagaatattccagtacgtaccccattgggccagaagatccgccgtgcgtttgtagctgaggagggttggcgtttagtggccctcgattatcgtcaaattgaattacgtgtccttgccatgctttctggcgatgagaacctcatccgcgtgtttcaggaaggcaaagacattcacactcaaacggcaagctggatgtttggattatcagctgaagcgatcgatcctttgatgcgtcgtgcagcgaagaccatcaatttcggtgttctctacggtatgagtgcctttcgtttgtcgcaggaattaggcattccctatgaagaagctcaggcgttcattcagaaatactttcaaagctatcccaaagttaaagcatggatcgagaagactctccgtgaaggccgcacacgtggttacgtagagaccttatttggacgtcgccgctatgttcccgatttaaacgctcgcgtgaaaggcaagcgtgaagccgccgaacgcatggcgttcaacatgcctgtacagggcacggcagctgacctcatgaaacttgcaatggtgcgcctttttccacaattgcgtgaagttggtgcccgcatgctcttgcaggtccacgatgaactcttgttagaagcgccaaaagagcgtgcggaagaggtggcagccctcgcgaaagaagttatggaaggcgtgtggcccttagcggtgcctcttgaagtcgaagttggtattggcgaggattggctggctgccaaagga

SEQ ID NO: 5098 - protein, 841 aa, synthetic construct
  REGION 1..841: note = Variant of DNA polymerase I from Thermus sp. strain 2.9
MHHHHHHGGSGVLPVFEPKGRVLLVDGHHLAYRNFFALKGLTTSLGEPVQGVYGFAKSLLKALKEDGDVVIVVFDAKAPSFRHEAYEAYKAGRAPTPEDFPRQLALMKELVDLLGLERLEVPGFEADDVLATLAKKAEREGYEVQILTADRDLFQLLSPRISVLHPEGHRITPEWLWEKYGLRPEQWVDFRALAGDPSDNIPGVKGIGEKTALKLLKEWGSLENLLKNLDQVKPESVREKILAHLEDLKLSRELSRVRTDLPLEVDFGRRREPDWEGLKAFLERLEFGSLLHEFGLLESPLLAEEAPWPPPEGAFLGYRLSRPEPMWAELLALAASAQGRVYRAEDPHGALRGLFEVRGLLAKDLAVVALREGLDLPPTDDPMLLAYLLDPSNTTPEGVARRYGGEWTEDAAKRALLAERLHENLLGRLQGEERLLWLYEEVEKPLSRVLAHMEATGVKLDVAYLENLSLEVAAHMRRLEEEVFRLAGRSFRLNSRDQLERVLFDELGLPPIGKTEKTGKRSTSAAVLEALREVHPIVDKILQYREMAKLKGTYIDRLPALVHPKTGRLHTRFNQTATATGRLSSSDPNLQNIPVRTPLGQKIRRAFVAEEGWRLVALDYRQIELRVLAMLSGDENLIRVFQEGKDIHTQTASWMFGLSAEAIDPLMRRAAKTINFGVLYGMSAFRLSQELGIPYEEAQAFIQKYFQSYPKVKAWIEKTLREGRTRGYVETLFGRRRYVPDLNARVKGKREAAERMAFNMPVQGTAADLMKLAMVRLFPQLREVGARMLLQVHDELLLEAPKERAEEVAALAKEVMEGVWPLAVPLEVEVGIGEDWLAAKG

SEQ ID NO: 5099 - DNA, 2523 bp, synthetic construct
  misc_feature 1..2523: note = Variant of DNA polymerase I from Thermus sp. strain 2.9
  source 1..2523: mol_type = other DNA
atgcaccatcatcatcatcatggcggtagcggcgtgttaccggtgttcgagcctaaaggtcgcgtgcttctggttgatggccatcatctcgcgtatcgtaacttctttgccctgaaaggattaaccaccagcctgggcgagccggtacagggtgtctacggctttgcaaagtcgctcctgaaagctctgaaagaagacggtgatgtggtgattgttgtctttgatgcgaaagcgccaagttttcgccacgaagcgtacgaagcttacaaagccgggcgtgctccaacgccggaagactttcctcgccaattggcgcttatgaaggaattagtggatttgcttggcctcgaacgcttggaagttcccggtttcgaggcagacgacgtattagcgactctcgcaaagaaagccgaacgtgagggctatgaagtccagatcttgacagcagatcgcgatcttttccagcttttatctccgcgcatctcggtgttacacccggaagggcatcgtatcaccccggaatggctctgggagaaatatggtttgcgtcccgaacaatgggtggattttcgcgccttagcaggcgatccgagcgacaatattccgggagttaaaggtatcggcgagaagacggcgctcaagctccttaaagaatgggggtcgttggagaacttgcttaagaatttagatcaggtcaaaccagagtcagtgcgtgagaagattcttgctcacctcgaagacctcaaattaagccgcgaattgtcccgtgtacgcaccgatttgccgctcgaagttgatttcggtcgccgccgcgaacctgactgggagggtcttaaagcgtttttagagcgtcttgaatttggttcgctcttgcatgaattcggccttttagaaagcccgttactggccgaagaagcaccttggccaccgcccgagggcgcgtttttaggttaccgtttgagtcgcccggaaccgatgtgggccgaattactggctcttgcagcgtctgcccagggacgtgtgtatcgcgcggaagaccctcatggtgcgctccgcggcctcttcgaagtccgtggactccttgccaaagacttagctgttgttgcattgcgcgaaggtcttgatttacctccgactgatgatccaatgcttcttgcgtacctcttggacccgtcaaacacgacgcccgaaggcgtagcccgtcgttacggcggcgagtggaccgaagatgcagcgaaacgcgcgttattggccgaacgtttgcacgaaaatttattaggacgtttgcaaggcgaggaacgtctcctctggctttacgaagaagtggagaaaccattgagtcgcgtgctcgcgcatatggaagctaccggtgtcaaattagacgtggcgtatttggagaatctcagccttgaagttgctgcccacatgcgccgcttggaggaagaagtattccgtttagcaggccgttcctttcgccttaactctcgcgatcagttagaacgtgtgttgttcgatgaacttggtctccctcggatcggcaagacagagaagaccggtaaacgtagcacttcagcggcggttttagaagctcttcgcgaagtccatcccattgtggacaagatcttgcagtaccgcgaaatggcgaaattgaaaggcacctatattgaccgtcttccggcattagtccacccgaaaacgggacgcctccatacccgcttcaaccaaacagccacggcgaccggtcgtttgtcctcctctgatccaaaccttcagaatattccagtacgtaccccattgggccagaagatccgccgtgcgtttgtagctgaggagggttggcgtttagtggccctcgattatcgtcaaattgaattacgtgtccttgcccatctttctggcgatgagaacctcatccgcgtgtttcaggaaggcaaagacattcacactcaaacggcaagctggatgtttggattatcagctgaagcgatcgatcctttgatgcgtcgtgcagcgaagaccatcaatttcggtgttctctacggtatgagtgcctttcgtttgtcgcaggaattaggcattccctatgaagaagctcaggcgttcattcagaaatactttcaaagctatcccaaagttaaagcatggatcgagaagactctccgtgaaggccgcacacgtggttacgtagagaccttatttggacgtcgccgctatgttcccgatttaaacgctcgcgtgaaaggcaagcgtgaagccgccgaacgcatggcgttcaacatgcctgtacagggcacggcagctgacctcatgaaacttgcaatggtgcgcctttttccacaattgcgtgaagttggagcccgcatgctcttgcaggtccacgatgaactcttgttagaagcgccaaaagagcgtgcggaagaggtggcagccctcgcgaaagaagttatggaaggcgtgtggcccttagcggtgcctcttgaagtcgaagttggtattggcgaggattggctggctgccaaagga

SEQ ID NO: 5100 - protein, 841 aa, synthetic construct
  REGION 1..841: note = Variant of DNA polymerase I from Thermus sp. strain 2.9
MHHHHHHGGSGVLPVFEPKGRVLLVDGHHLAYRNFFALKGLTTSLGEPVQGVYGFAKSLLKALKEDGDVVIVVFDAKAPSFRHEAYEAYKAGRAPTPEDFPRQLALMKELVDLLGLERLEVPGFEADDVLATLAKKAEREGYEVQILTADRDLFQLLSPRISVLHPEGHRITPEWLWEKYGLRPEQWVDFRALAGDPSDNIPGVKGIGEKTALKLLKEWGSLENLLKNLDQVKPESVREKILAHLEDLKLSRELSRVRTDLPLEVDFGRRREPDWEGLKAFLERLEFGSLLHEFGLLESPLLAEEAPWPPPEGAFLGYRLSRPEPMWAELLALAASAQGRVYRAEDPHGALRGLFEVRGLLAKDLAVVALREGLDLPPTDDPMLLAYLLDPSNTTPEGVARRYGGEWTEDAAKRALLAERLHENLLGRLQGEERLLWLYEEVEKPLSRVLAHMEATGVKLDVAYLENLSLEVAAHMRRLEEEVFRLAGRSFRLNSRDQLERVLFDELGLPRIGKTEKTGKRSTSAAVLEALREVHPIVDKILQYREMAKLKGTYIDRLPALVHPKTGRLHTRFNQTATATGRLSSSDPNLQNIPVRTPLGQKIRRAFVAEEGWRLVALDYRQIELRVLAHLSGDENLIRVFQEGKDIHTQTASWMFGLSAEAIDPLMRRAAKTINFGVLYGMSAFRLSQELGIPYEEAQAFIQKYFQSYPKVKAWIEKTLREGRTRGYVETLFGRRRYVPDLNARVKGKREAAERMAFNMPVQGTAADLMKLAMVRLFPQLREVGARMLLQVHDELLLEAPKERAEEVAALAKEVMEGVWPLAVPLEVEVGIGEDWLAAKG

SEQ ID NO: 5101 - DNA, 2523 bp, synthetic construct
  misc_feature 1..2523: note = Variant of DNA polymerase I from Thermus sp. strain 2.9
  source 1..2523: mol_type = other DNA
atgcaccatcatcatcatcatggcggtagcggcgtgttaccggtgttcgagcctaaaggtcgcgtgcttctggttgatggccatcatctcgcgtatcgtaacttctttgccctgaaaggattaaccaccagcctgggcgagccggtacagggtgtctacggctttgcaaagtcgctcctgaaagctctgaaagaagacggtgatgtggtgattgttgtctttgatgcgaaagcgccaagttttcgccacgaagcgtacgaagcttacaaagccgggcgtgctccaacgccggaagactttcctcgccaattggcgcttatgaaggaattagtggatttgcttggcctcgaacgcttggaagttcccggtttcgaggcagacgacgtattagcgactctcgcaaagaaagccgaacgtgagggctatgaagtccagatcttgacagcagatcgcgatcttttccagcttttatctccgcgcatctcggtgttacacccggaagggcatcgtatcaccccggaatggctctgggagaaatatggtttgcgtcccgaacaatgggtggattttcgcgccttagcaggcgatccgagcgacaatattccgggagttaaaggtatcggcgagaagacggcgctcaagctccttaaagaatgggggtcgttggagaacttgcttaagaatttagatcaggtcaaaccagagtcagtgcgtgagaagattcttgctcacctcgaagacctcaaattaagccgcgaattgtcccgtgtacgcaccgatttgccgctcgaagttgatttcggtcgccgccgcgaacctgactgggagggtcttaaagcgtttttagagcgtcttgaatttggttcgctcttgcatgaattcggccttttagaaagcccgttactggccgaagaagcaccttggccaccgcccgagggcgcgtttttaggttaccgtttgagtcgcccggaaccgatgtgggccgaattactggctcttgcagcgtctgcccagggacgtgtgtatcgcgcggaagaccctcatggtgcgctccgcggcctcttcgaagtccgtggactccttgccaaagacttagctgttgttgcattgcgcgaaggtcttgatttacctccgactgatgatccaatgcttcttgcgtacctcttggacccgtcaaacacgacgcccgaaggcgtagcccgtcgttacggcggcgagtggaccgaagatgcagcgaaacgcgcgttattggccgaacgtttgcacgaaaatttattaggacgtttgcaaggcgaggaacgtctcctctggctttacgaagaagtggagaaaccattgagtcgcgtgctcgcgcatatggaagctaccggtgtcaaattagacgtggcgtatttggagaatctcagccttgaagttgctgcccacatgcgccgcttggaggaagaagtattccgtttagcaggccgttcctttcgccttaactctcgcgatcagttagaacgtgtgttgttcgatgaacttggtctccctcctatcggcaagacagagaggaccggtaaacgtagcacttcagcggcggttttagaagctcttcgcgaagtccatcccattgtggacaagatcttgcagtaccgcgaaatggcgaaattgaaaggcacctatattgaccgtcttccggcattagtccacccgaaaacgggacgcctccatacccgcttcaaccaaacagccacggcgaccggtcgtttgtcctcctctgatccaaaccttcagaatattccagtacgtaccccattgggccagaagatccgccgtgcgtttgtagctgaggagggttggcgtttagtggccctcgattatcgtcaaattgaattacgtgtccttgcccatctttctggcgatgagaacctcatccgcgtgtttcaggaaggcaaagacattcacactcaaacggcaagctggatgtttggattatcagctgaagcgatcgatcctttgatgcgtcgtgcagcgaagaccatcaatttcggtgttctctacggtatgagtgcctttcgtttgtcgcaggaattaggcattccctatgaagaagctcaggcgttcattcagaaatactttcaaagctatcccaaagttaaagcatggatcgagaagactctccgtgaaggccgcacacgtggttacgtagagaccttatttggacgtcgccgctatgttcccgatttaaacgctcgcgtgaaaggcaagcgtgaagccgccgaacgcatggcgttcaacatgcctgtacagggcacggcagctgacctcatgaaacttgcaatggtgcgcctttttccacaattgcgtgaagttggtgcccgcatgctcttgcaggtccacgatgaactcttgttagaagcgccaaaagagcgtgcggaagaggtggcagccctcgcgaaagaagttatggaaggcgtgtggcccttagcggtgcctcttgaagtcgaagttggtattggcgaggattggctggctgccaaagga

SEQ ID NO: 5102 - protein, 841 aa, synthetic construct
  REGION 1..841: note = Variant of DNA polymerase I from Thermus sp. strain 2.9
MHHHHHHGGSGVLPVFEPKGRVLLVDGHHLAYRNFFALKGLTTSLGEPVQGVYGFAKSLLKALKEDGDVVIVVFDAKAPSFRHEAYEAYKAGRAPTPEDFPRQLALMKELVDLLGLERLEVPGFEADDVLATLAKKAEREGYEVQILTADRDLFQLLSPRISVLHPEGHRITPEWLWEKYGLRPEQWVDFRALAGDPSDNIPGVKGIGEKTALKLLKEWGSLENLLKNLDQVKPESVREKILAHLEDLKLSRELSRVRTDLPLEVDFGRRREPDWEGLKAFLERLEFGSLLHEFGLLESPLLAEEAPWPPPEGAFLGYRLSRPEPMWAELLALAASAQGRVYRAEDPHGALRGLFEVRGLLAKDLAVVALREGLDLPPTDDPMLLAYLLDPSNTTPEGVARRYGGEWTEDAAKRALLAERLHENLLGRLQGEERLLWLYEEVEKPLSRVLAHMEATGVKLDVAYLENLSLEVAAHMRRLEEEVFRLAGRSFRLNSRDQLERVLFDELGLPPIGKTERTGKRSTSAAVLEALREVHPIVDKILQYREMAKLKGTYIDRLPALVHPKTGRLHTRFNQTATATGRLSSSDPNLQNIPVRTPLGQKIRRAFVAEEGWRLVALDYRQIELRVLAHLSGDENLIRVFQEGKDIHTQTASWMFGLSAEAIDPLMRRAAKTINFGVLYGMSAFRLSQELGIPYEEAQAFIQKYFQSYPKVKAWIEKTLREGRTRGYVETLFGRRRYVPDLNARVKGKREAAERMAFNMPVQGTAADLMKLAMVRLFPQLREVGARMLLQVHDELLLEAPKERAEEVAALAKEVMEGVWPLAVPLEVEVGIGEDWLAAKG

SEQ ID NO: 5103 - DNA, 2523 bp, synthetic construct
  misc_feature 1..2523: note = Variant of DNA polymerase I from Thermus sp. strain 2.9
  source 1..2523: mol_type = other DNA
atgcaccatcatcatcatcatggcggtagcggcgtgttaccggtgttcgagcctaaaggtcgcgtgcttctggttgatggccatcatctcgcgtatcgtaacttctttgccctgaaaggattaaccaccagcctgggcgagccggtacagggtgtctacggctttgcaaagtcgctcctgaaagctctgaaagaagacggtgatgtggtgattgttgtctttgatgcgaaagcgccaagttttcgccacgaagcgtacgaagcttacaaagccgggcgtgctccaacgccggaagactttcctcgccaattggcgcttatgaaggaattagtggatttgcttggcctcgaacgcttggaagttcccggtttcgaggcagacgacgtattagcgactctcgcaaagaaagccgaacgtgagggctatgaagtccagatcttgacagcagatcgcgatcttttccagcttttatctccgcgcatctcggtgttacacccggaagggcatcgtatcaccccggaatggctctgggagaaatatggtttgcgtcccgaacaatgggtggattttcgcgccttagcaggcgatccgagcgacaatattccgggagttaaaggtatcggcgagaagacggcgctcaagctccttaaagaatgggggtcgttggagaacttgcttaagaatttagatcaggtcaaaccagagtcagtgcgtgagaagattcttgctcacctcgaagacctcaaattaagccgcgaattgtcccgtgtacgcaccgatttgccgctcgaagttgatttcggtcgccgccgcgaacctgactgggagggtcttaaagcgtttttagagcgtcttgaatttggttcgctcttgcatgaattcggccttttagaaagcccgttactggccgaagaagcaccttggccaccgcccgagggcgcgtttttaggttaccgtttgagtcgcccggaaccgatgtgggccgaattactggctcttgcagcgtctgcccagggacgtgtgtatcgcgcggaagaccctcatggtgcgctccgcggcctcttcgaagtccgtactctccttgccaaagacttagctgttgttgcattgcgcgaaggtcttgatttacctccgactgatgatccaatgcttcttgcgtacctcttggacccgtcaaacacgacgcccgaaggcgtagcccgtcgttacggcggcgagtggaccgaagatgcagcgaaacgcgcgttattggccgaacgtttgcacgaaaatttattaggacgtttgcaaggcgaggaacgtctcctctggctttacgaagaagtggagaaaccattgagtcgcgtgctcgcgcatatggaagctaccggtgtcaaattagacgtggcgtatttggagaatctcagccttgaagttgctgcccacatgcgccgcttggaggaagaagtattccgtttagcaggccgttcctttcgccttaactctcgcgatcagttagaacgtgtgttgttcgatgaacttggtctccctcctatcggcaagacagagaagaccggtaaacgtagcacttcagcggcggttttagaagctcttcgcgaagtccatcccattgtggacaagatcttgcagtaccgcgaaatggcgaaattgaaaggcacctatattgaccgtcttccggcattagtccacccgaaaacgggacgcctccatacccgcttcaaccaaacagccacggcgaccggtcgtttgtcctcctctgatccaaaccttcagaatattccagtacgtaccccattgggccagaagatccgccgtgcgtttgtagctgaggagggttggcgtttagtggccctcgattatcgtcaaattgaattacgtgtccttgcccatctttctggcgatgagaacctcatccgcgtgtttcaggaaggcaaagacattcacactcaaacggcaagctggatgtttggattatcagctgaagcgatcgatcctttgatgcgtcgtgcagcgaagaccatcaatttcggtgttctctacggtatgagtgcctttcgtttgtcgcaggaattaggcattccctatgaagaagctcaggcgttcattcagaaatactttcaaagctatcccaaagttaaagcatggatcgagaagactctccgtgaaggccgcacacgtggttacgtagagaccttatttggacgtcgccgctatgttcccgatttaaacgctcgcgtgaaaggcaagcgtgaagccgccgaacgcatggcgttcaacatgcctgtacagggcacggcagctgacctcatgaaacttgcaatggtgcgcctttttccacaattgcgtgaagttggtgcccgcatgctcttgcaggtccacgatgaactcttgttagaagcgccaaaagagcgtgcggaagaggtggcagccctcgcgaaagaagttatggaaggcgtgtggcccttagcggtgcctcttgaagtcgaagttggtattggcgaggattggctggctgccaaagga

SEQ ID NO: 5104 - protein, 841 aa, synthetic construct
  REGION 1..841: note = Variant of DNA polymerase I from Thermus sp. strain 2.9
MHHHHHHGGSGVLPVFEPKGRVLLVDGHHLAYRNFFALKGLTTSLGEPVQGVYGFAKSLLKALKEDGDVVIVVFDAKAPSFRHEAYEAYKAGRAPTPEDFPRQLALMKELVDLLGLERLEVPGFEADDVLATLAKKAEREGYEVQILTADRDLFQLLSPRISVLHPEGHRITPEWLWEKYGLRPEQWVDFRALAGDPSDNIPGVKGIGEKTALKLLKEWGSLENLLKNLDQVKPESVREKILAHLEDLKLSRELSRVRTDLPLEVDFGRRREPDWEGLKAFLERLEFGSLLHEFGLLESPLLAEEAPWPPPEGAFLGYRLSRPEPMWAELLALAASAQGRVYRAEDPHGALRGLFEVRTLLAKDLAVVALREGLDLPPTDDPMLLAYLLDPSNTTPEGVARRYGGEWTEDAAKRALLAERLHENLLGRLQGEERLLWLYEEVEKPLSRVLAHMEATGVKLDVAYLENLSLEVAAHMRRLEEEVFRLAGRSFRLNSRDQLERVLFDELGLPPIGKTEKTGKRSTSAAVLEALREVHPIVDKILQYREMAKLKGTYIDRLPALVHPKTGRLHTRFNQTATATGRLSSSDPNLQNIPVRTPLGQKIRRAFVAEEGWRLVALDYRQIELRVLAHLSGDENLIRVFQEGKDIHTQTASWMFGLSAEAIDPLMRRAAKTINFGVLYGMSAFRLSQELGIPYEEAQAFIQKYFQSYPKVKAWIEKTLREGRTRGYVETLFGRRRYVPDLNARVKGKREAAERMAFNMPVQGTAADLMKLAMVRLFPQLREVGARMLLQVHDELLLEAPKERAEEVAALAKEVMEGVWPLAVPLEVEVGIGEDWLAAKG

SEQ ID NO: 5105 - DNA, 2523 bp, synthetic construct
  misc_feature 1..2523: note = Variant of DNA polymerase I from Thermus sp. strain 2.9
  source 1..2523: mol_type = other DNA
atgcaccatcatcatcatcatggcggtagcggcgtgttaccggtgttcgagcctaaaggtcgcgtgcttctggttgatggccatcatctcgcgtatcgtaacttctttgccctgaaaggattaaccaccagccgcggcgagccggtacagggtgtctacggctttgcaaagtcgctcctgaaagctctgaaagaagacggtgatgtggtgattgttgtctttgatgcgaaagcgccaagttttcgccacgaagcgtacgaagcttacaaagccgggcgtgctccaacgccggaagactttcctcgccaattggcgcttatgaaggaattagtggatttgcttggcctcgaacgcttggaagttcccggtttcgaggcagacgacgtattagcgactctcgcaaagaaagccgaacgtgagggctatgaagtccagatcttgacagcagatcgcgatcttttccagcttttatctccgcgcatctcggtgttacacccggaagggcatcgtatcaccccggaatggctctgggagaaatatggtttgcgtcccgaacaatgggtggattttcgcgccttagcaggcgatccgagcgacaatattccgggagttaaaggtatcggcgagaagacggcgctcaagctccttaaagaatgggggtcgttggagaacttgcttaagaatttagatcaggtcaaaccagagtcagtgcgtgagaagattcttgctcacctcgaagacctcaaattaagccgcgaattgtcccgtgtacgcaccgatttgccgctcgaagttgatttccgccgccgccgcgaacctgactgggagggtcttaaagcgtttttagagcgtcttgaatttggttcgctcttgcatgaattcggccttttagaaagcccgttactggccgaagaagcaccttggccaccgcccgagggcgcgtttttaggttaccgtttgagtcgcccggaaccgatgtgggccgaattactggctcttgcagcgtctgcccagggacgtgtgtatcgcgcggaagaccctcatggtgcgctccgcggcctcttcgaagtccgtggactccttgccaaagacttagctgttgttgcattgcgcgaaggtcttgatttacctccgactgatgatccaatgcttcttgcgtacctcttggacccgtcaaacacgacgcccgaaggcgtagcccgtcgttacggcggcgagtggaccgaagatgcagcgaaacgcgcgttattggccgaacgtttgcacgaaaatttattaggacgtttgcaaggcgaggaacgtctcctctggctttacgaagaagtggagaaaccattgagtcgcgtgctcgcgcatatggaagctaccggtgtcaaattagacgtggcgtatttggagaatctcagccttgaagttgctgccgaaatgcgccgcttggaggaagaagtattccgtttagcaggccactcctttcgccttaactctcgcgatcagttagaacgtgtgttgttcgatgaacttggtctccctcctatcggcaagacagagaagaccggtaaacgtagcacttcagcggcggttttagaagctcttcgcgaagtccatcccattgtggacaagatcttgcagtaccgcgaaatggcgaaattgaaaggcacctatattgaccgtcttccggcattagtccacccgaaaacgggacgcctccatacccgcttcaaccaaacagccacggcgaccggtcgtttgtcctcctctgatccaaaccttcagaatattccagtacgtaccccattgggccagaagatccgccgtgcgtttgtagctgaggagggttggcgtttagtggccctcgattatcgtcaaattgaattacgtgtccttgcccatctttctggcgatgagaacctcatccgcgtgtttcaggaaggcaaagacattcacactcaaacggcaagctggatgtttggattatcagctgaagcgatcgatcctttgatgcgtcgtgcagcgaagaccatcaatttcggtgttctctacggtatgagtgcctttcgtttgtcgcaggaattaggcattccctatgaagaagctcaggcgttcattcagaaatactttcaaagctatcccaaagttaaagcatggatcgagaagactctccgcgaaggccgcacacgtggttacgtagagaccttatttggacgtcgccgctatgttcccgatttaaacgctcgcgtgaaaggcaagcgtgaagccgccgaacgcatggcgttcaacatgcctgtacagggcacggcagctgacctcatgaaacttgcaatggtgcgcctttttccacaattgcgtgaagttggtgcccgcatgctcttgcaggtccacgatgaactcttgttagaagcgccaaaagagcgtgcggaagaggtggcagccctcgcgaaagaagttatggaaggcgtgtggcccttagcggtgcctcttgaagtcgaagttggtattggcgaggattggctggctgccaaagga

SEQ ID NO: 5106 - protein, 841 aa, synthetic construct
  REGION 1..841: note = Variant of DNA polymerase I from Thermus sp. strain 2.9
MHHHHHHGGSGVLPVFEPKGRVLLVDGHHLAYRNFFALKGLTTSRGEPVQGVYGFAKSLLKALKEDGDVVIVVFDAKAPSFRHEAYEAYKAGRAPTPEDFPRQLALMKELVDLLGLERLEVPGFEADDVLATLAKKAEREGYEVQILTADRDLFQLLSPRISVLHPEGHRITPEWLWEKYGLRPEQWVDFRALAGDPSDNIPGVKGIGEKTALKLLKEWGSLENLLKNLDQVKPESVREKILAHLEDLKLSRELSRVRTDLPLEVDFRRRREPDWEGLKAFLERLEFGSLLHEFGLLESPLLAEEAPWPPPEGAFLGYRLSRPEPMWAELLALAASAQGRVYRAEDPHGALRGLFEVRGLLAKDLAVVALREGLDLPPTDDPMLLAYLLDPSNTTPEGVARRYGGEWTEDAAKRALLAERLHENLLGRLQGEERLLWLYEEVEKPLSRVLAHMEATGVKLDVAYLENLSLEVAAEMRRLEEEVFRLAGHSFRLNSRDQLERVLFDELGLPPIGKTEKTGKRSTSAAVLEALREVHPIVDKILQYREMAKLKGTYIDRLPALVHPKTGRLHTRFNQTATATGRLSSSDPNLQNIPVRTPLGQKIRRAFVAEEGWRLVALDYRQIELRVLAHLSGDENLIRVFQEGKDIHTQTASWMFGLSAEAIDPLMRRAAKTINFGVLYGMSAFRLSQELGIPYEEAQAFIQKYFQSYPKVKAWIEKTLREGRTRGYVETLFGRRRYVPDLNARVKGKREAAERMAFNMPVQGTAADLMKLAMVRLFPQLREVGARMLLQVHDELLLEAPKERAEEVAALAKEVMEGVWPLAVPLEVEVGIGEDWLAAKG

SEQ ID NO: 5107 - DNA, 2523 bp, synthetic construct
  misc_feature 1..2523: note = Variant of DNA polymerase I from Thermus sp. strain 2.9
  source 1..2523: mol_type = other DNA
atgcaccatcatcatcatcatggcggtagcggcgtgttaccggtgttcgagcctaaaggtcgcgtgcttctggttgatggccatcatctcgcgtatcgtaacttctttgccctgaaaggattaaccaccagcctgggcgagccggtacagggtgtctacggctttgcaaagtcgctcctgaaagctctgaaagaagacggtgatgtggtgattgttgtctttgatgcgaaagcgccaagttttcgccacgaagcgtacgaagcttacaaagccgggcgtgctccaacgccggaagactttcctcgccaattggcgcttatgaaggaattagtggatttgcttggcctcgaacgcttggaagttcccggtttcgaggcagacgacgtattagcgactctcgcaaagaaagccgaacgtgagggctatgaagtccagatcttgacagcagatcgcgatcttttccagcttttatctccgcgcatctcggtgttacacccggaagggcatcgtatcaccccggaatggctctgggagaaatatggtttgcgtcccgaacaatgggtggattttcgcgccttagcaggcgatccgagcgacaatattccgggagttaaaggtatcggcgagaagacggcgctcaagctccttaaagaatgggggtcgttggagaacttgcttaagaatttagatcaggtcaaaccagagtcagtgcgtgagaagattcttgctcacctcgaagacctcaaattaagccgcgaattgtcccgtgtacgcaccgatttgccgctcgaagttgatttcggtcgccgccgcgaacctgactgggagggtcttaaagcgtttttagagcgtcttgaatttggttcgctcttgcatgaattcggccttttagaaagcccgttactggccgaagaagcaccttggccaccgcccgagggcgcgtttttaggttaccgtttgagtcgcccggaaccgatgtgggccgaattactggctcttgcagcgtctgcccagggacgtgtgtatcgcgcggaagaccctcatggtgcgctccgcggcctcttcgaagtccgtggactccttgccaaagacttagctgttgttgcattgcgcgaaggtcttgatttacctccgactgatgatccaatgcttcttgcgtacctcttggacccgtcaaacacgacgcccgaaggcgtagcccgtcgttacggcggcgagtggaccgaagatgcagcgaaacgcgcgttattggccgaacgtttgcacgaaaatttattaggacgtttgcaaggcgaggaacgtctcctctggctttacgaagaagtggagaaaccattgagtcgcgtgctcgcgcatatggaagctaccggtgtcaaattagacgtggcgtatttggagaatctcagccttgaagttgctgcccacatgcgccgcttggaggaagaagtattccgtttagcaggccgttcctttcgccttaactctcgcgatcagttagaacgtgtgttgttcgatgaacttggtctccctcctatcggcaagacagagaagaccggtaaacgtagcacttcagcggcggttttagaagctcttcgcgaagtccatcccattgtggacaagatcttgcagtaccgcgaaatggcgaaattgaaaggcacctatattgaccgtcttccggcattagtccacccgaaaacgggacgcctccatacccgcttcaaccaaacagccacggcgaccggtcgtttgtcctcctctgatccaaaccttcagaatattccagtacgtaccccattgggccagaagatccgccgtgcgtttgtagctgaggagggttggcgtttagtggccctcgattatcgtcaaattgaattacgtgtccttgcccatctttctggcgatgagaacctcatccgcgtgtttcaggaaggcaaagacattcacactcaaacggcaagctggatgtttggattatcagctgaagcgatcgatcctttgatgcgtcgtgcagcgaagaccatcaatttcggtgttctctacggtatgagtgcctttcgtttgtcgcaggaattaggcattccctatgaagaagctcaggcgttcattcagaaatactttcaaagctatcccaaagttaaagcatggatcgagaagactctccgtgaaggccgcacacgtggttacgtagagaccttatttggacgtcgccgctatgttcccgatttaaacgggcgcgtgaaaggcaagcgtgaagccgccgaacgcatggcgttcaacatgcctgtacagggcacggcagctgacctcatgaaacttgcaatggtgcgcctttttccacaattgcgtgaagttggtgcccgcatgctcttgcaggtccacgatgaactcttgttagaagcgccaaaagagcgtgcggaagaggtggcagccctcgcgaaagaagttatggaaggcgtgtggcccttagcggtgcctcttgaagtcgaagttggtattggcgaggattggctggctgccaaagga

SEQ ID NO: 5108 - protein, 841 aa, synthetic construct
  REGION 1..841: note = Variant of DNA polymerase I from Thermus sp. strain 2.9
MHHHHHHGGSGVLPVFEPKGRVLLVDGHHLAYRNFFALKGLTTSLGEPVQGVYGFAKSLLKALKEDGDVVIVVFDAKAPSFRHEAYEAYKAGRAPTPEDFPRQLALMKELVDLLGLERLEVPGFEADDVLATLAKKAEREGYEVQILTADRDLFQLLSPRISVLHPEGHRITPEWLWEKYGLRPEQWVDFRALAGDPSDNIPGVKGIGEKTALKLLKEWGSLENLLKNLDQVKPESVREKILAHLEDLKLSRELSRVRTDLPLEVDFGRRREPDWEGLKAFLERLEFGSLLHEFGLLESPLLAEEAPWPPPEGAFLGYRLSRPEPMWAELLALAASAQGRVYRAEDPHGALRGLFEVRGLLAKDLAVVALREGLDLPPTDDPMLLAYLLDPSNTTPEGVARRYGGEWTEDAAKRALLAERLHENLLGRLQGEERLLWLYEEVEKPLSRVLAHMEATGVKLDVAYLENLSLEVAAHMRRLEEEVFRLAGRSFRLNSRDQLERVLFDELGLPPIGKTEKTGKRSTSAAVLEALREVHPIVDKILQYREMAKLKGTYIDRLPALVHPKTGRLHTRFNQTATATGRLSSSDPNLQNIPVRTPLGQKIRRAFVAEEGWRLVALDYRQIELRVLAHLSGDENLIRVFQEGKDIHTQTASWMFGLSAEAIDPLMRRAAKTINFGVLYGMSAFRLSQELGIPYEEAQAFIQKYFQSYPKVKAWIEKTLREGRTRGYVETLFGRRRYVPDLNGRVKGKREAAERMAFNMPVQGTAADLMKLAMVRLFPQLREVGARMLLQVHDELLLEAPKERAEEVAALAKEVMEGVWPLAVPLEVEVGIGEDWLAAKG

SEQ ID NO: 5109 - DNA, 2523 bp, synthetic construct
  misc_feature 1..2523: note = Variant of DNA polymerase I from Thermus sp. strain 2.9
  source 1..2523: mol_type = other DNA
atgcaccatcatcatcatcatggcggtagcggcgtgttaccggtgttcgagcctaaaggtcgcgtgcttctggttgatggccatcatctcgcgtatcgtaacttctttgccctgaaaggattaaccaccagcctgggcgagccggtacagggtgtctacggctttgcaaagtcgctcctgaaagctctgaaagaagacggtgatgtggtgattgttgtctttgatgcgaaagcgccaagttttcgccacgaagcgtacgaagcttacaaagccgggcgtgctccaacgccggaagactttcctcgccaattggcgcttatgaaggaattagtggatttgcttggcctcgaacgcttggaagttcccggtttcgaggcagacgacgtattagcgactctcgcaaagaaagccgaacgtgagggctatgaagtccagatcttgacagcagatcgcgatcttttccagcttttatctccgcgcatctcggtgttacacccggaagggcatcgtatcaccccggaatggctctgggagaaatatggtttgcgtcccgaacaatgggtggattttcgcgccttagcaggcgatccgagcgacaatattccgggagttaaaggtatcggcgagaagacggcgctcaagctccttaaagaatgggggtcgttggagaacttgcttaagaatttagatcaggtcaaaccagagtcagtgcgtgagaagattcttgctcacctcgaagacctcaaattaagccgcgaattgtcccgtgtacgcaccgatttgccgctcgaagttgatttcggtcgccgccgcgaacctgactgggagggtcttaaagcgtttttagagcgtcttgaatttggttcgctcttgcatgaattcggccttttagaaagcccgttactggccgaagaagcaccttggccaccgcccgagggcgcgtttttaggttaccgtttgagtcgcccggaaccgatgtgggccgaattactggctcttgcagcgtctgcccagggacgtgtgtatcgcgcggaagaccctcatggtgcgctccgcggcctcttcgaagtccgtggactccttgccaaagacttagctgttgttgcattgcgcgaaggtcttgatttacctccgactgatgatccaatgcttcttgcgtacctcttggacccgtcaaacacgacgcccgaaggcgtagcccgtcgttacggcggcgagtggaccgaagatgcagcgaaacgcgcgttattggccgaacgtttgcacgaaaatttattaggacgtttgcaaggcgaggaacgtctcctctggctttacgaagaagtggagaaaccattgagtcgcgtgctcgcgcatatggaagctaccggtgtcaaattagacgtggcgtatttggagaatctcagccttgaagttgctgcccacatgcgccgcttggaggaagaagtattccgtttagcaggccgttcctttcgccttaactctcgcgatcagttagaacgtgtgttgttcgatgaacttggtctccctcctatcggcaagacagagaagaccggtaaacgtagcacttcagcggcggttttagaagctcttcgcgaagtccatcccattgtggacaagatcttgcagtaccgcgaaatggcgaaattgaaaggcacctatattgaccgtcttccggcattagtccacccgaaaacgggacgcctccatacccgcttcaaccaaacagccacggcgaccggtcgtttgtcctcctctgatccaaaccttcagaatattccagtacgtaccccattgggccagaagatccgccgtgcgtttgtagctgaggagggttggcgtttagtggccctcgattatcgtcaaattgaattacgtgtccttgcccatctttctggcgatgagaacctcatccgcgtgtttcaggaaggcaaagacattcacactcaaacggcaagctggatgtttggattatcagctgaagcgatcgatcctttgatgcgtcgtgcagcgaagaccatcaatttcggtgttctctacggtatgagtgcctttcgtttgtcgcaggaattaggcattccctatgaagaagctcaggcgttcattcagaaatactttcaaagctatcccaaagttaaagcatggatcgagaagactctccgtgaaggccgcacacgtggttacgtagagaccttatttggacgtcgccgctatgttcccgatttaaacgctcgcgtgaaaggcaagcgtgaagccgccgaacgcatggcgttcaacatgcctgtacagggcacggcagctgacctcatgaaacttgcaatggtgcgcctttttccacaattgcgtgaagttggtgcccgcatgctcttgcaggtccacgatgaactcttgttagaagcgccaaaagagcgtgcggaagaggtggcagccctcgcgaaagaagttatgaagggcgtgtggcccttagcggtgcctcttgaagtcgaagttggtattggcgaggattggctggctgccaaagga

SEQ ID NO: 5110 - protein, 841 aa, synthetic construct
  REGION 1..841: note = Variant of DNA polymerase I from Thermus sp. strain 2.9
MHHHHHHGGSGVLPVFEPKGRVLLVDGHHLAYRNFFALKGLTTSLGEPVQGVYGFAKSLLKALKEDGDVVIVVFDAKAPSFRHEAYEAYKAGRAPTPEDFPRQLALMKELVDLLGLERLEVPGFEADDVLATLAKKAEREGYEVQILTADRDLFQLLSPRISVLHPEGHRITPEWLWEKYGLRPEQWVDFRALAGDPSDNIPGVKGIGEKTALKLLKEWGSLENLLKNLDQVKPESVREKILAHLEDLKLSRELSRVRTDLPLEVDFGRRREPDWEGLKAFLERLEFGSLLHEFGLLESPLLAEEAPWPPPEGAFLGYRLSRPEPMWAELLALAASAQGRVYRAEDPHGALRGLFEVRGLLAKDLAVVALREGLDLPPTDDPMLLAYLLDPSNTTPEGVARRYGGEWTEDAAKRALLAERLHENLLGRLQGEERLLWLYEEVEKPLSRVLAHMEATGVKLDVAYLENLSLEVAAHMRRLEEEVFRLAGRSFRLNSRDQLERVLFDELGLPPIGKTEKTGKRSTSAAVLEALREVHPIVDKILQYREMAKLKGTYIDRLPALVHPKTGRLHTRFNQTATATGRLSSSDPNLQNIPVRTPLGQKIRRAFVAEEGWRLVALDYRQIELRVLAHLSGDENLIRVFQEGKDIHTQTASWMFGLSAEAIDPLMRRAAKTINFGVLYGMSAFRLSQELGIPYEEAQAFIQKYFQSYPKVKAWIEKTLREGRTRGYVETLFGRRRYVPDLNARVKGKREAAERMAFNMPVQGTAADLMKLAMVRLFPQLREVGARMLLQVHDELLLEAPKERAEEVAALAKEVMKGVWPLAVPLEVEVGIGEDWLAAKG

SEQ ID NO: 5111 - DNA, 2523 bp, synthetic construct
  misc_feature 1..2523: note = Variant of DNA polymerase I from Thermus sp. strain 2.9
  source 1..2523: mol_type = other DNA
atgcaccatcatcatcatcatggcggtagcggcgtgttaccggtgttcgagcctaaaggtcgcgtgcttctggttgatggccatcatctcgcgtatcgtaacttctttgccctgaaaggattaaccaccagcctgggcgagccggtacagggtgtctacggctttgcaaagtcgctcctgaaagctctgaaagaagacggtgatgtggtgattgttgtctttgatgcgaaagcgccaagttttcgccacgaagcgtacgaagcttacaaagccgggcgtgctccaacgccggaagactttcctcgccaattggcgcttatgaaggaattagtggatttgcttggcctcgaacgcttggaagttcccggtttcgaggcagacgacgtattagcgactctcgcaaagaaagccgaacgtgagggctatgaagtccagatcttgacagcagatcgcgatcttttccagcttttatctccgcgcatctcggtgttacacccggaagggcatcgtatcaccccggaatggctctgggagaaatatggtttgcgtcccgaacaatgggtggattttcgcgccttagcaggcgatccgagcgacaatattccgggagttaaaggtatcggcgagaagacggcgctcaagctccttaaagaatgggggtcgttggagaacttgcttaagaatttagatcaggtcaaaccagagtcagtgcgtgagaagattcttgctcacctcgaagacctcaaattaagccgcgaattgtcccgtgtacgcaccgatttgccgctcgaagttgatttcggtcgccgccgcgaacctgactgggagggtcttaaagcgtttttagagcgtcttgaatttggttcgctcttgcatgaattcggccttttagaaagcccgttactggccgaagaagcaccttggccaccgcccgagggcgcgtttttaggttaccgtttgagtcgcccggaaccgatgtgggccgaattactggctcttgcagcgtctgcccagggacgtgtgtatcgcgcggaagaccctcatggtgcgctccgcggcctcttcgaagtccgtggactccttgccaaagacttagctgttgttgcattgcgcgaaggtcttgatttacctccgactgatgatccaatgcttcttgcgtacctcttggacccgtcaaacacgacgcccgaaggcgtagcccgtcgttacggcggcgagtggaccgaagatgcagccaaacgcgcgttattggccgaacgtttgcacgaaaatttattaggacgtttgcaaggcgaggagcgtctcctgtggctttacgaagaagtggagaaaccattgagtcgcgtgctcgcgcatatggaagctaccggtgtcaaattagacgtggcgtatttggagaatctcagccttgaagttgctgcccacatgcgccgcttggaggaagaagtattccgtttagcaggccgttcctttcgccttaactctcgcgatcagttagaacgtgtgttgttcgatgaacttggtctccctcctatcggcaagacagagaagaccggtaaacgtagcacttcagcggcggttttagaagctcttcgcgaagtccatcccattgtggacaagatcttgcagtaccgcgaaatggcgaaattgaaaggcacctatattgaccgtcttccggcattagtccacccgaaaacgggacgcctccatacccgcttcaaccaaacagccacggcgaccggtcgtttgtcctcctctgatccaaaccttcagaatattccagtacgtacctttttgggccagaagatccgccgtgcgtttgtagctgagccgggttggcgtttagtggccctcgattatcgtcaaattgaattacgtgtccttgcccatctttctggcgatgagaacctcatccgcgtgtttcaggaaggcaaagacattcacactcaaacggcaagctggatgtttggattatcagctgaagcgatcgatcctttgatgcgtcgtgcagcgaagaccatcaatttcggtgttctctacggtatgagtgcctttcgtttgtcgcaggaattaggcattccctatgaagaagctcaggcgttcattcagaaatactttcaaggctatcccaaagttaaagcatggatcgagaagactctccgtgaaggccgcacacgtggttacgtagagaccttatttggacgtcgccgctatgttcccgatttaaacgctcgcgtgaaaggcaagcgtgaagccgccgaacgcatggcgttcaacatgcctgtacagggcacggcagctgacctcatgaaacttgcaatggtgcgcctttttccacaattgcgtgaagttggtgcccgcatgctgttgcaggtccacgatgaactcttgttagaagcgccaaaagagcgtgcggaagaggtggcagccctcgcgaaagaagttatggaaggcgtgtggcccttagcggtgcctcttgaagtcgaagttggtattggcgaggattggctggctgccaaagga

SEQ ID NO: 5112 - protein, 841 aa, synthetic construct
  REGION 1..841: note = Variant of DNA polymerase I from Thermus sp. strain 2.9
MHHHHHHGGSGVLPVFEPKGRVLLVDGHHLAYRNFFALKGLTTSLGEPVQGVYGFAKSLLKALKEDGDVVIVVFDAKAPSFRHEAYEAYKAGRAPTPEDFPRQLALMKELVDLLGLERLEVPGFEADDVLATLAKKAEREGYEVQILTADRDLFQLLSPRISVLHPEGHRITPEWLWEKYGLRPEQWVDFRALAGDPSDNIPGVKGIGEKTALKLLKEWGSLENLLKNLDQVKPESVREKILAHLEDLKLSRELSRVRTDLPLEVDFGRRREPDWEGLKAFLERLEFGSLLHEFGLLESPLLAEEAPWPPPEGAFLGYRLSRPEPMWAELLALAASAQGRVYRAEDPHGALRGLFEVRGLLAKDLAVVALREGLDLPPTDDPMLLAYLLDPSNTTPEGVARRYGGEWTEDAAKRALLAERLHENLLGRLQGEERLLWLYEEVEKPLSRVLAHMEATGVKLDVAYLENLSLEVAAHMRRLEEEVFRLAGRSFRLNSRDQLERVLFDELGLPPIGKTEKTGKRSTSAAVLEALREVHPIVDKILQYREMAKLKGTYIDRLPALVHPKTGRLHTRFNQTATATGRLSSSDPNLQNIPVRTFLGQKIRRAFVAEPGWRLVALDYRQIELRVLAHLSGDENLIRVFQEGKDIHTQTASWMFGLSAEAIDPLMRRAAKTINFGVLYGMSAFRLSQELGIPYEEAQAFIQKYFQGYPKVKAWIEKTLREGRTRGYVETLFGRRRYVPDLNARVKGKREAAERMAFNMPVQGTAADLMKLAMVRLFPQLREVGARMLLQVHDELLLEAPKERAEEVAALAKEVMEGVWPLAVPLEVEVGIGEDWLAAKG

SEQ ID NO: 5113 - DNA, 2523 bp, synthetic construct
  misc_feature 1..2523: note = Variant of DNA polymerase I from Thermus sp. strain 2.9
  source 1..2523: mol_type = other DNA
atgcaccatcatcatcatcatggcggtagcggcgtgttaccggtgttcgagcctaaaggtcgcgtgcttctggttgatggccatcatctcgcgtatcgtaacttctttgccctgaaaggattaaccaccagcctgggcgagccggtacagggtgtctacggctttgcaaagtcgctcctgaaagctctgaaagaagacggtgatgtggtgattgttgtctttgatgcgaaagcgccaagttttcgccacgaagcgtacgaagcttacaaagccgggcgtgctccaacgccggaagactttcctcgccaattggcgcttatgaaggaattagtggatttgcttggcctcgaacgcttggaagttcccggtttcgaggcagacgacgtattagcgactctcgcaaagaaagccgaacgtgagggctatgaagtccagatcttgacagcagatcgcgatcttttccagcttttatctccgcgcatctcggtgttacacccggaagggcatcgtatcaccccggaatggctctgggagaaatatggtttgcgtcccgaacaatgggtggattttcgcgccttagcaggcgatccgagcgacaatattccgggagttaaaggtatcggcgagaagacggcgctcaagctccttaaagaatgggggtcgttggagaacttgcttaagaatttagatcaggtcaaaccagagtcagtgcgtgagaagattcttgctcacctcgaagacctcaaattaagccgcgaattgtcccgtgtacgcaccgatttgccgctcgaagttgatttcggtcgccgccgcgaacctgactgggagggtcttaaagcgtttttagagcgtcttgaatttggttcgctcttgcatgaattcggccttttagaaagcccgttactggccgaagaagcaccttggccaccgcccgagggcgcgtttttaggttaccgtttgagtcgcccggaaccgatgtgggccgaattactggctcttgcagcgtctgcccagggacgtgtgtatcgcgcggaagaccctcatggtgcgctccgcggcctcttcgaagtccgtggactccttgccaaagacttagctgttgttgcattgcgcgaaggtcttgatttacctccgactgatgatccaatgcttcttgcgtacctcttggacccgtcaaacacgacgcccgaaggcgtagcccgtcgttacggcggcgagtggaccgaagatgcagcgaaacgcgcgttaggggccgaacgtttgcacgaaaatttattaggacgtttgcaaggcgaggaacgtctcctctggctttacgaagaagtggagaaaccattgagtcgcgtgctcgcgcatatggaagctaccggtgtcaaattagacgtggcgtatttggagaatctcagccttgaagttgctgcccacatgcgccgcttggaggaagaagtattccgtttagcaggccgttcctttcgccttaactctcgcgatcagttagaacgtgtgttgttcgatgaacttggtctccctcctatcggcaagacagagaagaccggtaaacgtagcacttcagcggcggttttagaagctcttcgcgaagtccatcccattgtggacaagatcttgcagtaccgcgaaatggcgaaattgaaaggcacctatattgaccgtcttccggcattagtccacccgaaaacgggacgcctccatacccgcttcaaccaaacagccacggcgaccggtcgtttgtcctcctctgatccaaaccttcagaatattccagtacgtaccccattgggccagaagatccgccgtgcgtttgtagctgaggagggttggcgtttagtggccctcgattatcgtcaaattgaattacgtgtccttgcccatctttctggcgatgagaacctcatccgcgtgtttcaggaaggcaaagacattcacactcaaacggcaagctggatgtttggattatcagctgaagcgatcgatcctttgatgcgtcgtgcagcgaagaccatcaatttcggtgttctctacggtatgagtgcctttcgtttgtcgcaggaattaggcattccctatgaagaagctcaggcgttcattcagaaatactttcaaagctatcccaaagttaaagcatggatcgagaagactctccgtgaaggccgcacacgtggttacgtagagaccttatttggacgtcgccgctatgttcccgatttaaacgctcgcgtgaaaggcaagcgtgaagccgccgaacgcatggcgttcaacatgcctgtacagggcacggcagctgacctcatgaaacttgcaatggtgcgcctttttccacaattgcgtgaagttggtgcccgcatgctcttgcaggtccacgatgaactcttgttagaagcgccaaaagagcgtgcggaagaggtggcagccctcgcgaaagaagttatggaaggcgtgtggcccttagcggtgcctcttgaagtcgaagttggtattggcgaggattggctggctgccaaagga

SEQ ID NO: 5114 - protein, 841 aa, synthetic construct
  REGION 1..841: note = Variant of DNA polymerase I from Thermus sp. strain 2.9
MHHHHHHGGSGVLPVFEPKGRVLLVDGHHLAYRNFFALKGLTTSLGEPVQGVYGFAKSLLKALKEDGDVVIVVFDAKAPSFRHEAYEAYKAGRAPTPEDFPRQLALMKELVDLLGLERLEVPGFEADDVLATLAKKAEREGYEVQILTADRDLFQLLSPRISVLHPEGHRITPEWLWEKYGLRPEQWVDFRALAGDPSDNIPGVKGIGEKTALKLLKEWGSLENLLKNLDQVKPESVREKILAHLEDLKLSRELSRVRTDLPLEVDFGRRREPDWEGLKAFLERLEFGSLLHEFGLLESPLLAEEAPWPPPEGAFLGYRLSRPEPMWAELLALAASAQGRVYRAEDPHGALRGLFEVRGLLAKDLAVVALREGLDLPPTDDPMLLAYLLDPSNTTPEGVARRYGGEWTEDAAKRALGAERLHENLLGRLQGEERLLWLYEEVEKPLSRVLAHMEATGVKLDVAYLENLSLEVAAHMRRLEEEVFRLAGRSFRLNSRDQLERVLFDELGLPPIGKTEKTGKRSTSAAVLEALREVHPIVDKILQYREMAKLKGTYIDRLPALVHPKTGRLHTRFNQTATATGRLSSSDPNLQNIPVRTPLGQKIRRAFVAEEGWRLVALDYRQIELRVLAHLSGDENLIRVFQEGKDIHTQTASWMFGLSAEAIDPLMRRAAKTINFGVLYGMSAFRLSQELGIPYEEAQAFIQKYFQSYPKVKAWIEKTLREGRTRGYVETLFGRRRYVPDLNARVKGKREAAERMAFNMPVQGTAADLMKLAMVRLFPQLREVGARMLLQVHDELLLEAPKERAEEVAALAKEVMEGVWPLAVPLEVEVGIGEDWLAAKG

SEQ ID NO: 5115 - DNA, 2523 bp, synthetic construct
  misc_feature 1..2523: note = Variant of DNA polymerase I from Thermus sp. strain 2.9
  source 1..2523: mol_type = other DNA
atgcaccatcatcatcatcatggcggtagcggcgtgttaccggtgttcgagcctaaaggtcgcgtgcttctggttgatggccatcatctcgcgtatcgtaacttctttgccctgaaaggattaaccaccagcctgggcgagccggtacagggtgtctacggctttgcaaagtcgctcctgaaagctctgaaagaagacggtgatgtggtgattgttgtctttgatgcgaaagcgccaagttttcgccacgaagcgtacgaagcttacaaagccgggcgtgctccaacgccggaagactttcctcgccaattggcgcttatgaaggaattagtggatttgcttggcctcgaacgcttggaagttcccggtttcgaggcagacgacgtattagcgactctcgcaaagaaagccgaacgtgagggctatgaagtccagatcttgacagcagatcgcgatcttttccagcttttatctccgcgcatctcggtgttacacccggaagggcatcgtatcaccccggaatggctctgggagaaatatggtttgcgtcccgaacaatgggtggattttcgcgccttagcaggcgatccgagcgacaatattccgggagttaaaggtatcggcgagaagacggcgctcaagctccttaaagaatgggggtcgttggagaacttgcttaagaatttagatcaggtcaaaccagagtcagtgcgtgagaagattcttgctcacctcgaagacctcaaattaagccgcgaattgtcccgtgtacgcaccgatttgccgctcgaagttgatttcggtcgccgccgcgaacctgactgggagggtcttaaagcgtttttagagcgtcttgaatttggttcgctcttgcatgaattcggccttttagaaagcccgttactggccgaagaagcaccttggccaccgcccgagggcgcgtttttaggttaccgtttgagtcgcccggaaccgatgtgggccgaattactggctcttgcagcgtctgcccagggacgtgtgtatcgcgcggaagaccctcatggtgcgctccgcggcctcttcgaagtccgtggactccttgccaaagacttagctgttgttgcattgcgcgaaggtcttgatttacctccgactgatgatccaatgcttcttgcgtacctcttggacccgtcaaacacgacgcccgaaggcgtagcccgtcgttacggcggcgagtggaccgaagatgcagcgaaacgcgcgttattggccgaacgtttgcacgaaaatttattaggacgtttgcaaggcgaggaacgtctcaggtggctttacgaagaagtggagaaaccattgagtcgcgtgctcgcgcatatggaagctaccggtgtcaaattagacgtggcgtatttggagaatctcagccttgaagttgctgcccacatgcgccgcttggaggaagaagtattccgtttagcaggccgttcctttcgccttaactctcgcgatcagttagaacgtgtgttgttcgatgaacttggtctccctcctatcggcaagacagagaagaccggtaaacgtagcacttcagcggcggttttagaagctcttcgcgaagtccatcccattgtggacaagatcttgcagtaccgcgaaatggcgaaattgaaaggcacctatattgaccgtcttccggcattagtccacccgaaaacgggacgcctccatacccgcttcaaccaaacagccacggcgaccggtcgtttgtcctcctctgatccaaaccttcagaatattccagtacgtaccccattgggccagaagatccgccgtgcgtttgtagctgaggagggttggcgtttagtggccctcgattatcgtcaaattgaattacgtgtccttgcccatctttctggcgatgagaacctcatccgcgtgtttcaggaaggcaaagacattcacactcaaacggcaagctggatgtttggattatcagctgaagcgatcgatcctttgatgcgtcgtgcagcgaagaccatcaatttcggtgttctctacggtatgagtgcctttcgtttgtcgcaggaattaggcattccctatgaagaagctcaggcgttcattcagaaatactttcaaagctatcccaaagttaaagcatggatcgagaagactctccgtgaaggccgcacacgtggttacgtagagaccttatttggacgtcgccgctatgttcccgatttaaacgctcgcgtgaaaggcaagcgtgaagccgccgaacgcatggcgttcaacatgcctgtacagggcacggcagctgacctcatgaaacttgcaatggtgcgcctttttccacaattgcgtgaagttggtgcccgcatgctcttgcaggtccacgatgaactcttgttagaagcgccaaaagagcgtgcggaagaggtggcagccctcgcgaaagaagttatggaaggcgtgtggcccttagcggtgcctcttgaagtcgaagttggtattggcgaggattggctggctgccaaagga

SEQ ID NO: 5116 - protein, 841 aa, synthetic construct
  REGION 1..841: note = Variant of DNA polymerase I from Thermus sp. strain 2.9
MHHHHHHGGSGVLPVFEPKGRVLLVDGHHLAYRNFFALKGLTTSLGEPVQGVYGFAKSLLKALKEDGDVVIVVFDAKAPSFRHEAYEAYKAGRAPTPEDFPRQLALMKELVDLLGLERLEVPGFEADDVLATLAKKAEREGYEVQILTADRDLFQLLSPRISVLHPEGHRITPEWLWEKYGLRPEQWVDFRALAGDPSDNIPGVKGIGEKTALKLLKEWGSLENLLKNLDQVKPESVREKILAHLEDLKLSRELSRVRTDLPLEVDFGRRREPDWEGLKAFLERLEFGSLLHEFGLLESPLLAEEAPWPPPEGAFLGYRLSRPEPMWAELLALAASAQGRVYRAEDPHGALRGLFEVRGLLAKDLAVVALREGLDLPPTDDPMLLAYLLDPSNTTPEGVARRYGGEWTEDAAKRALLAERLHENLLGRLQGEERLRWLYEEVEKPLSRVLAHMEATGVKLDVAYLENLSLEVAAHMRRLEEEVFRLAGRSFRLNSRDQLERVLFDELGLPPIGKTEKTGKRSTSAAVLEALREVHPIVDKILQYREMAKLKGTYIDRLPALVHPKTGRLHTRFNQTATATGRLSSSDPNLQNIPVRTPLGQKIRRAFVAEEGWRLVALDYRQIELRVLAHLSGDENLIRVFQEGKDIHTQTASWMFGLSAEAIDPLMRRAAKTINFGVLYGMSAFRLSQELGIPYEEAQAFIQKYFQSYPKVKAWIEKTLREGRTRGYVETLFGRRRYVPDLNARVKGKREAAERMAFNMPVQGTAADLMKLAMVRLFPQLREVGARMLLQVHDELLLEAPKERAEEVAALAKEVMEGVWPLAVPLEVEVGIGEDWLAAKG

SEQ ID NO: 5117 - DNA, 2523 bp, synthetic construct
  misc_feature 1..2523: note = Variant of DNA polymerase I from Thermus sp. strain 2.9
  source 1..2523: mol_type = other DNA
atgcaccatcatcatcatcatggcggtagcggcgtgttaccggtgttcgagcctaaaggtcgcgtgcttctggttgatggccatcatctcgcgtatcgtaacttctttgccctgaaaggattaaccaccagcctgggcgagccggtacagggtgtctacggctttgcaaagtcgctcctgaaagctctgaaagaagacggtgatgtggtgattgttgtctttgatgcgaaagcgccaagttttcgccacgaagcgtacgaagcttacaaagccgggcgtgctccaacgccggaagactttcctcgccaattggcgcttatgaaggaattagtggatttgcttggcctcgaacgcttggaagttcccggtttcgaggcagacgacgtattagcgactctcgcaaagaaagccgaacgtgagggctatgaagtccagatcttgacagcagatcgcgatcttttccagcttttatctccgcgcatctcggtgttacacccggaagggcatcgtatcaccccggaatggctctgggagaaatatggtttgcgtcccgaacaatgggtggattttcgcgccttagcaggcgatccgagcgacaatattccgggagttaaaggtatcggcgagaagacggcgctcaagctccttaaagaatgggggtcgttggagaacttgcttaagaatttagatcaggtcaaaccagagtcagtgcgtgagaagattcttgctcacctcgaagacctcaaattaagccgcgaattgtcccgtgtacgcaccgatttgccgctcgaagttgatttcggtcgccgccgcgaacctgactgggagggtcttaaagcgtttttagagcgtcttgaatttggttcgctcttgcatgaattcggccttttagaaagcccgttactggccgaagaagcaccttggccaccgcccgagggcgcgtttttaggttaccgtttgagtcgcccggaaccgatgtgggccgaattactggctcttgcagcgtctgcccagggacgtgtgtatcgcgcggaagaccctcatggtgcgctccgcggcctcttcgaagtccgtggactccttgccaaagacttagctgttgttgcattgcgcgaaggtcttgatttacctccgactgatgatccaatgcttcttgcgtacctcttggacccgtcaaacacgacgcccgaaggcgtagcccgtcgttacggcggcgagtggaccgaagatgcagcgaaacgcgcgttattggccgaacgtttgcacgaaaatttattaggacgtttgcaaggcgaggaacgtctcctctggctttacgaagaagtggagaaaccattgagtcgcgtgctcgcgcatatggaagctaccggtgtcaaattagacgtggcgtatttggagaatctcagccttgaagttgctgcccacatgcgccgcttggaggaagaagtattccgtttagcaggccgttcctttcgccttaactctcgcgatcagttagaacgtgtgttgttcgatgaacttggtctccctcctatcggcaagacagagaagaccggtaaacgtagcacttcagcggcggttttagaagctcttcgcgaagtccatcccattgtggacaagatcttgcagtaccgcgaaatggcgaaattgaaaggcacctatattgaccgtcttccggcattagtccacccgaaaacgggacgcctccatacccgcttcaaccaaacagccacggcgaccggtcgtttgtcctcctctgatccaaaccttcagaatattccagtacgtaccccattgggccagaagatccgccgtgcgtttgtagctgagccgggttggcgtttagtggccctcgattatcgtcaaattgaattacgtgtccttgcccatctttctggcgatgagaacctcatccgcgtgtttcaggaaggcaaagacattcacactcaaacggcaagctggatgtttggattatcagctgaagcgatcgatcctttgatgcgtcgtgcagcgaagaccatcaatttcggtgttctctacggtatgagtgcctttcgtttgtcgcaggaattaggcattccctatgaagaagctcaggcgttcattcagaaatactttcaaagctatcccaaagttaaagcatggatcgagaagactctccgtgaaggccgcacacgtggttacgtagagaccttatttggacgtcgccgctatgttcccgatttaaacgctcgcgtgaaaggcaagcgtgaagccgccgaacgcatggcgttcaacatgcctgtacagggcacggcagctgacctcatgaaacttgcaatggtgcgcctttttccacaattgcgtgaagttggtgcccgcatgctcttgcaggtccacgatgaactcttgttagaagcgccaaaagagcgtgcggaagaggtggcagccctcgcgaaagaagttatggaaggcgtgtggcccttagcggtgcctcttgaagtcgaagttggtattggcgaggattggctggctgccaaagga

SEQ ID NO: 5118 - protein, 841 aa, synthetic construct
  REGION 1..841: note = Variant of DNA polymerase I from Thermus sp. strain 2.9
MHHHHHHGGSGVLPVFEPKGRVLLVDGHHLAYRNFFALKGLTTSLGEPVQGVYGFAKSLLKALKEDGDVVIVVFDAKAPSFRHEAYEAYKAGRAPTPEDFPRQLALMKELVDLLGLERLEVPGFEADDVLATLAKKAEREGYEVQILTADRDLFQLLSPRISVLHPEGHRITPEWLWEKYGLRPEQWVDFRALAGDPSDNIPGVKGIGEKTALKLLKEWGSLENLLKNLDQVKPESVREKILAHLEDLKLSRELSRVRTDLPLEVDFGRRREPDWEGLKAFLERLEFGSLLHEFGLLESPLLAEEAPWPPPEGAFLGYRLSRPEPMWAELLALAASAQGRVYRAEDPHGALRGLFEVRGLLAKDLAVVALREGLDLPPTDDPMLLAYLLDPSNTTPEGVARRYGGEWTEDAAKRALLAERLHENLLGRLQGEERLLWLYEEVEKPLSRVLAHMEATGVKLDVAYLENLSLEVAAHMRRLEEEVFRLAGRSFRLNSRDQLERVLFDELGLPPIGKTEKTGKRSTSAAVLEALREVHPIVDKILQYREMAKLKGTYIDRLPALVHPKTGRLHTRFNQTATATGRLSSSDPNLQNIPVRTPLGQKIRRAFVAEPGWRLVALDYRQIELRVLAHLSGDENLIRVFQEGKDIHTQTASWMFGLSAEAIDPLMRRAAKTINFGVLYGMSAFRLSQELGIPYEEAQAFIQKYFQSYPKVKAWIEKTLREGRTRGYVETLFGRRRYVPDLNARVKGKREAAERMAFNMPVQGTAADLMKLAMVRLFPQLREVGARMLLQVHDELLLEAPKERAEEVAALAKEVMEGVWPLAVPLEVEVGIGEDWLAAKG

SEQ ID NO: 5119 - DNA, 2523 bp, synthetic construct
  misc_feature 1..2523: note = Variant of DNA polymerase I from Thermus sp. strain 2.9
  source 1..2523: mol_type = other DNA
atgcaccatcatcatcatcatggcggtagcggcgtgttaccggtgttcgagcctaaaggtcgcgtgcttctggttgatggccatcatctcgcgtatcgtaacttctttgccctgaaaggattaaccaccagcctgggcgagccggtacagggtgtctacggctttgcaaagtcgctcctgaaagctctgaaagaagacggtgatgtggtgattgttgtctttgatgcgaaagcgccaagttttcgccacgaagcgtacgaagcttacaaagccgggcgtgctccaacgccggaagactttcctcgccaattggcgcttatgaaggaattagtggatttgcttggcctcgaacgcttggaagttcccggtttcgaggcagacgacgtattagcgactctcgcaaagaaagccgaacgtgagggctatgaagtccagatcttgacagcagatcgcgatcttttccagcttttatctccgcgcatctcggtgttacacccggaagggcatcgtatcaccccggaatggctctgggagaaatatggtttgcgtcccgaacaatgggtggattttcgcgccttagcaggcgatccgagcgacaatattccgggagttaaaggtatcggcgagaagacggcgctcaagctccttaaagaatgggggtcgttggagaacttgcttaagaatttagatcaggtcaaaccagagtcagtgcgtgagaagattcttgctcacctcgaagacctcaaattaagccgcgaattgtcccgtgtacgcaccgatttgccgctcgaagttgatttcggccgccgccgcgaacctgactgggagggtcttaaagcgtttttagagcgtcttgaatttggttcgctcttgcatgaattcggccttttagaaagcccgttactggccgaagaagcaccttggccaccgcccgagggcgcgtttttaggttaccgtttgagtcgcccggaaccgatgtgggccgaattactggctcttgcagcgtctgcccagggacgtgtgtatcgcgcggaagaccctcatggtgcgctccgcggcctcttcgaagtccgtggactccttgccaaagacttagctgttgttgcattgcgcgaaggtcttgatttacctccgactgatgatccaatgcttcttgcgtacctcttggacccgtcaaacacgacgcccgaaggcgtagcccgtcgttacggcggcgagtggaccgaagatgcagcgaaacgcgcgttattggccgaacgtttgcacgaaaatttattaggacgtttgcaaggcgaggaacgtctcctctggctttacgaagaagtggagaaaccattgagtcgcgtgctcgcgcatatggaagctaccggtgtcaaattagacgtggcgtatttggagaatctcagccttgaagttgctgcccacatgcgccgcttggaggaagaagtattccgtttagcaggccgttcctttcgccttaactctcgcgatcagttagaacgtgtgttgttcgatgaacttggtctccctcctatcggcaagacagagaagaccggtaaacgtagcacttcagcggcggttttagaagctcttcgcgaagtccatcccattgtggacaagatcttgcagtaccgcgaaatggcgaaattgaaaggcacctatattgaccgtcttccggcattagtccacccgaaaacgggacgcctccatacccgcttcaaccaaacagccacggcgaccggtcgtttgtccagttctgatccaaaccttcagaatattccagtacgtaccccattgggccagaagatccgccgtgcgtttgtagctgaggagggttggcgtttagtggccctcgattatagtcaaattgaattacgtgtccttgcccatctttctggcgatgagaacctcatccacgtgtttcaggaaggcaaagacattcacactcaaacggcaagctggatgtttggattatcagctgaagcgatcgatcctttgatgcgtcgtgcagcgaagaccatcaatttcggtgttctctacggtatgagtgcctttcgtttgtcgcaggaattaggcattccctatgaagaagctcaggcgttcattcagaaatactttcaaagctatcccaaagttaaagcatggatcgagaagactctccgcgaaggccgcacacgtggttacgtagagaccttatttggacgtcgccgctatgttcccgatttaaacgctcgcgtgaaaagcgtacgtgaagccgccgaacgcatggcgttcaacatgcctgtacagggcacggcagctgacctcatgaaacttgcaatggtgcgcctttttccacaattgcgtgaagttggtgcccgcatgctcttgcaggtccacgatgaactcttgttagaagcgccaaaagagcgtgcggaagaggtggcagccctcgcgaaagaagttatggaaggcgtgtggcccttagcggtgcctcttgaagtcgaagttggtattggcgaggattggctggctgccaaagga

SEQ ID NO: 5120 - protein, 841 aa, synthetic construct
  REGION 1..841: note = Variant of DNA polymerase I from Thermus sp. strain 2.9
MHHHHHHGGSGVLPVFEPKGRVLLVDGHHLAYRNFFALKGLTTSLGEPVQGVYGFAKSLLKALKEDGDVVIVVFDAKAPSFRHEAYEAYKAGRAPTPEDFPRQLALMKELVDLLGLERLEVPGFEADDVLATLAKKAEREGYEVQILTADRDLFQLLSPRISVLHPEGHRITPEWLWEKYGLRPEQWVDFRALAGDPSDNIPGVKGIGEKTALKLLKEWGSLENLLKNLDQVKPESVREKILAHLEDLKLSRELSRVRTDLPLEVDFGRRREPDWEGLKAFLERLEFGSLLHEFGLLESPLLAEEAPWPPPEGAFLGYRLSRPEPMWAELLALAASAQGRVYRAEDPHGALRGLFEVRGLLAKDLAVVALREGLDLPPTDDPMLLAYLLDPSNTTPEGVARRYGGEWTEDAAKRALLAERLHENLLGRLQGEERLLWLYEEVEKPLSRVLAHMEATGVKLDVAYLENLSLEVAAHMRRLEEEVFRLAGRSFRLNSRDQLERVLFDELGLPPIGKTEKTGKRSTSAAVLEALREVHPIVDKILQYREMAKLKGTYIDRLPALVHPKTGRLHTRFNQTATATGRLSSSDPNLQNIPVRTPLGQKIRRAFVAEEGWRLVALDYSQIELRVLAHLSGDENLIHVFQEGKDIHTQTASWMFGLSAEAIDPLMRRAAKTINFGVLYGMSAFRLSQELGIPYEEAQAFIQKYFQSYPKVKAWIEKTLREGRTRGYVETLFGRRRYVPDLNARVKSVREAAERMAFNMPVQGTAADLMKLAMVRLFPQLREVGARMLLQVHDELLLEAPKERAEEVAALAKEVMEGVWPLAVPLEVEVGIGEDWLAAKG

SEQ ID NO: 5121 - DNA, 2523 bp, synthetic construct
  misc_feature 1..2523: note = Variant of DNA polymerase I from Thermus sp. strain 2.9
  source 1..2523: mol_type = other DNA
atgcaccatcatcatcatcatggcggtagcggcgtgttaccggtgttcgagcctaaaggtcgcgtgcttctggttgatggccatcatctcgcgtatcgtaacttctttgccctgaaaggattaaccaccagcctgggcgagccggtacagggtgtctacggctttgcaaagtcgctcctgaaagctctgaaagaagacggtgatgtggtgattgttgtctttgatgcgaaagcgccaagttttcgccacgaagcgtacgaagcttacaaagccgggcgtgctccaacgccggaagactttcctcgccaattggcgcttatgaaggaattagtggatttgcttggcctcgaacgcttggaagttcccggtttcgaggcagacgacgtattagcgactctcgcaaagaaagccgaacgtgagggctatgaagtccagatcttgacagcagatcgcgatcttttccagcttttatctccgcgcatctcggtgttacacccggaagggcatcgtatcaccccggaatggctctgggagaaatatggtttgcgtcccgaacaatgggtggattttcgcgccttagcaggcgatccgagcgacaatattccgggagttaaaggtatcggcgagaagacggcgctcaagctccttaaagaatgggggtcgttggagaacttgcttaagaatttagatcaggtcaaaccagagtcagtgcgtgagaagattcttgctcacctcgaagacctcaaattaagccgcgaattgtcccgtgtacgcaccgatttgccgctcgaagttgatttcggtcgccgccgcgaacctgactgggagggtcttaaagcgtttttagagcgtcttgaatttggttcgctcttgcatgaattcggccttttagaaagcccgttactggccgaagaagcaccttggccaccgcccgagggcgcgtttttaggttaccgtttgagtcgcccggaaccgatgtgggccgaattactggctcttgcagcgtctgcccagggacgtgtgtatcgcgcggaagaccctcatggtgcgctccgcggcctcttcgaagtccgtggactccttgccaaagacttagctgttgttgcattgcgcgaaggtcttgatttacctccgactgatgatccaatgcttcttgcgtacctcttggacccgtcaaacacgacgcccgaaggcgtagcccgtcgttacggcggcgagtggaccgaagatgcagcgaaacgcgcgttattggccgaacgtttgcacgaaaatttattaggacgtttgcaaggcgaggaacgtctcctctggctttacgaagaagtggagaaaccattgagtcgcgtgctcgcgcatatggaagctaccggtgtcaaattagacgtggcgtatttggagaatctcagccttgaagttgctgcccacatgcgccgcttggaggaagaagtattccgtttagcaggccgttcctttcgccttaactctcgcgatcagttagaacgtgtgttgttcgatgaacttggtctccctcctatcggcaagacagagaagaccggtaaacgtagcacttcagcggcggttttagaagctcttcgcgaagtccatcccattgtggacaagatcttgcagtaccgcgaaatggcgaaattgaaaggcacctatattgaccgtcttccggcattagtccacccgaaaacgggacgcctccatacccgcttcaaccaaacagccacggcgaccggtcgtttgtcctcctctgatccaaaccttcagaatattccagtacgtaccccattgggccagaagatccgccgtgcgtttgtagctgaggagggttggcgtttagtggccctcgattatcgtcaaattgaattacgtgtccttgcccatctttctggcgatgagaacctcatccgcgtgtttcaggaaggcaaagacattcacactcaaacggcaagctggatgtttggattatcagctgaagcgatcgatcctttgatgcgtcgtgcagcgaagaccatcaatttcggtgttctctacggtatgagtgcctttcgtttgtcgcaggaattaggcattcccccggaagaagctcaggcgttcattcagaaatactttcaaagctatcccaaagttaaagcatggatcgagaagactctccgtgaaggccgcacacgtggttacgtagagaccttatttggacgtcgccgctatgttcccgatttaaacgctcgcgtgaaaggcaagcgtgaagccgccgaacgcatggcgttcaacatgcctgtacagggcacggcagctgacctcatgaaacttgcaatggtgcgcctttttccacaattgcgtgaagttggtgcccgcatgctcttgcaggtccacgatgaactcttgttagaagcgccaaaagagcgtgcggaagaggtggcagccctcgcgaaagaagttatggaaggcgtgtggcccttagcggtgcctcttgaagtcgaagttggtattggcgaggattggctggctgccaaagga

SEQ ID NO: 5122 - protein, 841 aa, synthetic construct
  REGION 1..841: note = Variant of DNA polymerase I from Thermus sp. strain 2.9
MHHHHHHGGSGVLPVFEPKGRVLLVDGHHLAYRNFFALKGLTTSLGEPVQGVYGFAKSLLKALKEDGDVVIVVFDAKAPSFRHEAYEAYKAGRAPTPEDFPRQLALMKELVDLLGLERLEVPGFEADDVLATLAKKAEREGYEVQILTADRDLFQLLSPRISVLHPEGHRITPEWLWEKYGLRPEQWVDFRALAGDPSDNIPGVKGIGEKTALKLLKEWGSLENLLKNLDQVKPESVREKILAHLEDLKLSRELSRVRTDLPLEVDFGRRREPDWEGLKAFLERLEFGSLLHEFGLLESPLLAEEAPWPPPEGAFLGYRLSRPEPMWAELLALAASAQGRVYRAEDPHGALRGLFEVRGLLAKDLAVVALREGLDLPPTDDPMLLAYLLDPSNTTPEGVARRYGGEWTEDAAKRALLAERLHENLLGRLQGEERLLWLYEEVEKPLSRVLAHMEATGVKLDVAYLENLSLEVAAHMRRLEEEVFRLAGRSFRLNSRDQLERVLFDELGLPPIGKTEKTGKRSTSAAVLEALREVHPIVDKILQYREMAKLKGTYIDRLPALVHPKTGRLHTRFNQTATATGRLSSSDPNLQNIPVRTPLGQKIRRAFVAEEGWRLVALDYRQIELRVLAHLSGDENLIRVFQEGKDIHTQTASWMFGLSAEAIDPLMRRAAKTINFGVLYGMSAFRLSQELGIPPEEAQAFIQKYFQSYPKVKAWIEKTLREGRTRGYVETLFGRRRYVPDLNARVKGKREAAERMAFNMPVQGTAADLMKLAMVRLFPQLREVGARMLLQVHDELLLEAPKERAEEVAALAKEVMEGVWPLAVPLEVEVGIGEDWLAAKG

SEQ ID NO: 5123 - DNA, 2523 bp, synthetic construct
  misc_feature 1..2523: note = Variant of DNA polymerase I from Thermus sp. strain 2.9
  source 1..2523: mol_type = other DNA
atgcaccatcatcatcatcatggcggtagcggcgtgttaccggtgttcgagcctaaaggtcgcgtgcttctggttgatggccatcatctcgcgtatcgtaacttctttgccctgaaaggattaaccaccagcctgggcgagccggtacagggtgtctacggctttgcaaagtcgctcctgaaagctctgaaagaagacggtgatgtggtgattgttgtctttgatgcgaaagcgccaagttttcgccacgaagcgtacgaagcttacaaagccgggcgtgctccaacgccggaagactttcctcgccaattggcgcttatgaaggaattagtggatttgcttggcctcgaacgcttggaagttcccggtttcgaggcagacgacgtattagcgactctcgcaaagaaagccgaacgtgagggctatgaagtccagatcttgacagcagatcgcgatcttttccagcttttatctccgcgcatctcggtgttacacccggaagggcatcgtatcaccccggaatggctctgggagaaatatggtttgcgtcccgaacaatgggtggattttcgcgccttagcaggcgatccgagcgacaatattccgggagttaaaggtatcggcgagaagacggcgctcaagctccttaaagaatgggggtcgttggagaacttgcttaagaatttagatcaggtcaaaccagagtcagtgcgtgagaagattcttgctcacctcgaagacctcaaattaagccgcgaattgtcccgtgtacgcaccgatttgccgctcgaagttgatttcggtcgccgccgcgaacctgactgggagggtcttaaagcgtttttagagcgtcttgaatttggttcgctcttgcatgaattcggccttttagaaagcccgttactggccgaagaagcaccttggccaccgcccgagggcgcgtttttaggttaccgtttgagtcgcccggaaccgatgtgggccgaattactggctcttgcagcgtctgcccagggacgtgtgtatcgcgcggaagaccctcatggtgcgctccgcggcctcttcgaagtccgtggactccttgccaaagacttagctgttgttgcattgcgcgaaggtcttgatttacctccgactgatgatccaatgcttcttgcgtacctcttggacccgtcaaacacgacgcccgaaggcgtagcccgtcgttacggcggcgagtggaccgaagatgcagcgaaacgcgcgttattggccgaacgtttgcacgaaaatttattaggacgtttgcaaggcgaggaacgtctcctctggctttacgaagaagtggagaaaccattgagtcgcgtgctcgcgcatatggaagctaccggtgtcaaattagacgtggcgtatttggagaatctcagccttgaagttgctgcccacatgcgccgcttggaggaagaagtattccgtttagcaggccgttcctttcgccttaactctcgcgatcagttagaacgtgtgttgttcgatgaacttggtctccctcctatcggcaagacagagaagaccggtaaacgtagcacttcagcggcggttttagaagctcttcgcgaagtccatcccattgtggacaagatcttgcagtaccgcgaaatggcgctgttgaaaggcacctatattgaccgtcttccggcattagtccacccgaaaacgggacgcctccatacccgcttcaaccaaacagccacggcgaccggtcgtttgtcctcctctgatccaaaccttcagaatattccagtacgtaccccattgggccagaagatccgccgtgcgtttgtagctgaggagggttggcgtttagtggccctcgattatcgtcaaattgaattacgtgtccttgcccatctttctggcgatgagaacctcatccgcgtgtttcaggaaggcaaagacattcacactcaaacggcaagctggatgtttggattatcagctgaagcgatcgatcctttgatgcgtcgtgcagcgaagaccatcaatttcggtgttctctacggtatgagtgcctttcgtttgtcgcaggaattaggcattccctatgaagaagctcaggcgttcattcagaaatactttcaaagctatcccaaagttaaagcatggatcgagaagactctccgtgaaggccgcacacgtggttacgtagagaccttatttggacgtcgccgctatgttcccgatttaaacgctcgcgtgaaaggcaagcgtgaagccgccgaacgcatggcgttcaacatgcctgtacagggcacggcagctgacctcatgaaacttgcaatggtgcgcctttttccacaattgcgtgaagttggtgcccgcatgctcttgcaggtccacgatgaactcttgttagaagcgccaaaagagcgtgcggaagaggtggcagccctcgcgaaagaagttatggaaggcgtgtggcccttagcggtgcctcttgaagtcgaagttggtattggcgaggattggctggctgccaaagga

SEQ ID NO: 5124 - protein, 841 aa, synthetic construct
  REGION 1..841: note = Variant of DNA polymerase I from Thermus sp. strain 2.9
MHHHHHHGGSGVLPVFEPKGRVLLVDGHHLAYRNFFALKGLTTSLGEPVQGVYGFAKSLLKALKEDGDVVIVVFDAKAPSFRHEAYEAYKAGRAPTPEDFPRQLALMKELVDLLGLERLEVPGFEADDVLATLAKKAEREGYEVQILTADRDLFQLLSPRISVLHPEGHRITPEWLWEKYGLRPEQWVDFRALAGDPSDNIPGVKGIGEKTALKLLKEWGSLENLLKNLDQVKPESVREKILAHLEDLKLSRELSRVRTDLPLEVDFGRRREPDWEGLKAFLERLEFGSLLHEFGLLESPLLAEEAPWPPPEGAFLGYRLSRPEPMWAELLALAASAQGRVYRAEDPHGALRGLFEVRGLLAKDLAVVALREGLDLPPTDDPMLLAYLLDPSNTTPEGVARRYGGEWTEDAAKRALLAERLHENLLGRLQGEERLLWLYEEVEKPLSRVLAHMEATGVKLDVAYLENLSLEVAAHMRRLEEEVFRLAGRSFRLNSRDQLERVLFDELGLPPIGKTEKTGKRSTSAAVLEALREVHPIVDKILQYREMALLKGTYIDRLPALVHPKTGRLHTRFNQTATATGRLSSSDPNLQNIPVRTPLGQKIRRAFVAEEGWRLVALDYRQIELRVLAHLSGDENLIRVFQEGKDIHTQTASWMFGLSAEAIDPLMRRAAKTINFGVLYGMSAFRLSQELGIPYEEAQAFIQKYFQSYPKVKAWIEKTLREGRTRGYVETLFGRRRYVPDLNARVKGKREAAERMAFNMPVQGTAADLMKLAMVRLFPQLREVGARMLLQVHDELLLEAPKERAEEVAALAKEVMEGVWPLAVPLEVEVGIGEDWLAAKG

SEQ ID NO: 5125 - DNA, 2523 bp, synthetic construct
  misc_feature 1..2523: note = Variant of DNA polymerase I from Thermus sp. strain 2.9
  source 1..2523: mol_type = other DNA
atgcaccatcatcatcatcatggcggtagcggcgtgttaccggtgttcgagcctaaaggtcgcgtgcttctggttgatggccatcatctcgcgtatcgtaacttctttgccctgaaaggattaaccaccagcctgggcgagccggtacagggtgtctacggctttgcaaagtcgctcctgaaagctctgaaagaagacggtgatgtggtgattgttgtctttgatgcgaaagcgccaagttttcgccacgaagcgtacgaagcttacaaagccgggcgtgctccaacgccggaagactttcctcgccaattggcgcttatgaaggaattagtggatttgcttggcctcgaacgcttggaagttcccggtttcgaggcagacgacgtattagcgactctcgcaaagaaagccgaacgtgagggctatgaagtccagatcttgacagcagatcgcgatcttttccagcttttatctccgcgcatctcggtgttacacccggaagggcatcgtatcaccccggaatggctctgggagaaatatggtttgcgtcccgaacaatgggtggattttcgcgccttagcaggcgatccgagcgacaatattccgggagttaaaggtatcggcgagaagacggcgctcaagctccttaaagaatgggggtcgttggagaacttgcttaagaatttagatcaggtcaaaccagagtcagtgcgtgagaagattcttgctcacctcgaagacctcaaattaagccgcgaattgtcccgtgtacgcaccgatttgccgctcgaagttgatttcggtcgccgccgcgaacctgactgggagggtcttaaagcgtttttagagcgtcttgaatttggttcgctcttgcatgaattcggccttttagaaagcccgttactggccgaagaagcaccttggccaccgcccgagggcgcgtttttaggttaccgtttgagtcgcccggaaccgatgtgggccgaattactggctcttgcagcgtctgcccagggacgtgtgtatcgcgcggaagaccctcatggtgcgctccgcggcctcttcgaagtccgtggactccttgccaaagacttagctgttgttgcattgcgcgaaggtcttgatttacctccgactgatgatccaatgcttcttgcgtacctcttggacccgtcaaacacgacgcccgaaggcgtagcccgtcgttacggcggcgagtggaccgaagatgcaggtaaacgcgcgttattggccgaacgtttgcacgaaaatttattaggacgtttgcaaggcgaggaacgtctcctctggctttacgaagaagtggagaaaccattgagtcgcgtgctcgcgcatatggaagctaccggtgtcaaattagacgtggcgtatttggagaatctcagccttgaagttgctgcccacatgcgccgcttggaggaagaagtattccgtttagcaggccgttcctttcgccttaactctcgcgatcagttagaacgtgtgttgttcgatgaacttggtctccctcctatcggcaagacagagaagaccggtaaacgtagcacttcagcggcggttttagaagctcttcgcgaagtccatcccattgtggacaagatcttgcagtaccgcgaaatggcgaaattgaaaggcacctatattgaccgtcttccggcattagtccacccgaaaacgggacgcctccatacccgcttcaaccaaacagccacggcgaccggtcgtttgtcctcctctgatccaaaccttcagaatattccagtacgtaccccattgggccagaagatccgccgtgcgtttgtagctgaggagggttggcgtttagtggccctcgattatcgtcaaattgaattacgtgtccttgcccatctttctggcgatgagaacctcatccgcgtgtttcaggaaggcaaagacattcacactcaaacggcaagctggatgtttggattatcagctgaagcgatcgatcctttgatgcgtcgtgcagcgaagaccatcaatttcggtgttctctacggtatgagtgcctttcgtttgtcgcaggaattaggcattccctatgaagaagctcaggcgttcattcagaaatactttcaaagctatcccaaagttaaagcatggatcgagaagactctccgtgaaggccgcacacgtggttacgtagagaccttatttggacgtcgccgctatgttcccgatttaaacgctcgcgtgaaaggcaagcgtgaagccgccgaacgcatggcgttcaacatgcctgtacagggcacggcagctgacctcatgaaacttgcaatggtgcgcctttttccacaattgcgtgaagttggtgcccgcatgctcttgcaggtccacgatgaactcttgttagaagcgccaaaagagcgtgcggaagaggtggcagccctcgcgaaagaagttatggaaggcgtgtggcccttagcggtgcctcttgaagtcgaagttggtattggcgaggattggctggctgccaaagga

SEQ ID NO: 5126 - protein, 841 aa, synthetic construct
  REGION 1..841: note = Variant of DNA polymerase I from Thermus sp. strain 2.9
MHHHHHHGGSGVLPVFEPKGRVLLVDGHHLAYRNFFALKGLTTSLGEPVQGVYGFAKSLLKALKEDGDVVIVVFDAKAPSFRHEAYEAYKAGRAPTPEDFPRQLALMKELVDLLGLERLEVPGFEADDVLATLAKKAEREGYEVQILTADRDLFQLLSPRISVLHPEGHRITPEWLWEKYGLRPEQWVDFRALAGDPSDNIPGVKGIGEKTALKLLKEWGSLENLLKNLDQVKPESVREKILAHLEDLKLSRELSRVRTDLPLEVDFGRRREPDWEGLKAFLERLEFGSLLHEFGLLESPLLAEEAPWPPPEGAFLGYRLSRPEPMWAELLALAASAQGRVYRAEDPHGALRGLFEVRGLLAKDLAVVALREGLDLPPTDDPMLLAYLLDPSNTTPEGVARRYGGEWTEDAGKRALLAERLHENLLGRLQGEERLLWLYEEVEKPLSRVLAHMEATGVKLDVAYLENLSLEVAAHMRRLEEEVFRLAGRSFRLNSRDQLERVLFDELGLPPIGKTEKTGKRSTSAAVLEALREVHPIVDKILQYREMAKLKGTYIDRLPALVHPKTGRLHTRFNQTATATGRLSSSDPNLQNIPVRTPLGQKIRRAFVAEEGWRLVALDYRQIELRVLAHLSGDENLIRVFQEGKDIHTQTASWMFGLSAEAIDPLMRRAAKTINFGVLYGMSAFRLSQELGIPYEEAQAFIQKYFQSYPKVKAWIEKTLREGRTRGYVETLFGRRRYVPDLNARVKGKREAAERMAFNMPVQGTAADLMKLAMVRLFPQLREVGARMLLQVHDELLLEAPKERAEEVAALAKEVMEGVWPLAVPLEVEVGIGEDWLAAKG

SEQ ID NO: 5127 - DNA, 2523 bp, synthetic construct
  misc_feature 1..2523: note = Variant of DNA polymerase I from Thermus sp. strain 2.9
  source 1..2523: mol_type = other DNA
atgcaccatcatcatcatcatggcggtagcggcgtgttaccggtgttcgagcctaaaggtcgcgtgcttctggttgatggccatcatctcgcgtatcgtaacttctttgccctgaaaggattaaccaccagcctgggcgagccggtacagggtgtctacggctttgcaaagtcgctcctgaaagctctgaaagaagacggtgatgtggtgattgttgtctttgatgcgaaagcgccaagttttcgccacgaagcgtacgaagcttacaaagccgggcgtgctccaacgccggaagactttcctcgccaattggcgcttatgaaggaattagtggatttgcttggcctcgaacgcttggaagttcccggtttcgaggcagacgacgtattagcgactctcgcaaagaaagccgaacgtgagggctatgaagtccagatcttgacagcagatcgcgatcttttccagcttttatctccgcgcatctcggtgttacacccggaagggcatcgtatcaccccggaatggctctgggagaaatatggtttgcgtcccgaacaatgggtggattttcgcgccttagcaggcgatccgagcgacaatattccgggagttaaaggtatcggcgagaagacggcgctcaagctccttaaagaatgggggtcgttggagaacttgcttaagaatttagatcaggtcaaaccagagtcagtgcgtgagaagattcttgctcacctcgaagacctcaaattaagccgcgaattgtcccgtgtacgcaccgatttgccgctcgaagttgatttcggtcgccgccgcgaacctgactgggagggtcttaaagcgtttttagagcgtcttgaatttggttcgctcttgcatgaattcggccttttagaaagcccgttactggccgaagaagcaccttggccaccgcccgagggcgcgtttttaggttaccgtttgagtcgcccggaaccgatgtgggccgaattactggctcttgcagcgtctgcccagggacgtgtgtatcgcgcggaagaccctcatggtgcgctccgcggcctcttcgaagtccgtggactccttgccaaagacttagctgttgttgcattgcgcgaaggtcttgatttacctccgactgatgatccaatgcttcttgcgtacctcttggacccgtcaaacacgacgcccgaaggcgtagcccgtcgttacggcggcgagtggaccgaagatgcagccaaacgcgcgttattggccgaacgtttgcacgaaaatttattaggacgtttgcaaggcgaggagcgtctccgttggctttacgaagaagtggagaaaccattgagtcgcgtgctcgcgcatatggaagctaccggtgtcaaattagacgtggcgtatttggagaatctcagccttgaagttgctgcccacatgcgccgcttggaggaagaagtattccgtttagcaggccgttcctttcgccttaactctcgcgatcagttagaacgtgtgttgttcgatgaacttggtctccctcctatcggcaagacagagaagaccggtaaacgtagcacttcagcggcggttttagaagctcttcgcgaagtccatcccattgtggacaagatcttgcagtaccgcgaaatggcgaaattgaaaggcacctatattgaccgtcttccggcattagtccacccgaaaacgggacgcctccatacccgcttcaaccaaacagccacggcgaccggtcgtttgtcctcctctgatccaaaccttcagaatattccagtacgtaccccattgggccagaagatccgccgtgcgtttgtagctgaggagggttggcgtttagtggccctcgattatcgtcaaattgaattacgtgtccttgcccatctttctggcgatgagaacctcatccgcgtgtttcaggaaggcaaagacattcacactcaaacggcaagctggatgtttggattatcagctgaagcgatcgatcctttgatgcgtcgtgcagcgaagaccatcaatttcggtgttctctacggtatgagtgcctttcgtttgtcgcaggaattaggcattccctatgaagaagctcaggcgttcattcagaaatactttcaaggctatcccaaagttaaagcatggatcgagaagactctccgtgaaggccgcacacgtggttacgtagagaccttatttggacgtcgccgctatgttcccgatttaaacggtcgcgtgaaaggcaagcgtgaagccgccgaacgcatggcgttcaacatgcctgtacagggcacggcagctgacctcatgaaacttgcaatggtgcgcctttttccacaattgcgtgaagttggtgcccgcatgctcttgcaggtccacgatgaactcttgttagaagcgccaaaagagcgtgcggaagaggtggcagccctcgcgaaagaagttatggaaggcgtgtggcccttagcggtgcctcttgaagtcgaagttggtattggcgaggattggctggctgccaaagga

SEQ ID NO: 5128 - protein, 841 aa, synthetic construct
  REGION 1..841: note = Variant of DNA polymerase I from Thermus sp. strain 2.9
MHHHHHHGGSGVLPVFEPKGRVLLVDGHHLAYRNFFALKGLTTSLGEPVQGVYGFAKSLLKALKEDGDVVIVVFDAKAPSFRHEAYEAYKAGRAPTPEDFPRQLALMKELVDLLGLERLEVPGFEADDVLATLAKKAEREGYEVQILTADRDLFQLLSPRISVLHPEGHRITPEWLWEKYGLRPEQWVDFRALAGDPSDNIPGVKGIGEKTALKLLKEWGSLENLLKNLDQVKPESVREKILAHLEDLKLSRELSRVRTDLPLEVDFGRRREPDWEGLKAFLERLEFGSLLHEFGLLESPLLAEEAPWPPPEGAFLGYRLSRPEPMWAELLALAASAQGRVYRAEDPHGALRGLFEVRGLLAKDLAVVALREGLDLPPTDDPMLLAYLLDPSNTTPEGVARRYGGEWTEDAAKRALLAERLHENLLGRLQGEERLRWLYEEVEKPLSRVLAHMEATGVKLDVAYLENLSLEVAAHMRRLEEEVFRLAGRSFRLNSRDQLERVLFDELGLPPIGKTEKTGKRSTSAAVLEALREVHPIVDKILQYREMAKLKGTYIDRLPALVHPKTGRLHTRFNQTATATGRLSSSDPNLQNIPVRTPLGQKIRRAFVAEEGWRLVALDYRQIELRVLAHLSGDENLIRVFQEGKDIHTQTASWMFGLSAEAIDPLMRRAAKTINFGVLYGMSAFRLSQELGIPYEEAQAFIQKYFQGYPKVKAWIEKTLREGRTRGYVETLFGRRRYVPDLNGRVKGKREAAERMAFNMPVQGTAADLMKLAMVRLFPQLREVGARMLLQVHDELLLEAPKERAEEVAALAKEVMEGVWPLAVPLEVEVGIGEDWLAAKG

SEQ ID NO: 5129 - DNA, 2523 bp, synthetic construct
  misc_feature 1..2523: note = Variant of DNA polymerase I from Thermus sp. strain 2.9
  source 1..2523: mol_type = other DNA
atgcaccatcatcatcatcatggcggtagcggcgtgttaccggtgttcgagcctaaaggtcgcgtgcttctggttgatggccatcatctcgcgtatcgtaacttctttgccctgaaaggattaaccaccagcctgggcgagccggtacagggtgtctacggctttgcaaagtcgctcctgaaagctctgaaagaagacggtgatgtggtgattgttgtctttgatgcgaaagcgccaagttttcgccacgaagcgtacgaagcttacaaagccgggcgtgctccaacgccggaagactttcctcgccaattggcgcttatgaaggaattagtggatttgcttggcctcgaacgcttggaagttcccggtttcgaggcagacgacgtattagcgactctcgcaaagaaagccgaacgtgagggctatgaagtccagatcttgacagcagatcgcgatcttttccagcttttatctccgcgcatctcggtgttacacccggaagggcatcgtatcaccccggaatggctctgggagaaatatggtttgcgtcccgaacaatgggtggattttcgcgccttagcaggcgatccgagcgacaatattccgggagttaaaggtatcggcgagaagacggcgctcaagctccttaaagaatgggggtcgttggagaacttgcttaagaatttagatcaggtcaaaccagagtcagtgcgtgagaagattcttgctcacctcgaagacctcaaattaagccgcgaattgtcccgtgtacgcaccgatttgccgctcgaagttgatttcggtcgccgccgcgaacctgactgggagggtcttaaagcgtttttagagcgtcttgaatttggttcgctcttgcatgaattcggccttttagaaagcccgttactggccgaagaagcaccttggccaccgcccgagggcgcgtttttaggttaccgtttgagtcgcccggaaccgatgtgggccgaattactggctcttgcagcgtctgcccagggacgtgtgtatcgcgcggaagaccctcatggtgcgctccgcggcctcttcgaagtccgtggactccttgccaaagacttagctgttgttgcattgcgcgaaggtcttgatttacctccgactgatgatccaatgcttcttgcgtacctcttggacccgtcaaacacgacgcccgaaggcgtagcccgtcgttacggcggcgagtggaccgaagatgcagcgaaacgcgcgttattggccgaacgtttgcacgaaaatttattaggacgtttgcaaggcgaggaacgtctcctctggctttacgaagaagtggagaaaccattgagtcgcgtgctcgcgcatatggaagctaccggtgtcaaattagacgtggcgtatttggagaatctcagccttgaagttgctgcccatatgcgccgcttggaggaagaagtattccgtttagcaggccgttcctttcgccttaactctcgcgatcagttagaacgtgtgttgttcgatgaacttggtctccctcctatcggcaagacagagaagaccggtaaacgtagcacttcagcggcggttttagaagctcttcgcgaagtccatcccattgtggacaagatcttgcagtaccgcgaactggcgaaattgaaaggcacctatattgaccgtcttccggcattagtccacccgaaaacgggacgcctccatacccgcttcaaccaaacagccacggcgaccggtcgtttgtcctcctctgatccaaaccttcagaatattccagtacgtaccccattgggccagaagatccgccgtgcgtttgtagctgaggagggttggcgtttagtggccctcgattatcgtcaaattgaattacgtgtccttgcccatctttctggcgatgagaacctcatccgcgtgtttcaggaaggcaaagacattcacactcaaacggcaagctggatgtttggattatcagctgaagcgatcgatcctttgatgcgtcgtgcagcgaagaccatcaatttcggtgttctctacggtatgagtgcctttcgtttgtcgcaggaattaggcattccctatgaagaagctcaggcgttcattcagaaatactttcaaagctatcccaaagttaaagcatggatcgagaagactctccgtgaaggccgcacacgtggttacgtagagaccttatttggacgtcgccgctatgttcccgatttaaacgctcgcgtgaaaggcaagcgtgaagccgccgaacgcatggcgttcaacatgcctgtacagggcacggcagctgacctcatgaaacttgcaatggtgcgcctttttccacaattgcgtgaagttggtgcccgcatgctcttgcaggtccacgatgaactcttgttagaagcgccaaaagagcgtgcggaagaggtggcagccctcgcgaaagaagttatggaaggcgtgtggcccttagcggtgcctcttgaagtcgaagttggtattggcgaggattggctggctgccaaagga

SEQ ID NO: 5130 - protein, 841 aa, synthetic construct
  REGION 1..841: note = Variant of DNA polymerase I from Thermus sp. strain 2.9
MHHHHHHGGSGVLPVFEPKGRVLLVDGHHLAYRNFFALKGLTTSLGEPVQGVYGFAKSLLKALKEDGDVVIVVFDAKAPSFRHEAYEAYKAGRAPTPEDFPRQLALMKELVDLLGLERLEVPGFEADDVLATLAKKAEREGYEVQILTADRDLFQLLSPRISVLHPEGHRITPEWLWEKYGLRPEQWVDFRALAGDPSDNIPGVKGIGEKTALKLLKEWGSLENLLKNLDQVKPESVREKILAHLEDLKLSRELSRVRTDLPLEVDFGRRREPDWEGLKAFLERLEFGSLLHEFGLLESPLLAEEAPWPPPEGAFLGYRLSRPEPMWAELLALAASAQGRVYRAEDPHGALRGLFEVRGLLAKDLAVVALREGLDLPPTDDPMLLAYLLDPSNTTPEGVARRYGGEWTEDAAKRALLAERLHENLLGRLQGEERLLWLYEEVEKPLSRVLAHMEATGVKLDVAYLENLSLEVAAHMRRLEEEVFRLAGRSFRLNSRDQLERVLFDELGLPPIGKTEKTGKRSTSAAVLEALREVHPIVDKILQYRELAKLKGTYIDRLPALVHPKTGRLHTRFNQTATATGRLSSSDPNLQNIPVRTPLGQKIRRAFVAEEGWRLVALDYRQIELRVLAHLSGDENLIRVFQEGKDIHTQTASWMFGLSAEAIDPLMRRAAKTINFGVLYGMSAFRLSQELGIPYEEAQAFIQKYFQSYPKVKAWIEKTLREGRTRGYVETLFGRRRYVPDLNARVKGKREAAERMAFNMPVQGTAADLMKLAMVRLFPQLREVGARMLLQVHDELLLEAPKERAEEVAALAKEVMEGVWPLAVPLEVEVGIGEDWLAAKG

SEQ ID NO: 5131 - DNA, 2523 bp, synthetic construct
  misc_feature 1..2523: note = Variant of DNA polymerase I from Thermus sp. strain 2.9
  source 1..2523: mol_type = other DNA
atgcaccatcatcatcatcatggcggtagcggcgtgttaccggtgttcgagcctaaaggtcgcgtgcttctggttgatggccatcatctcgcgtatcgtaacttctttgccctgaaaggattaaccaccagcctgggcgagccggtacagggtgtctacggctttgcaaagtcgctcctgaaagctctgaaagaagacggtgatgtggtgattgttgtctttgatgcgaaagcgccaagttttcgccacgaagcgtacgaagcttacaaagccgggcgtgctccaacgccggaagactttcctcgccaattggcgcttatgaaggaattagtggatttgcttggcctcgaacgcttggaagttcccggtttcgaggcagacgacgtattagcgactctcgcaaagaaagccgaacgtgagggctatgaagtccagatcttgacagcagatcgcgatcttttccagcttttatctccgcgcatctcggtgttacacccggaagggcatcgtatcaccccggaatggctctgggagaaatatggtttgcgtcccgaacaatgggtggattttcgcgccttagcaggcgatccgagcgacaatattccgggagttaaaggtatcggcgagaagacggcgctcaagctccttaaagaatgggggtcgttggagaacttgcttaagaatttagatcaggtcaaaccagagtcagtgcgtgagaagattcttgctcacctcgaagacctcaaattaagccgcgaattgtcccgtgtacgcaccgatttgccgctcgaagttgatttcggtcgccgccgcgaacctgactgggagggtcttaaagcgtttttagagcgtcttgaatttggttcgctcttgcatgaattcggccttttagaaagcccgttactggccgaagaagcaccttggccaccgcccgagggcgcgtttttaggttaccgtttgagtcgcccggaaccgatgtgggccgaattactggctcttgcagcgtctgcccagggacgtgtgtatcgcgcggaagaccctcatggtgcgctccgcggcctcttcgaagtccgtggactccttgccaaagacttagctgttgttgcattgcgcgaaggtcttgatttacctccgactgatgatccaatgcttcttgcgtacctcttggacccgtcaaacacgacgcccgaaggcgtagcccgtcgttacggcggcgagtggaccgaagatgcagcgaaacgcgcgttattggccgaacgtttgcacgaaaatttattaggacgtttgcaaggcgaggaacgtctcctctggctttacgaagaagtggagaaaccattgagtcgcgtgctcgcgcatatggaagctaccggtgtcaaattagacgtggcgtatttggagaatctcagccttgaagttgctgcccacatgcgccgcttggaggaagaagtattccgtttagcaggccgttcctttcgccttaactctcgcgatcagttagaacgtgtgttgttcgatgaacttggtctccctcctatcggcaagacagagaagaccggtaaacgtagcacttcagcggcggttttagaagctcttcgcgaagtccatcccattgtggacaagatcttgcagtaccgcgaaatggcgaaattgaaaggcacctatattgaccgtcttccggcattagtccacccgaaaacgggacgcctccatacccgcttcaaccaaacagccacggcgaccggtcgtttgtcctcctctgatccaaaccttcagaatattccagtacgtaccccattgggccagaagatccgccgtgcgtttgtagctgaggagggttggcgtttagtggccctcgattatcgtcaaattgaattacgtgtccttgcccatctttctggcgatgagaacctcatccgcgtgtttcaggaaggcaaagacattcacactcaaacggcaagctggatgtttggattatcagctgaagcgatcgatcctttgatgcgtcgtgcagcgaagaccatcaatttcggtgttctctacggtatgagtgcctttcgtttgtcgcaggaattaggcattccctatgaagaagctcaggggttcattcagaaatactttcaaagctatcccaaagttaaagcatggatcgagaagactctccgtgaaggccgcacacgtggttacgtagagaccttatttggacgtcgccgctatgttcccgatttaaacgctcgcgtgaaaggcaagcgtgaagccgccgaacgcatggcgttcaacatgcctgtacagggcacggcagctgacctcatgaaacttgcaatggtgcgcctttttccacaattgcgtgaagttggtgcccgcatgctcttgcaggtccacgatgaactcttgttagaagcgccaaaagagcgtgcggaagaggtggcagccctcgcgaaagaagttatggaaggcgtgtggcccttagcggtgcctcttgaagtcgaagttggtattggcgaggattggctggctgccaaagga

SEQ ID NO: 5132 - protein, 841 aa, synthetic construct
  REGION 1..841: note = Variant of DNA polymerase I from Thermus sp. strain 2.9
MHHHHHHGGSGVLPVFEPKGRVLLVDGHHLAYRNFFALKGLTTSLGEPVQGVYGFAKSLLKALKEDGDVVIVVFDAKAPSFRHEAYEAYKAGRAPTPEDFPRQLALMKELVDLLGLERLEVPGFEADDVLATLAKKAEREGYEVQILTADRDLFQLLSPRISVLHPEGHRITPEWLWEKYGLRPEQWVDFRALAGDPSDNIPGVKGIGEKTALKLLKEWGSLENLLKNLDQVKPESVREKILAHLEDLKLSRELSRVRTDLPLEVDFGRRREPDWEGLKAFLERLEFGSLLHEFGLLESPLLAEEAPWPPPEGAFLGYRLSRPEPMWAELLALAASAQGRVYRAEDPHGALRGLFEVRGLLAKDLAVVALREGLDLPPTDDPMLLAYLLDPSNTTPEGVARRYGGEWTEDAAKRALLAERLHENLLGRLQGEERLLWLYEEVEKPLSRVLAHMEATGVKLDVAYLENLSLEVAAHMRRLEEEVFRLAGRSFRLNSRDQLERVLFDELGLPPIGKTEKTGKRSTSAAVLEALREVHPIVDKILQYREMAKLKGTYIDRLPALVHPKTGRLHTRFNQTATATGRLSSSDPNLQNIPVRTPLGQKIRRAFVAEEGWRLVALDYRQIELRVLAHLSGDENLIRVFQEGKDIHTQTASWMFGLSAEAIDPLMRRAAKTINFGVLYGMSAFRLSQELGIPYEEAQGFIQKYFQSYPKVKAWIEKTLREGRTRGYVETLFGRRRYVPDLNARVKGKREAAERMAFNMPVQGTAADLMKLAMVRLFPQLREVGARMLLQVHDELLLEAPKERAEEVAALAKEVMEGVWPLAVPLEVEVGIGEDWLAAKG

SEQ ID NO: 5133 - DNA, 2523 bp, synthetic construct
  misc_feature 1..2523: note = Variant of DNA polymerase I from Thermus sp. strain 2.9
  source 1..2523: mol_type = other DNA
atgcaccatcatcatcatcatggcggtagcggcgtgttaccggtgttcgagcctaaaggtcgcgtgcttctggttgatggccatcatctcgcgtatcgtaacttctttgccctgaaaggattaaccaccagcctgggcgagccggtacagggtgtctacggctttgcaaagtcgctcctgaaagctctgaaagaagacggtgatgtggtgattgttgtctttgatgcgaaagcgccaagttttcgccacgaagcgtacgaagcttacaaagccgggcgtgctccaacgccggaagactttcctcgccaattggcgcttatgaaggaattagtggatttgcttggcctcgaacgcttggaagttcccggtttcgaggcagacgacgtattagcgactctcgcaaagaaagccgaacgtgagggctatgaagtccagatcttgacagcagatcgcgatcttttccagcttttatctccgcgcatctcggtgttacacccggaagggcatcgtatcaccccggaatggctctgggagaaatatggtttgcgtcccgaacaatgggtggattttcgcgccttagcaggcgatccgagcgacaatattccgggagttaaaggtatcggcgagaagacggcgctcaagctccttaaagaatgggggtcgttggagaacttgcttaagaatttagatcaggtcaaaccagagtcagtgcgtgagaagattcttgctcacctcgaagacctcaaattaagccgcgaattgtcccgtgtacgcaccgatttgccgctcgaagttgatttcggtcgccgccgcgaacctgactgggagggtcttaaagcgtttttagagcgtcttgaatttggttcgctcttgcatgaattcggccttttagaaagcccgttactggccgaagaagcaccttggccaccgcccgagggcgcgtttttaggttaccgtttgagtcgcccggaaccgatgtgggccgaattactggctcttgcagcgtctgcccagggacgtgtgtatcgcgcggaagaccctcatggtgcgctccgcggcctcttcgaagtccgtggactccttgccaaagacttagctgttgttgcattgcgcgaaggtcttgatttacctccgactgatgatccaatgcttcttgcgtacctcttggacccgtcaaacacgacgcccgaaggcgtagcccgtcgttacggcggcgagtggaccgaagatgcagcgaaacgcgcgttattggccgaacgtttgcacgaaaatttattaggacgtttgcaaggcgaggaacgtctcctctggctttacgaagaagtggagaaaccattgagtcgcgtgctcgcgcatatggaagctaccggtgtcaaattagacgtggcgtatttggagaatctcagccttgaagttgctgcccacatgcgccgcttggaggaagaagtattccgtttagcaggccgttcctttcgccttaactctcgcgatcagttagaacgtgtgttgttcgatgaacttggtctccctcctatcggcaagacagagaagaccggtaaacgtagcacttcagcggcggttttagaagctcttcgcgaagtccatcccattgtggacaagatcttgcagtaccgcgaaatggcgaaattgaaaggcacctatattgaccgtcttccggcattagtccacccgaaaacgggacgcctccatacccgcttcaaccaaacagccacggcgaccggtcgtttgtcctcctctgatccaaaccttcagaatattccagtacgtaccccattgggccagaagatccgccgtgcgtttgtagctgaggagggttggcgtttagtggccctcgattatcgtcaaattgaattacgtgtccttgcccatctttctggcgatgagaacctcatccgcgtgtttcaggaaggcaaagacattcacactcaaacggcaagctggatgtttggattatcagctgaagcgatcgatcctttgatgcgtcgtgcagcgaagaccatcaatttcggtgttctctacggtatgagtgcctttcgtttgtcgcaggaattaggcattccctatgaagaagctcaggcgttcattcagaaatactttcaaagctatcccaaagttaaagcatggatcgagaagactctccgtgaaggccgcacacgtggttacgtagagaccttatttggacgtcgccgctatgttcccgatttaaacgctcgcgtgaaaggcaagcgtgaagccgccgaacgcatggcgttcaacatgcctgtacagggcacggcagctgacctcatgaaacttgcaatggtgcgcctttttccacaattgcgtgaagttggtgcccgcatgctcttgcaggtccacgattcgctcttgttagaagcgccaaaagagcgtgcggaagaggtggcagccctcgcgaaagaagttatggaaggcgtgtggcccttagcggtgcctcttgaagtcgaagttggtattggcgaggattggctggctgccaaagga

SEQ ID NO: 5134 - protein, 841 aa, synthetic construct
  REGION 1..841: note = Variant of DNA polymerase I from Thermus sp. strain 2.9
MHHHHHHGGSGVLPVFEPKGRVLLVDGHHLAYRNFFALKGLTTSLGEPVQGVYGFAKSLLKALKEDGDVVIVVFDAKAPSFRHEAYEAYKAGRAPTPEDFPRQLALMKELVDLLGLERLEVPGFEADDVLATLAKKAEREGYEVQILTADRDLFQLLSPRISVLHPEGHRITPEWLWEKYGLRPEQWVDFRALAGDPSDNIPGVKGIGEKTALKLLKEWGSLENLLKNLDQVKPESVREKILAHLEDLKLSRELSRVRTDLPLEVDFGRRREPDWEGLKAFLERLEFGSLLHEFGLLESPLLAEEAPWPPPEGAFLGYRLSRPEPMWAELLALAASAQGRVYRAEDPHGALRGLFEVRGLLAKDLAVVALREGLDLPPTDDPMLLAYLLDPSNTTPEGVARRYGGEWTEDAAKRALLAERLHENLLGRLQGEERLLWLYEEVEKPLSRVLAHMEATGVKLDVAYLENLSLEVAAHMRRLEEEVFRLAGRSFRLNSRDQLERVLFDELGLPPIGKTEKTGKRSTSAAVLEALREVHPIVDKILQYREMAKLKGTYIDRLPALVHPKTGRLHTRFNQTATATGRLSSSDPNLQNIPVRTPLGQKIRRAFVAEEGWRLVALDYRQIELRVLAHLSGDENLIRVFQEGKDIHTQTASWMFGLSAEAIDPLMRRAAKTINFGVLYGMSAFRLSQELGIPYEEAQAFIQKYFQSYPKVKAWIEKTLREGRTRGYVETLFGRRRYVPDLNARVKGKREAAERMAFNMPVQGTAADLMKLAMVRLFPQLREVGARMLLQVHDSLLLEAPKERAEEVAALAKEVMEGVWPLAVPLEVEVGIGEDWLAAKG

SEQ ID NO: 5135 - DNA, 2523 bp, synthetic construct
  misc_feature 1..2523: note = Variant of DNA polymerase I from Thermus sp. strain 2.9
  source 1..2523: mol_type = other DNA
atgcaccatcatcatcatcatggcggtagcggcgtgttaccggtgttcgagcctaaaggtcgcgtgcttctggttgatggccatcatctcgcgtatcgtaacttctttgccctgaaaggattaaccaccagcctgggcgagccggtacagggtgtctacggctttgcaaagtcgctcctgaaagctctgaaagaagacggtgatgtggtgattgttgtctttgatgcgaaagcgccaagttttcgccacgaagcgtacgaagcttacaaagccgggcgtgctccaacgccggaagactttcctcgccaattggcgcttatgaaggaattagtggatttgcttggcctcgaacgcttggaagttcccggtttcgaggcagacgacgtattagcgactctcgcaaagaaagccgaacgtgagggctatgaagtccagatcttgacagcagatcgcgatcttttccagcttttatctccgcgcatctcggtgttacacccggaagggcatcgtatcaccccggaatggctctgggagaaatatggtttgcgtcccgaacaatgggtggattttcgcgccttagcaggcgatccgagcgacaatattccgggagttaaaggtatcggcgagaagacggcgctcaagctccttaaagaatgggggtcgttggagaacttgcttaagaatttagatcaggtcaaaccagagtcagtgcgtgagaagattcttgctcacctcgaagacctcaaattaagccgcgaattgtcccgtgtacgcaccgatttgccgctcgaagttgatttcggtcgccgccgcgaacctgactgggagggtcttaaagcgtttttagagcgtcttgaatttggttcgctcttgcatgaattcggccttttagaaagcccgttactggccgaagaagcaccttggccaccgcccgagggcgcgtttttaggttaccgtttgagtcgcccggaaccgatgtgggccgaattactggctcttgcagcgtctgcccagggacgtgtgtatcgcgcggaagaccctcatggtgcgctccgcggcctcttcgaagtccgtggactccttgccaaagacttagctgttgttgcattgcgcgaaggtcttgatttacctccgactgatgatccaatgcttcttgcgtacctcttggacccgtcaaacacgacgcccgaaggcgtagcccgtcgttacggcggcgagtggaccgaagatgcagcgaaacgcgcgttattggccgaacgtttgcacgaaaatttattaggacgtttgcaaggcgaggaacgtctcctctggctttacgaagaagtggagaaaccattgagtcgcgtgctcgcgcatatggaagctaccggtgtcaaattagacgtggcgtatttggagaatctcagccttgaagttgctgcccacatgcgccgcttggaggaagaagtattccgtttagcaggccgttcctttcgccttaactctcgcgatcagttagaacgtgtgttgttcgatgaacttggtctccctcctatcggcaagacagagaagaccggtaaacgtagcacttcagcggcggttttagaagctcttcgcgaagtccatcccattgtggacaagatcttgcagtaccgcgaaatggcgaaattgaaaggcacctatattgaccgtcttccggcattagtccacccgaaaacgggacgcctccatacccgcttcaaccaaacagccacggcgaccggtcgtttgtcctcctctgatccaaaccttcagaatattccagtacgtaccccattgggccagaagatccgccgtgcgtttgtagctgaggagggttgggcgttagtggccctcgattatcgtcaaattgaattacgtgtccttgcccatctttctggcgatgagaacctcatccgcgtgtttcaggaaggcaaagacattcacactcaaacggcaagctggatgtttggattatcagctgaagcgatcgatcctttgatgcgtcgtgcagcgaagaccatcaatttcggtgttctctacggtatgagtgcctttcgtttgtcgcaggaattaggcattccctatgaagaagctcaggcgttcattcagaaatactttcaaagctatcccaaagttaaagcatggatcgagaagactctccgtgaaggccgcacacgtggttacgtagagaccttatttggacgtcgccgctatgttcccgatttaaacgctcgcgtgaaaggcaagcgtgaagccgccgaacgcatggcgttcaacatgcctgtacagggcacggcagctgacctcatgaaacttgcaatggtgcgcctttttccacaattgcgtgaagttggtgcccgcatgctcttgcaggtccacgatgaactcttgttagaagcgccaaaagagcgtgcggaagaggtggcagccctcgcgaaagaagttatggaaggcgtgtggcccttagcggtgcctcttgaagtcgaagttggtattggcgaggattggctggctgccaaagga

SEQ ID NO: 5136 - protein, 841 aa, synthetic construct
  REGION 1..841: note = Variant of DNA polymerase I from Thermus sp. strain 2.9
MHHHHHHGGSGVLPVFEPKGRVLLVDGHHLAYRNFFALKGLTTSLGEPVQGVYGFAKSLLKALKEDGDVVIVVFDAKAPSFRHEAYEAYKAGRAPTPEDFPRQLALMKELVDLLGLERLEVPGFEADDVLATLAKKAEREGYEVQILTADRDLFQLLSPRISVLHPEGHRITPEWLWEKYGLRPEQWVDFRALAGDPSDNIPGVKGIGEKTALKLLKEWGSLENLLKNLDQVKPESVREKILAHLEDLKLSRELSRVRTDLPLEVDFGRRREPDWEGLKAFLERLEFGSLLHEFGLLESPLLAEEAPWPPPEGAFLGYRLSRPEPMWAELLALAASAQGRVYRAEDPHGALRGLFEVRGLLAKDLAVVALREGLDLPPTDDPMLLAYLLDPSNTTPEGVARRYGGEWTEDAAKRALLAERLHENLLGRLQGEERLLWLYEEVEKPLSRVLAHMEATGVKLDVAYLENLSLEVAAHMRRLEEEVFRLAGRSFRLNSRDQLERVLFDELGLPPIGKTEKTGKRSTSAAVLEALREVHPIVDKILQYREMAKLKGTYIDRLPALVHPKTGRLHTRFNQTATATGRLSSSDPNLQNIPVRTPLGQKIRRAFVAEEGWALVALDYRQIELRVLAHLSGDENLIRVFQEGKDIHTQTASWMFGLSAEAIDPLMRRAAKTINFGVLYGMSAFRLSQELGIPYEEAQAFIQKYFQSYPKVKAWIEKTLREGRTRGYVETLFGRRRYVPDLNARVKGKREAAERMAFNMPVQGTAADLMKLAMVRLFPQLREVGARMLLQVHDELLLEAPKERAEEVAALAKEVMEGVWPLAVPLEVEVGIGEDWLAAKG

SEQ ID NO: 5137 - DNA, 2523 bp, synthetic construct
  misc_feature 1..2523: note = Variant of DNA polymerase I from Thermus sp. strain 2.9
  source 1..2523: mol_type = other DNA
atgcaccatcatcatcatcatggcggtagcggcgtgttaccggtgttcgagcctaaaggtcgcgtgcttctggttgatggccatcatctcgcgtatcgtaacttctttgccctgaaaggattaaccaccagcctgggcgagccggtacagggtgtctacggctttgcaaagtcgctcctgaaagctctgaaagaagacggtgatgtggtgattgttgtctttgatgcgaaagcgccaagttttcgccacgaagcgtacgaagcttacaaagccgggcgtgctccaacgccggaagactttcctcgccaattggcgcttatgaaggaattagtggatttgcttggcctcgaacgcttggaagttcccggtttcgaggcagacgacgtattagcgactctcgcaaagaaagccgaacgtgagggctatgaagtccagatcttgacagcagatcgcgatcttttccagcttttatctccgcgcatctcggtgttacacccggaagggcatcgtatcaccccggaatggctctgggagaaatatggtttgcgtcccgaacaatgggtggattttcgcgccttagcaggcgatccgagcgacaatattccgggagttaaaggtatcggcgagaagacggcgctcaagctccttaaagaatgggggtcgttggagaacttgcttaagaatttagatcaggtcaaaccagagtcagtgcgtgagaagattcttgctcacctcgaagacctcaaattaagccgcgaattgtcccgtgtacgcaccgatttgccgctcgaagttgatttcggtcgccgccgcgaacctgactgggagggtcttaaagcgtttttagagcgtcttgaatttggttcgctcttgcatgaattcggccttttagaaagcccgttactggccgaagaagcaccttggccaccgcccgagggcgcgtttttaggttaccgtttgagtcgcccggaaccgatgtgggccgaattactggctcttgcagcgtctgcccagggacgtgtgtatcgcgcggaagaccctcatggtgcgctccgcggcctcttcgaagtccgtggactccttgccaaagacttagctgttgttgcattgcgcgaaggtcttgatttacctccgactgatgatccaatgcttcttgcgtacctcttggacccgtcaaacacgacgcccgaaggcgtagcccgtcgttacggcggcgagtggaccgaagatgcagcgaaacgcgcgttattggccgaacgtttgcacgaaaatttattaggacgtttgcaaggcgaggcgcgtctcctctggctttacgaagaagtggagaaaccattgagtcgcgtgctcgcgcatatggaagctaccggtgtcaaattagacgtggcgtatttggagaatctcagccttgaagttgctgcccacatgcgccgcttggaggaagaagtattccgtttagcaggccgttcctttcgccttaactctcgcgatcagttagaacgtgtgttgttcgatgaacttggtctccctcctatcggcaagacagagaagaccggtaaacgtagcacttcagcggcggttttagaagctcttcgcgaagtccatcccattgtggacaagatcttgcagtaccgcgaaatggcgaaattgaaaggcacctatattgaccgtcttccggcattagtccacccgaaaacgggacgcctccatacccgcttcaaccaaacagccacggcgaccggtcgtttgtcctcctctgatccaaaccttcagaatattccagtacgtaccccattgggccagaagatccgccgtgcgtttgtagctgaggagggttggcgtttagtggccctcgattatcgtcaaattgaattacgtgtccttgcccatctttctggcgatgagaacctcatccgcgtgtttcaggaaggcaaagacattcacactcaaacggcaagctggatgtttggattatcagctgaagcgatcgatcctttgatgcgtcgtgcagcgaagaccatcaatttcggtgttctctacggtatgagtgcctttcgtttgtcgcaggaattaggcattccctatgaagaagctcaggcgttcattcagaaatactttcaaagctatcccaaagttaaagcatggatcgagaagactctccgtgaaggccgcacacgtggttacgtagagaccttatttggacgtcgccgctatgttcccgatttaaacgctcgcgtgaaaggcaagcgtgaagccgccgaacgcatggcgttcaacatgcctgtacagggcacggcagctgacctcatgaaacttgcaatggtgcgcctttttccacaattgcgtgaagttggtgcccgcatgctcttgcaggtccacgatgaactcttgttagaagcgccaaaagagcgtgcggaagaggtggcagccctcgcgaaagaagttatggaaggcgtgtggcccttagcggtgcctcttgaagtcgaagttggtattggcgaggattggctggctgccaaagga

SEQ ID NO: 5138 - protein, 841 aa, synthetic construct
  REGION 1..841: note = Variant of DNA polymerase I from Thermus sp. strain 2.9
MHHHHHHGGSGVLPVFEPKGRVLLVDGHHLAYRNFFALKGLTTSLGEPVQGVYGFAKSLLKALKEDGDVVIVVFDAKAPSFRHEAYEAYKAGRAPTPEDFPRQLALMKELVDLLGLERLEVPGFEADDVLATLAKKAEREGYEVQILTADRDLFQLLSPRISVLHPEGHRITPEWLWEKYGLRPEQWVDFRALAGDPSDNIPGVKGIGEKTALKLLKEWGSLENLLKNLDQVKPESVREKILAHLEDLKLSRELSRVRTDLPLEVDFGRRREPDWEGLKAFLERLEFGSLLHEFGLLESPLLAEEAPWPPPEGAFLGYRLSRPEPMWAELLALAASAQGRVYRAEDPHGALRGLFEVRGLLAKDLAVVALREGLDLPPTDDPMLLAYLLDPSNTTPEGVARRYGGEWTEDAAKRALLAERLHENLLGRLQGEARLLWLYEEVEKPLSRVLAHMEATGVKLDVAYLENLSLEVAAHMRRLEEEVFRLAGRSFRLNSRDQLERVLFDELGLPPIGKTEKTGKRSTSAAVLEALREVHPIVDKILQYREMAKLKGTYIDRLPALVHPKTGRLHTRFNQTATATGRLSSSDPNLQNIPVRTPLGQKIRRAFVAEEGWRLVALDYRQIELRVLAHLSGDENLIRVFQEGKDIHTQTASWMFGLSAEAIDPLMRRAAKTINFGVLYGMSAFRLSQELGIPYEEAQAFIQKYFQSYPKVKAWIEKTLREGRTRGYVETLFGRRRYVPDLNARVKGKREAAERMAFNMPVQGTAADLMKLAMVRLFPQLREVGARMLLQVHDELLLEAPKERAEEVAALAKEVMEGVWPLAVPLEVEVGIGEDWLAAKG

SEQ ID NO: 5139 - DNA, 2523 bp, synthetic construct
  misc_feature 1..2523: note = Variant of DNA polymerase I from Thermus sp. strain 2.9
  source 1..2523: mol_type = other DNA
atgcaccatcatcatcatcatggcggtagcggcgtgttaccggtgttcgagcctaaaggtcgcgtgcttctggttgatggccatcatctcgcgtatcgtaacttctttgccctgaaaggattaaccaccagcctgggcgagccggtacagggtgtctacggctttgcaaagtcgctcctgaaagctctgaaagaagacggtgatgtggtgattgttgtctttgatgcgaaagcgccaagttttcgccacgaagcgtacgaagcttacaaagccgggcgtgctccaacgccggaagactttcctcgccaattggcgcttatgaaggaattagtggatttgcttggcctcgaacgcttggaagttcccggtttcgaggcagacgacgtattagcgactctcgcaaagaaagccgaacgtgagggctatgaagtccagatcttgacagcagatcgcgatcttttccagcttttatctccgcgcatctcggtgttacacccggaagggcatcgtatcaccccggaatggctctgggagaaatatggtttgcgtcccgaacaatgggtggattttcgcgccttagcaggcgatccgagcgacaatattccgggagttaaaggtatcggcgagaagacggcgctcaagctccttaaagaatgggggtcgttggagaacttgcttaagaatttagatcaggtcaaaccagagtcagtgcgtgagaagattcttgctcacctcgaagacctcaaattaagccgcgaattgtcccgtgtacgcaccgatttgccgctcgaagttgatttcggccgccgccgcgaacctgactgggagggtcttaaagcgtttttagagcgtcttgaatttggttcgctcttgcatgaattcggccttttagaaagcccgttactggccgaagaagcaccttggccaccgcccgagggcgcgtttttaggttaccgtttgagtcgcccggaaccgatgtgggccgaattactggctcttgcagcgtctgcccagggacgtgtgtatcgcgcggaagaccctcatggtgcgctccgcggcctcttcgaagtccgtggactccttgccaaagacttagctgttgttgcattgcgcgaaggtcttgatttacctccgactgatgatccaatgcttcttgcgtacctcttggacccgtcaaacacgacgcccgaaggcgtagcccgtcgttacggcggcgagtggaccgaagatgcagcgaaacgcgcgttattggccgaacgtttgcacgaaaatttattaggacgtttgcaaggcgaggaacgtctcctctggctttacgaagaagtggagaaaccattgagtcgcgtgctcgcgcatatggaagctaccggtgtcaaattagacgtggcgtatttggagaatcttcaccttgaagttgctgccgaaatgcgccgcttggaggaagaagtattccgtttagcaggccgttcctttcgccttaactctcgcgatcagttagaacgtgtgttgttcgatgaacttggtctccctcctatcggcaagacagagaagaccggtaaacgtagcacttcagcggcggttttagaagctcttcgcgaagtccatcccattgtggacaagatcttgcagtaccgcgaaatggcgaaattgaaaggcacctatattgaccgtcttccggcattagtccacccgaaaacgggacgcctccatacccgcttcaaccaaacagccacggcgaccggtcgtttgtccagttctgatccaaaccttcagaatattccagtacgtaccccattgggccagaagatccgccgtgcgtttgtagctgaggagggttggcgtttagtggccctcgattatagtcaaattgaattacgtgtccttgcccatctttctggcgatgagaacctcatccgcgtgtttcaggaaggcaaagacattcacactcaaacggcaagctggatgtttggattatcagctgaagcgatcgatcctttgatgcgtcgtgcagcgaagaccatcaatttcggtgttctctacggtatgagtgcctttcgtttgtcgcaggaattaggcattccctatgaagaagctcaggcgttcattcagaaatactttcaaagctatcccaaagttaaagcatggatcgagaagactctcgaggaaggccgcacacgtggttacgtagagaccttatttggacgtcgccgctatgttcccgatttaaacgctcgcgtgaaaagcaaacgtgaagccgccgaacgcatggcgttcaacatgcctgtacagggcacggcagctgacctcatgaaacttgcaatggtgcgcctttttccacaattgcgtgaagttggtgcccgcatgctcttgcaggtccacgatgaactcttgttagaagcgccaaaagagcgtgcggaagaggtggcagccctcgcgaaagaagttatggaaggcgtgtggcccttagcggtgcctcttgaagtcgaagttggtattggcgaggattggctggctgccaaagga

SEQ ID NO: 5140 - protein, 841 aa, synthetic construct
  REGION 1..841: note = Variant of DNA polymerase I from Thermus sp. strain 2.9
MHHHHHHGGSGVLPVFEPKGRVLLVDGHHLAYRNFFALKGLTTSLGEPVQGVYGFAKSLLKALKEDGDVVIVVFDAKAPSFRHEAYEAYKAGRAPTPEDFPRQLALMKELVDLLGLERLEVPGFEADDVLATLAKKAEREGYEVQILTADRDLFQLLSPRISVLHPEGHRITPEWLWEKYGLRPEQWVDFRALAGDPSDNIPGVKGIGEKTALKLLKEWGSLENLLKNLDQVKPESVREKILAHLEDLKLSRELSRVRTDLPLEVDFGRRREPDWEGLKAFLERLEFGSLLHEFGLLESPLLAEEAPWPPPEGAFLGYRLSRPEPMWAELLALAASAQGRVYRAEDPHGALRGLFEVRGLLAKDLAVVALREGLDLPPTDDPMLLAYLLDPSNTTPEGVARRYGGEWTEDAAKRALLAERLHENLLGRLQGEERLLWLYEEVEKPLSRVLAHMEATGVKLDVAYLENLHLEVAAEMRRLEEEVFRLAGRSFRLNSRDQLERVLFDELGLPPIGKTEKTGKRSTSAAVLEALREVHPIVDKILQYREMAKLKGTYIDRLPALVHPKTGRLHTRFNQTATATGRLSSSDPNLQNIPVRTPLGQKIRRAFVAEEGWRLVALDYSQIELRVLAHLSGDENLIRVFQEGKDIHTQTASWMFGLSAEAIDPLMRRAAKTINFGVLYGMSAFRLSQELGIPYEEAQAFIQKYFQSYPKVKAWIEKTLEEGRTRGYVETLFGRRRYVPDLNARVKSKREAAERMAFNMPVQGTAADLMKLAMVRLFPQLREVGARMLLQVHDELLLEAPKERAEEVAALAKEVMEGVWPLAVPLEVEVGIGEDWLAAKG

SEQ ID NO: 5141 - DNA, 2523 bp, synthetic construct
  misc_feature 1..2523: note = Variant of DNA polymerase I from Thermus sp. strain 2.9
  source 1..2523: mol_type = other DNA
atgcaccatcatcatcatcatggcggtagcggcgtgttaccggtgttcgagcctaaaggtcgcgtgcttctggttgatggccatcatctcgcgtatcgtaacttctttgccctgaaaggattaaccaccagcctgggcgagccggtacagggtgtctacggctttgcaaagtcgctcctgaaagctctgaaagaagacggtgatgtggtgattgttgtctttgatgcgaaagcgccaagttttcgccacgaagcgtacgaagcttacaaagccgggcgtgctccaacgccggaagactttcctcgccaattggcgcttatgaaggaattagtggatttgcttggcctcgaacgcttggaagttcccggtttcgaggcagacgacgtattagcgactctcgcaaagaaagccgaacgtgagggctatgaagtccagatcttgacagcagatcgcgatcttttccagcttttatctccgcgcatctcggtgttacacccggaagggcatcgtatcaccccggaatggctctgggagaaatatggtttgcgtcccgaacaatgggtggattttcgcgccttagcaggcgatccgagcgacaatattccgggagttaaaggtatcggcgagaagacggcgctcaagctccttaaagaatgggggtcgttggagaacttgcttaagaatttagatcaggtcaaaccagagtcagtgcgtgagaagattcttgctcacctcgaagacctcaaattaagccgcgaattgtcccgtgtacgcaccgatttgccgctcgaagttgatttcggtcgccgccgcgaacctgactgggagggtcttaaagcgtttttagagcgtcttgaatttggttcgctcttgcatgaattcggccttttagaaagcccgttactggccgaagaagcaccttggccaccgcccgagggcgcgtttttaggttaccgtttgagtcgcccggaaccgatgtgggccgaattactggctcttgcagcgtctgcccagggacgtgtgtatcgcgcggaagaccctcatggtgcgctccgcggcctcttcgaagtccgtggactccttgccaaagacttagctgttgttgcattgcgcgaaggtcttgatttacctccgactgatgatccaatgcttcttgcgtacctcttggacccgtcaaacacgacgcccgaaggcgtagcccgtcgttacggcggcgagtggaccgaagatgcagcgaaacgcgcgttattggccgaacgtttgcacgaaaatttattaggacgtttgcaaggcgaggaacgtctcctctggctttacgaagaagtggagaaaccattgagtcgcgtgctcgcgcatatggaagctaccggtgtcaaattagacgtggcgtatttggagaatcttctgcttgaagttgctgcccacatgcgccgcttggaggaagaagtattccgtttagcaggccgttcctttcgccttaactctcgcgatcagttagaacgtgtgttgttcgatgaacttggtctccctcctatcggcaagacagagaagaccggtaaacgtagcacttcagcggcggttttagaagctcttcgcgaagtccatcccattgtggacaagatcttgcagtaccgcgaaatggcgaaattgaaaggcacctatattgaccgtcttccggcattagtccacccgaaaacgggacgcctccatacccgcttcaaccaaacagccacggcgaccggtcgtttgtcctcctctgatccaaaccttcagaatattccagtacgtaccccattgggccagaagatccgccgtgcgtttgtagctgaggagggttggcgtttagtggccctcgattatcgtcaaattgaattacgtgtccttgcccatctttctggcgatgagaacctcatccgcgtgtttcaggaaggcaaagacattcacactcaaacggcaagctggatgtttggattatcagctgaagcgatcgatcctttgatgcgtcgtgcagcgaagaccatcaatttcggtgttctctacggtatgagtgcctttcgtttgtcgcaggaattaggcattccctatgaagaagctcaggcgttcattcagaaatactttcaaagctatcccaaagttaaagcatggatcgagaagactctccgtgaaggccgcacacgtggttacgtagagaccttatttggacgtcgccgctatgttcccgatttaaacgctcgcgtgaaaggcaagcgtgaagccgccgaacgcatggcgttcaacatgcctgtacagggcacggcagctgacctcatgaaacttgcaatggtgcgcctttttccacaattgcgtgaagttggtgcccgcatgctcttgcaggtccacgatgaactcttgttagaagcgccaaaagagcgtgcggaagaggtggcagccctcgcgaaagaagttatggaaggcgtgtggcccttagcggtgcctcttgaagtcgaagttggtattggcgaggattggctggctgccaaagga

SEQ ID NO: 5142 - protein, 841 aa, synthetic construct
  REGION 1..841: note = Variant of DNA polymerase I from Thermus sp. strain 2.9
MHHHHHHGGSGVLPVFEPKGRVLLVDGHHLAYRNFFALKGLTTSLGEPVQGVYGFAKSLLKALKEDGDVVIVVFDAKAPSFRHEAYEAYKAGRAPTPEDFPRQLALMKELVDLLGLERLEVPGFEADDVLATLAKKAEREGYEVQILTADRDLFQLLSPRISVLHPEGHRITPEWLWEKYGLRPEQWVDFRALAGDPSDNIPGVKGIGEKTALKLLKEWGSLENLLKNLDQVKPESVREKILAHLEDLKLSRELSRVRTDLPLEVDFGRRREPDWEGLKAFLERLEFGSLLHEFGLLESPLLAEEAPWPPPEGAFLGYRLSRPEPMWAELLALAASAQGRVYRAEDPHGALRGLFEVRGLLAKDLAVVALREGLDLPPTDDPMLLAYLLDPSNTTPEGVARRYGGEWTEDAAKRALLAERLHENLLGRLQGEERLLWLYEEVEKPLSRVLAHMEATGVKLDVAYLENLLLEVAAHMRRLEEEVFRLAGRSFRLNSRDQLERVLFDELGLPPIGKTEKTGKRSTSAAVLEALREVHPIVDKILQYREMAKLKGTYIDRLPALVHPKTGRLHTRFNQTATATGRLSSSDPNLQNIPVRTPLGQKIRRAFVAEEGWRLVALDYRQIELRVLAHLSGDENLIRVFQEGKDIHTQTASWMFGLSAEAIDPLMRRAAKTINFGVLYGMSAFRLSQELGIPYEEAQAFIQKYFQSYPKVKAWIEKTLREGRTRGYVETLFGRRRYVPDLNARVKGKREAAERMAFNMPVQGTAADLMKLAMVRLFPQLREVGARMLLQVHDELLLEAPKERAEEVAALAKEVMEGVWPLAVPLEVEVGIGEDWLAAKG

SEQ ID NO: 5143 - DNA, 2523 bp, synthetic construct
  misc_feature 1..2523: note = Variant of DNA polymerase I from Thermus sp. strain 2.9
  source 1..2523: mol_type = other DNA
atgcaccatcatcatcatcatggcggtagcggcgtgttaccggtgttcgagcctaaaggtcgcgtgcttctggttgatggccatcatctcgcgtatcgtaacttctttgccctgaaaggattaaccaccagcctgggcgagccggtacagggtgtctacggctttgcaaagtcgctcctgaaagctctgaaagaagacggtgatgtggtgattgttgtctttgatgcgaaagcgccaagttttcgccacgaagcgtacgaagcttacaaagccgggcgtgctccaacgccggaagactttcctcgccaattggcgcttatgaaggaattagtggatttgcttggcctcgaacgcttggaagttcccggtttcgaggcagacgacgtattagcgactctcgcaaagaaagccgaacgtgagggctatgaagtccagatcttgacagcagatcgcgatcttttccagcttttatctccgcgcatctcggtgttacacccggaagggcatcgtatcaccccggaatggctctgggagaaatatggtttgcgtcccgaacaatgggtggattttcgcgccttagcaggcgatccgagcgacaatattccgggagttaaaggtatcggcgagaagacggcgctcaagctccttaaagaatgggggtcgttggagaacttgcttaagaatttagatcaggtcaaaccagagtcagtgcgtgagaagattcttgctcacctcgaagacctcaaattaagccgcgaattgtcccgtgtacgcaccgatttgccgctcgaagttgatttcggtcgccgccgcgaacctgactgggagggtcttaaagcgtttttagagcgtcttgaatttggttcgctcttgcatgaattcggccttttagaaagcccgttactggccgaagaagcaccttggccaccgcccgagggcgcgtttttaggttaccgtttgagtcgcccggaaccgatgtgggccgaattactggctcttgcagcgtctgcccagggacgtgtgtatcgcgcggaagaccctcatggtgcgctccgcggcctcttcgaagtccgtggactccttgccaaagacttagctgttgttgcattgcgcgaaggtcttgatttacctccgactgatgatccaatgcttcttgcgtacctcttggacccgtcaaacacgacgcccgaaggcgtagcccgtcgttacggcggcgagtggaccgaagatgcagcgaaacgcgcgttattggccgaacgtttgcacgaaaatttattaggacgtttgcaaggcgaggaacgtctcctctggctttacgaagaagtggagaaaccattgagtcgcgtgctcgcgcatatggaagctaccggtgtcaaattagacgtggcgtatttggagaatctcagccttgaagttgctgcccacatgcgccgcttggaggaagaagtattccgtttagcaggccgttcctttcgccttaactctcgcgatcagttagaacgtgtgttgttcgatgaacttggtctccctcctatcggcaagacagagaagaccggtaaacgtagcacttcagcggcggttttagaagctcttcgcgaagtccatcccattgtggacaagatcttgcagtaccgcgaaatggcgaaattgaaaggcacctatattgaccgtcttccggcattagtccacccgaaaacgggacgcctccatacccgcttcaaccaaacagccacggcgaccggtcgtttgtcctcctctgatccaaaccttcagaatattccagtacgtaccccattgggccagaagatccgccgtgcgtttgtagctgaggagggttggcgtttagtggccctcgattatcgtcaaattgaattacgtgtccttgcccatctttctggcgatgagaacctcatccgcgtgtttcaggaaggcaaagacattcacactcaaacggcaagctggatgtttggattatcagctgaagcgatcgatcctttgatgcgtcgtgcagcgaagaccatcaatttcggtgttctctacggtatgagtgcctttcgtttgtcgcaggaattaggcattccctatgaagaagctcaggcgttcattcagaaatactttcaaagctatcccaaagttaaagcatggatcgagaagactctccgtgaaggccgcacacgtggttacgtagagaccttatttggacgtcgccgctatgttccccatttaaacgctcgcgtgaaaggcaagcgtgaagccgccgaacgcatggcgttcaacatgcctgtacagggcacggcagctgacctcatgaaacttgcaatggtgcgcctttttccacaattgcgtgaagttggtgcccgcatgctcttgcaggtccacgatgaactcttgttagaagcgccaaaagagcgtgcggaagaggtggcagccctcgcgaaagaagttatggaaggcgtgtggcccttagcggtgcctcttgaagtcgaagttggtattggcgaggattggctggctgccaaagga

SEQ ID NO: 5144 - protein, 841 aa, synthetic construct
  REGION 1..841: note = Variant of DNA polymerase I from Thermus sp. strain 2.9
MHHHHHHGGSGVLPVFEPKGRVLLVDGHHLAYRNFFALKGLTTSLGEPVQGVYGFAKSLLKALKEDGDVVIVVFDAKAPSFRHEAYEAYKAGRAPTPEDFPRQLALMKELVDLLGLERLEVPGFEADDVLATLAKKAEREGYEVQILTADRDLFQLLSPRISVLHPEGHRITPEWLWEKYGLRPEQWVDFRALAGDPSDNIPGVKGIGEKTALKLLKEWGSLENLLKNLDQVKPESVREKILAHLEDLKLSRELSRVRTDLPLEVDFGRRREPDWEGLKAFLERLEFGSLLHEFGLLESPLLAEEAPWPPPEGAFLGYRLSRPEPMWAELLALAASAQGRVYRAEDPHGALRGLFEVRGLLAKDLAVVALREGLDLPPTDDPMLLAYLLDPSNTTPEGVARRYGGEWTEDAAKRALLAERLHENLLGRLQGEERLLWLYEEVEKPLSRVLAHMEATGVKLDVAYLENLSLEVAAHMRRLEEEVFRLAGRSFRLNSRDQLERVLFDELGLPPIGKTEKTGKRSTSAAVLEALREVHPIVDKILQYREMAKLKGTYIDRLPALVHPKTGRLHTRFNQTATATGRLSSSDPNLQNIPVRTPLGQKIRRAFVAEEGWRLVALDYRQIELRVLAHLSGDENLIRVFQEGKDIHTQTASWMFGLSAEAIDPLMRRAAKTINFGVLYGMSAFRLSQELGIPYEEAQAFIQKYFQSYPKVKAWIEKTLREGRTRGYVETLFGRRRYVPHLNARVKGKREAAERMAFNMPVQGTAADLMKLAMVRLFPQLREVGARMLLQVHDELLLEAPKERAEEVAALAKEVMEGVWPLAVPLEVEVGIGEDWLAAKG

SEQ ID NO: 5145 - DNA, 2523 bp, synthetic construct
  misc_feature 1..2523: note = Variant of DNA polymerase I from Thermus sp. strain 2.9
  source 1..2523: mol_type = other DNA
atgcaccatcatcatcatcatggcggtagcggcgtgttaccggtgttcgagcctaaaggtcgcgtgcttctggttgatggccatcatctcgcgtatcgtaacttctttgccctgaaaggattaaccaccagcctgggcgagccggtacagggtgtctacggctttgcaaagtcgctcctgaaagctctgaaagaagacggtgatgtggtgattgttgtctttgatgcgaaagcgccaagttttcgccacgaagcgtacgaagcttacaaagccgggcgtgctccaacgccggaagactttcctcgccaattggcgcttatgaaggaattagtggatttgcttggcctcgaacgcttggaagttcccggtttcgaggcagacgacgtattagcgactctcgcaaagaaagccgaacgtgagggctatgaagtccagatcttgacagcagatcgcgatcttttccagcttttatctccgcgcatctcggtgttacacccggaagggcatcgtatcaccccggaatggctctgggagaaatatggtttgcgtcccgaacaatgggtggattttcgcgccttagcaggcgatccgagcgacaatattccgggagttaaaggtatcggcgagaagacggcgctcaagctccttaaagaatgggggtcgttggagaacttgcttaagaatttagatcaggtcaaaccagagtcagtgcgtgagaagattcttgctcacctcgaagacctcaaattaagccgcgaattgtcccgtgtacgcaccgatttgccgctcgaagttgatttcggtcgccgccgcgaacctgactgggagggtcttaaagcgtttttagagcgtcttgaatttggttcgctcttgcatgaattcggccttttagaaagcccgttactggccgaagaagcaccttggccaccgcccgagggcgcgtttttaggttaccgtttgagtcgcccggaaccgatgtgggccgaattactggctcttgcagcgtctgcccagggacgtgtgtatcgcgcggaagaccctcatggtgcgctccgcggcctcttcgaagtccgtggactccttgccaaagacttagctgttgttgcattgcgcgaaggtcttgatttacctccgactgatgatccaatgcttcttgcgtacctcttggacccgtcaaacacgacgcccgaaggcgtagcccgtcgttacggcggcgagtggaccgaagatgcagcgaaacgcgcgttattggccgaacgtttgcacgaaaatttattaggacgtttgcaaggcgaggaacgtctcctctggctttacgaagaagtggagaaaccattgagtcgcgtgctcgcgcatatggaagctaccggtgtcaaattagacgtggcgtatttggagaatctcagccttgaagttgctgcccacatgcgccgcttggaggaagaagtattccgtttagcaggccgttcctttcgccttaactctcgcgatcagttagaacgtgtgttgttcgatgaacttggtctccctcctatcggcaagacagagaagaccggtaaacgtagcacttcagcggcggttttagaagctcttcgcgaagtccatcccattgtggacaagatcttgcagtaccgcgaaatggcgaaattgaaaggcacctatattgaccgtcttccggcattagtccacccgaaaacgggacgcctccatacccgcttcaaccaaacagccacggcgaccggtcgtttgtcctcctctgatccaaaccttcagaatattccagtacgtaccccattgggccagaagatccgccgtgcgtttgtagctgaggagggttggcgtttagtggccctcgattatcgtcaaattgaattacgtgtccttgcccatctttctggcgatgagaacctcatccgcgtgtttcaggaaggcaaagacattcacactcaaacggcaagctggatgtttggattatcagctgaagcgatcgatcctttgatgcgtcgtgcagcgaagaccatcaatttcggtgttctctacggtatgagtgcctttcgtttgtcgcaggaattaggcattccctatgaagaagctcaggcgttcattcagaaatactttcaaagctatcccaaagttaaagcatggatcgagaagactctccgtgaaggccgcccgcgtggttacgtagagaccttatttggacgtcgccgctatgttcccgatttaaacgctcgcgtgaaaggcaagcgtgaagccgccgaacgcatggcgttcaacatgcctgtacagggcacggcagctgacctcatgaaacttgcaatggtgcgcctttttccacaattgcgtgaagttggtgcccgcatgctcttgcaggtccacgatgaactcttgttagaagcgccaaaagagcgtgcggaagaggtggcagccctcgcgaaagaagttatggaaggcgtgtggcccttagcggtgcctcttgaagtcgaagttggtattggcgaggattggctggctgccaaagga

SEQ ID NO: 5146 - protein, 841 aa, synthetic construct
  REGION 1..841: note = Variant of DNA polymerase I from Thermus sp. strain 2.9
MHHHHHHGGSGVLPVFEPKGRVLLVDGHHLAYRNFFALKGLTTSLGEPVQGVYGFAKSLLKALKEDGDVVIVVFDAKAPSFRHEAYEAYKAGRAPTPEDFPRQLALMKELVDLLGLERLEVPGFEADDVLATLAKKAEREGYEVQILTADRDLFQLLSPRISVLHPEGHRITPEWLWEKYGLRPEQWVDFRALAGDPSDNIPGVKGIGEKTALKLLKEWGSLENLLKNLDQVKPESVREKILAHLEDLKLSRELSRVRTDLPLEVDFGRRREPDWEGLKAFLERLEFGSLLHEFGLLESPLLAEEAPWPPPEGAFLGYRLSRPEPMWAELLALAASAQGRVYRAEDPHGALRGLFEVRGLLAKDLAVVALREGLDLPPTDDPMLLAYLLDPSNTTPEGVARRYGGEWTEDAAKRALLAERLHENLLGRLQGEERLLWLYEEVEKPLSRVLAHMEATGVKLDVAYLENLSLEVAAHMRRLEEEVFRLAGRSFRLNSRDQLERVLFDELGLPPIGKTEKTGKRSTSAAVLEALREVHPIVDKILQYREMAKLKGTYIDRLPALVHPKTGRLHTRFNQTATATGRLSSSDPNLQNIPVRTPLGQKIRRAFVAEEGWRLVALDYRQIELRVLAHLSGDENLIRVFQEGKDIHTQTASWMFGLSAEAIDPLMRRAAKTINFGVLYGMSAFRLSQELGIPYEEAQAFIQKYFQSYPKVKAWIEKTLREGRPRGYVETLFGRRRYVPDLNARVKGKREAAERMAFNMPVQGTAADLMKLAMVRLFPQLREVGARMLLQVHDELLLEAPKERAEEVAALAKEVMEGVWPLAVPLEVEVGIGEDWLAAKG

SEQ ID NO: 5147 - DNA, 2523 bp, synthetic construct
  misc_feature 1..2523: note = Variant of DNA polymerase I from Thermus sp. strain 2.9
  source 1..2523: mol_type = other DNA
atgcaccatcatcatcatcatggcggtagcggcgtgttaccggtgttcgagcctaaaggtcgcgtgcttctggttgatggccatcatctcgcgtatcgtaacttctttgccctgaaaggattaaccaccagcctgggcgagccggtacagggtgtctacggctttgcaaagtcgctcctgaaagctctgaaagaagacggtgatgtggtgattgttgtctttgatgcgaaagcgccaagttttcgccacgaagcgtacgaagcttacaaagccgggcgtgctccaacgccggaagactttcctcgccaattggcgcttatgaaggaattagtggatttgcttggcctcgaacgcttggaagttcccggtttcgaggcagacgacgtattagcgactctcgcaaagaaagccgaacgtgagggctatgaagtccagatcttgacagcagatcgcgatcttttccagcttttatctccgcgcatctcggtgttacacccggaagggcatcgtatcaccccggaatggctctgggagaaatatggtttgcgtcccgaacaatgggtggattttcgcgccttagcaggcgatccgagcgacaatattccgggagttaaaggtatcggcgagaagacggcgctcaagctccttaaagaatgggggtcgttggagaacttgcttaagaatttagatcaggtcaaaccagagtcagtgcgtgagaagattcttgctcacctcgaagacctcaaattaagccgcgaattgtcccgtgtacgcaccgatttgccgctcgaagttgatttccgccgccgccgcgaacctgactgggagggtcttaaagcgtttttagagcgtcttgaatttggttcgctcttgcatgaattcggccttttagaaagcccgttactggccgaagaagcaccttggccaccgcccgagggcgcgtttttaggttaccgtttgagtcgcccggaaccgatgtgggccgaattactggctcttgcagcgtctgcccagggacgtgtgtatcgcgcggaagaccctcatggtgcgctccgcggcctcttcgaagtccgtggactccttgccaaagacttagctgttgttgcattgcgcgaaggtcttgatttacctccgactgatgatccaatgcttcttgcgtacctcttggacccgtcaaacacgacgcccgaaggcgtagcccgtcgttacggcggcgagtggaccgaagatgcagcgaaacgcgcgttattggccgaacgtttgcacgaaaatttattaggacgtttgcaaggcgaggaacgtctcctctggctttacgaagaagtggagaaaccattgagtcgcgtgctcgcgcatatggaagctaccggtgtcaaattagacgtggcgtatttggagaatctcagccttgaagttgctgccgaaatgcgccgcttggaggaagaagtattccgtttagcaggccgttcctttcgccttaactctcgcgatcagttagaacgtgtgttgttcgatgaacttggtctccctcctatcggcaagacagagaagaccggtaaacgtagcacttcagcggcggttttagaagctcttcgcgaagtccatcccattgtggacaagatcttgcagtaccgcgaactggcgaaattgaaaggcacctatattgaccgtcttccggcattagtccacccgaaaacgggacgcctccatacccgcttcaaccaaacagccacggcgaccggtcgtttgtcctcctctgatccaaaccttcagaatattccagtacgtaccccattgggccagaagatccgccgtgcgtttgtagctgaggagggttggcgtttagtggccctcgattatcgtcaaattgaattacgtgtccttgcccatctttctggcgatgagaacctcatccgcgtgtttcaggaaggcaaagacattcacactcaaacggcaagctggatgtttggattatcagctgaagcgatcgatcctttgatgcgtcgtgcagcgaagaccatcaatttcggtgttctctacggtatgagtgcctttcgtttgtcgcaggaattaggcattccctatgaagaagctcaggcgttcattcagaaatactttcaaagctatcccaaagttaaagcatggatcgagaagactctccgtgaaggccgcacacgtggttacgtagagaccttatttggacgtcgccgctatgttcccgatttaaacgctcgcgtgaaaggcaagcgtgaagccgccgaacgcatggcgttcaacatgcctgtacagggcacggcagctgacctcatgaaacttgcaatggtgcgcctttttccacaattgcgtgaagttggtgcccgcatgctcttgcaggtccacgatgaactcttgttagaagcgccaaaagagcgtgcggaagaggtggcagccctcgcgaaagaagttatggaaggcgtgtggcccttagcggtgcctcttgaagtcgaagttggtattggcgaggattggctggctgccaaagga

SEQ ID NO: 5148 - protein, 841 aa, synthetic construct
  REGION 1..841: note = Variant of DNA polymerase I from Thermus sp. strain 2.9
MHHHHHHGGSGVLPVFEPKGRVLLVDGHHLAYRNFFALKGLTTSLGEPVQGVYGFAKSLLKALKEDGDVVIVVFDAKAPSFRHEAYEAYKAGRAPTPEDFPRQLALMKELVDLLGLERLEVPGFEADDVLATLAKKAEREGYEVQILTADRDLFQLLSPRISVLHPEGHRITPEWLWEKYGLRPEQWVDFRALAGDPSDNIPGVKGIGEKTALKLLKEWGSLENLLKNLDQVKPESVREKILAHLEDLKLSRELSRVRTDLPLEVDFRRRREPDWEGLKAFLERLEFGSLLHEFGLLESPLLAEEAPWPPPEGAFLGYRLSRPEPMWAELLALAASAQGRVYRAEDPHGALRGLFEVRGLLAKDLAVVALREGLDLPPTDDPMLLAYLLDPSNTTPEGVARRYGGEWTEDAAKRALLAERLHENLLGRLQGEERLLWLYEEVEKPLSRVLAHMEATGVKLDVAYLENLSLEVAAEMRRLEEEVFRLAGRSFRLNSRDQLERVLFDELGLPPIGKTEKTGKRSTSAAVLEALREVHPIVDKILQYRELAKLKGTYIDRLPALVHPKTGRLHTRFNQTATATGRLSSSDPNLQNIPVRTPLGQKIRRAFVAEEGWRLVALDYRQIELRVLAHLSGDENLIRVFQEGKDIHTQTASWMFGLSAEAIDPLMRRAAKTINFGVLYGMSAFRLSQELGIPYEEAQAFIQKYFQSYPKVKAWIEKTLREGRTRGYVETLFGRRRYVPDLNARVKGKREAAERMAFNMPVQGTAADLMKLAMVRLFPQLREVGARMLLQVHDELLLEAPKERAEEVAALAKEVMEGVWPLAVPLEVEVGIGEDWLAAKG

SEQ ID NO: 5149 - DNA, 2523 bp, synthetic construct
  misc_feature 1..2523: note = Variant of DNA polymerase I from Thermus sp. strain 2.9
  source 1..2523: mol_type = other DNA
atgcaccatcatcatcatcatggcggtagcggcgtgttaccggtgttcgagcctaaaggtcgcgtgcttctggttgatggccatcatctcgcgtatcgtaacttctttgccctgaaaggattaaccaccagcctgggcgagccggtacagggtgtctacggctttgcaaagtcgctcctgaaagctctgaaagaagacggtgatgtggtgattgttgtctttgatgcgaaagcgccaagttttcgccacgaagcgtacgaagcttacaaagccgggcgtgctccaacgccggaagactttcctcgccaattggcgcttatgaaggaattagtggatttgcttggcctcgaacgcttggaagttcccggtttcgaggcagacgacgtattagcgactctcgcaaagaaagccgaacgtgagggctatgaagtccagatcttgacagcagatcgcgatcttttccagcttttatctccgcgcatctcggtgttacacccggaagggcatcgtatcaccccggaatggctctgggagaaatatggtttgcgtcccgaacaatgggtggattttcgcgccttagcaggcgatccgagcgacaatattccgggagttaaaggtatcggcgagaagacggcgctcaagctccttaaagaatgggggtcgttggagaacttgcttaagaatttagatcaggtcaaaccagagtcagtgcgtgagaagattcttgctcacctcgaagacctcaaattaagccgcgaattgtcccgtgtacgcaccgatttgccgctcgaagttgatttcggtcgccgccgcgaacctgactgggagggtcttaaagcgtttttagagcgtcttgaatttggttcgctcttgcatgaattcggccttttagaaagcccgttactggccgaagaagcaccttggccaccgcccgagggcgcgtttttaggttaccgtttgagtcgcccggaaccgatgtgggccgaattactggctcttgcagcgtctgcccagggacgtgtgtatcgcgcggaagaccctcatggtgcgctccgcggcctcttcgaagtccgtggactccttgccaaagacttagctgttgttgcattgcgcgaaggtcttgatttacctccgactgatgatccaatgcttcttgcgtacctcttggacccgtcaaacacgacgcccgaaggcgtagcccgtcgttacggcggcgagtggaccgaagatgcagcgaaacgcgcgttattggccgaacgtttgcacgaaaatttacggggacgtttgcaaggcgaggaacgtctcctctggctttacgaagaagtggagaaaccattgagtcgcgtgctcgcgcatatggaagctaccggtgtcaaattagacgtggcgtatttggagaatctcagccttgaagttgctgcccacatgcgccgcttggaggaagaagtattccgtttagcaggccgttcctttcgccttaactctcgcgatcagttagaacgtgtgttgttcgatgaacttggtctccctcctatcggcaagacagagaagaccggtaaacgtagcacttcagcggcggttttagaagctcttcgcgaagtccatcccattgtggacaagatcttgcagtaccgcgaaatggcgaaattgaaaggcacctatattgaccgtcttccggcattagtccacccgaaaacgggacgcctccatacccgcttcaaccaaacagccacggcgaccggtcgtttgtcctcctctgatccaaaccttcagaatattccagtacgtaccccattgggccagaagatccgccgtgcgtttgtagctgaggagggttggcgtttagtggccctcgattatcgtcaaattgaattacgtgtccttgcccatctttctggcgatgagaacctcatccgcgtgtttcaggaaggcaaagacattcacactcaaacggcaagctggatgtttggattatcagctgaagcgatcgatcctttgatgcgtcgtgcagcgaagaccatcaatttcggtgttctctacggtatgagtgcctttcgtttgtcgcaggaattaggcattccctatgaagaagctcaggcgttcattcagaaatactttcaaagctatcccaaagttaaagcatggatcgagaagactctccgtgaaggccgcacacgtggttacgtagagaccttatttggacgtcgccgctatgttcccgatttaaacgctcgcgtgaaaggcaagcgtgaagccgccgaacgcatggcgttcaacatgcctgtacagggcacggcagctgacctcatgaaacttgcaatggtgcgcctttttccacaattgcgtgaagttggtgcccgcatgctcttgcaggtccacgatgaactcttgttagaagcgccaaaagagcgtgcggaagaggtggcagccctcgcgaaagaagttatggaaggcgtgtggcccttagcggtgcctcttgaagtcgaagttggtattggcgaggattggctggctgccaaagga

SEQ ID NO: 5150 - protein, 841 aa, synthetic construct
  REGION 1..841: note = Variant of DNA polymerase I from Thermus sp. strain 2.9
MHHHHHHGGSGVLPVFEPKGRVLLVDGHHLAYRNFFALKGLTTSLGEPVQGVYGFAKSLLKALKEDGDVVIVVFDAKAPSFRHEAYEAYKAGRAPTPEDFPRQLALMKELVDLLGLERLEVPGFEADDVLATLAKKAEREGYEVQILTADRDLFQLLSPRISVLHPEGHRITPEWLWEKYGLRPEQWVDFRALAGDPSDNIPGVKGIGEKTALKLLKEWGSLENLLKNLDQVKPESVREKILAHLEDLKLSRELSRVRTDLPLEVDFGRRREPDWEGLKAFLERLEFGSLLHEFGLLESPLLAEEAPWPPPEGAFLGYRLSRPEPMWAELLALAASAQGRVYRAEDPHGALRGLFEVRGLLAKDLAVVALREGLDLPPTDDPMLLAYLLDPSNTTPEGVARRYGGEWTEDAAKRALLAERLHENLRGRLQGEERLLWLYEEVEKPLSRVLAHMEATGVKLDVAYLENLSLEVAAHMRRLEEEVFRLAGRSFRLNSRDQLERVLFDELGLPPIGKTEKTGKRSTSAAVLEALREVHPIVDKILQYREMAKLKGTYIDRLPALVHPKTGRLHTRFNQTATATGRLSSSDPNLQNIPVRTPLGQKIRRAFVAEEGWRLVALDYRQIELRVLAHLSGDENLIRVFQEGKDIHTQTASWMFGLSAEAIDPLMRRAAKTINFGVLYGMSAFRLSQELGIPYEEAQAFIQKYFQSYPKVKAWIEKTLREGRTRGYVETLFGRRRYVPDLNARVKGKREAAERMAFNMPVQGTAADLMKLAMVRLFPQLREVGARMLLQVHDELLLEAPKERAEEVAALAKEVMEGVWPLAVPLEVEVGIGEDWLAAKG

SEQ ID NO: 5151 - DNA, 2523 bp, synthetic construct
  misc_feature 1..2523: note = Variant of DNA polymerase I from Thermus sp. strain 2.9
  source 1..2523: mol_type = other DNA
atgcaccatcatcatcatcatggcggtagcggcgtgttaccggtgttcgagcctaaaggtcgcgtgcttctggttgatggccatcatctcgcgtatcgtaacttctttgccctgaaaggattaaccaccagcctgggcgagccggtacagggtgtctacggctttgcaaagtcgctcctgaaagctctgaaagaagacggtgatgtggtgattgttgtctttgatgcgaaagcgccaagttttcgccacgaagcgtacgaagcttacaaagccgggcgtgctccaacgccggaagactttcctcgccaattggcgcttatgaaggaattagtggatttgcttggcctcgaacgcttggaagttcccggtttcgaggcagacgacgtattagcgactctcgcaaagaaagccgaacgtgagggctatgaagtccagatcttgacagcagatcgcgatcttttccagcttttatctccgcgcatctcggtgttacacccggaagggcatcgtatcaccccggaatggctctgggagaaatatggtttgcgtcccgaacaatgggtggattttcgcgccttagcaggcgatccgagcgacaatattccgggagttaaaggtatcggcgagaagacggcgctcaagctccttaaagaatgggggtcgttggagaacttgcttaagaatttagatcaggtcaaaccagagtcagtgcgtgagaagattcttgctcacctcgaagacctcaaattaagccgcgaattgtcccgtgtacgcaccgatttgccgctcgaagttgatttcggtcgccgccgcgaacctgactgggagggtcttaaagcgtttttagagcgtcttgaatttggttcgctcttgcatgaattcggccttttagaaagcccgttactggccgaagaagcaccttggccaccgcccgagggcgcgtttttaggttaccgtttgagtcgcccggaaccgatgtgggccgaattactggctcttgcagcgtctgcccagggacgtgtgtatcgcgcggaagaccctcatggtgcgctccgcggcctcttcgaagtccgtggactccttgccaaagacttagctgttgttgcattgcgcgaaggtcttgatttacctccgactgatgatccaatgcttcttgcgtacctcttggacccgtcaaacacgacgcccgaaggcgtagcccgtcgttacggcggcgagtggtgggaagatgcagcgaaacgcgcgttattggccgaacgtttgcacgaaaatttattaggacgtttgcaaggcgaggaacgtctcctctggctttacgaagaagtggagaaaccattgagtcgcgtgctcgcgcatatggaagctaccggtgtcaaattagacgtggcgtatttggagaatctcagccttgaagttgctgcccacatgcgccgcttggaggaagaagtattccgtttagcaggccgttcctttcgccttaactctcgcgatcagttagaacgtgtgttgttcgatgaacttggtctccctcctatcggcaagacagagaagaccggtaaacgtagcacttcagcggcggttttagaagctcttcgcgaagtccatcccattgtggacaagatcttgcagtaccgcgaaatggcgaaattgaaaggcacctatattgaccgtcttccggcattagtccacccgaaaacgggacgcctccatacccgcttcaaccaaacagccacggcgaccggtcgtttgtcctcctctgatccaaaccttcagaatattccagtacgtaccccattgggccagaagatccgccgtgcgtttgtagctgaggagggttggcgtttagtggccctcgattatcgtcaaattgaattacgtgtccttgcccatctttctggcgatgagaacctcatccgcgtgtttcaggaaggcaaagacattcacactcaaacggcaagctggatgtttggattatcagctgaagcgatcgatcctttgatgcgtcgtgcagcgaagaccatcaatttcggtgttctctacggtatgagtgcctttcgtttgtcgcaggaattaggcattccctatgaagaagctcaggcgttcattcagaaatactttcaaagctatcccaaagttaaagcatggatcgagaagactctccgtgaaggccgcacacgtggttacgtagagaccttatttggacgtcgccgctatgttcccgatttaaacgctcgcgtgaaaggcaagcgtgaagccgccgaacgcatggcgttcaacatgcctgtacagggcacggcagctgacctcatgaaacttgcaatggtgcgcctttttccacaattgcgtgaagttggtgcccgcatgctcttgcaggtccacgatgaactcttgttagaagcgccaaaagagcgtgcggaagaggtggcagccctcgcgaaagaagttatggaaggcgtgtggcccttagcggtgcctcttgaagtcgaagttggtattggcgaggattggctggctgccaaagga

SEQ ID NO: 5152 - protein, 841 aa, synthetic construct
  REGION 1..841: note = Variant of DNA polymerase I from Thermus sp. strain 2.9
MHHHHHHGGSGVLPVFEPKGRVLLVDGHHLAYRNFFALKGLTTSLGEPVQGVYGFAKSLLKALKEDGDVVIVVFDAKAPSFRHEAYEAYKAGRAPTPEDFPRQLALMKELVDLLGLERLEVPGFEADDVLATLAKKAEREGYEVQILTADRDLFQLLSPRISVLHPEGHRITPEWLWEKYGLRPEQWVDFRALAGDPSDNIPGVKGIGEKTALKLLKEWGSLENLLKNLDQVKPESVREKILAHLEDLKLSRELSRVRTDLPLEVDFGRRREPDWEGLKAFLERLEFGSLLHEFGLLESPLLAEEAPWPPPEGAFLGYRLSRPEPMWAELLALAASAQGRVYRAEDPHGALRGLFEVRGLLAKDLAVVALREGLDLPPTDDPMLLAYLLDPSNTTPEGVARRYGGEWWEDAAKRALLAERLHENLLGRLQGEERLLWLYEEVEKPLSRVLAHMEATGVKLDVAYLENLSLEVAAHMRRLEEEVFRLAGRSFRLNSRDQLERVLFDELGLPPIGKTEKTGKRSTSAAVLEALREVHPIVDKILQYREMAKLKGTYIDRLPALVHPKTGRLHTRFNQTATATGRLSSSDPNLQNIPVRTPLGQKIRRAFVAEEGWRLVALDYRQIELRVLAHLSGDENLIRVFQEGKDIHTQTASWMFGLSAEAIDPLMRRAAKTINFGVLYGMSAFRLSQELGIPYEEAQAFIQKYFQSYPKVKAWIEKTLREGRTRGYVETLFGRRRYVPDLNARVKGKREAAERMAFNMPVQGTAADLMKLAMVRLFPQLREVGARMLLQVHDELLLEAPKERAEEVAALAKEVMEGVWPLAVPLEVEVGIGEDWLAAKG

SEQ ID NO: 5153 - DNA, 2523 bp, synthetic construct
  misc_feature 1..2523: note = Variant of DNA polymerase I from Thermus sp. strain 2.9
  source 1..2523: mol_type = other DNA
atgcaccatcatcatcatcatggcggtagcggcgtgttaccggtgttcgagcctaaaggtcgcgtgcttctggttgatggccatcatctcgcgtatcgtaacttctttgccctgaaaggattaaccaccagcctgggcgagccggtacagggtgtctacggctttgcaaagtcgctcctgaaagctctgaaagaagacggtgatgtggtgattgttgtctttgatgcgaaagcgccaagttttcgccacgaagcgtacgaagcttacaaagccgggcgtgctccaacgccggaagactttcctcgccaattggcgcttatgaaggaattagtggatttgcttggcctcgaacgcttggaagttcccggtttcgaggcagacgacgtattagcgactctcgcaaagaaagccgaacgtgagggctatgaagtccagatcttgacagcagatcgcgatcttttccagcttttatctccgcgcatctcggtgttacacccggaagggcatcgtatcaccccggaatggctctgggagaaatatggtttgcgtcccgaacaatgggtggattttcgcgccttagcaggcgatccgagcgacaatattccgggagttaaaggtatcggcgagaagacggcgctcaagctccttaaagaatgggggtcgttggagaacttgcttaagaatttagatcaggtcaaaccagagtcagtgcgtgagaagattcttgctcacctcgaagacctcaaattaagccgcgaattgtcccgtgtacgcaccgatttgccgctcgaagttgatttcggtcgccgccgcgaacctgactgggagggtcttaaagcgtttttagagcgtcttgaatttggttcgctcttgcatgaattcggccttttagaaagcccgttactggccgaagaagcaccttggccaccgcccgagggcgcgtttttaggttaccgtttgagtcgcccggaaccgatgtgggccgaattactggctcttgcagcgtctgcccagggacgtgtgtatcgcgcggaagaccctcatggtgcgctccgcggcctcttcgaagtccgtggactccttgccaaagacttagctgttgttgcattgcgcgaaggtcttgatttacctccgactgatgatccaatgcttcttgcgtacctcttggacccgtcaaacacgacgcccgaaggcgtagcccgtcgttacggcggcgagtggaccgaagatgcagcgaaacgcgcgttattggccgaacgtttgcacgaaaatttattaggacgtttgcaaggcgaggaacgtctcctctggctttacgaagaagtggagaaaccattgagtcgcgtgctcgcgcatatggaagctaccggtgtcaaattagacgtggcgtatttggagaatctcagccttgaagttgctgcccacatgcgccgcttggaggaagaagtattccgtttagcaggccgttcctttcgccttaactctcgcgatcagttagaacgtgtgttgttcgatgaacttggtctccctcctatcggcaagacagagaagaccggtaaacgtagcacttcagcggcggttttagaagctcttcgcgaagtccatcccattgtggacaagatcttgcagtaccgcgaaatggcgaaattgaaaggcacctatattgaccgtcttccggcattagtccacccgaaaacgggacgcctccatacccgcttcaaccaaacagccacggcgaccggtcgtttgtcctcctctgatccaaaccttcagaatattccagtacgtaccccattgggccagaagatccgccgtgcgtttgtagctgaggagggttggcgtttagtggccctcgattatcgtcaaattgaattacgtgtccttgcccatctttctggcgatgagaacctcatccgcgtgtttcaggaaggcaaagacattcacactcaaacggcaagctggatgtttggattatcagctgaagcgatcgatcctttgatgcgtcgtgcagcgaagaccatcaatttcggtgttctctacggtatgagtgcctttcgtttgtcgcaggaattaggcattccctatgaagaagctcaggcgttcattcagaaatactttcaaagctatcccaaagttaaagcatggatcgagaagactctccgtgaagcgcgcacacgtggttacgtagagaccttatttggacgtcgccgctatgttcccgatttaaacgctcgcgtgaaaggcaagcgtgaagccgccgaacgcatggcgttcaacatgcctgtacagggcacggcagctgacctcatgaaacttgcaatggtgcgcctttttccacaattgcgtgaagttggtgcccgcatgctcttgcaggtccacgatgaactcttgttagaagcgccaaaagagcgtgcggaagaggtggcagccctcgcgaaagaagttatggaaggcgtgtggcccttagcggtgcctcttgaagtcgaagttggtattggcgaggattggctggctgccaaagga

SEQ ID NO: 5154 - protein, 841 aa, synthetic construct
  REGION 1..841: note = Variant of DNA polymerase I from Thermus sp. strain 2.9
MHHHHHHGGSGVLPVFEPKGRVLLVDGHHLAYRNFFALKGLTTSLGEPVQGVYGFAKSLLKALKEDGDVVIVVFDAKAPSFRHEAYEAYKAGRAPTPEDFPRQLALMKELVDLLGLERLEVPGFEADDVLATLAKKAEREGYEVQILTADRDLFQLLSPRISVLHPEGHRITPEWLWEKYGLRPEQWVDFRALAGDPSDNIPGVKGIGEKTALKLLKEWGSLENLLKNLDQVKPESVREKILAHLEDLKLSRELSRVRTDLPLEVDFGRRREPDWEGLKAFLERLEFGSLLHEFGLLESPLLAEEAPWPPPEGAFLGYRLSRPEPMWAELLALAASAQGRVYRAEDPHGALRGLFEVRGLLAKDLAVVALREGLDLPPTDDPMLLAYLLDPSNTTPEGVARRYGGEWTEDAAKRALLAERLHENLLGRLQGEERLLWLYEEVEKPLSRVLAHMEATGVKLDVAYLENLSLEVAAHMRRLEEEVFRLAGRSFRLNSRDQLERVLFDELGLPPIGKTEKTGKRSTSAAVLEALREVHPIVDKILQYREMAKLKGTYIDRLPALVHPKTGRLHTRFNQTATATGRLSSSDPNLQNIPVRTPLGQKIRRAFVAEEGWRLVALDYRQIELRVLAHLSGDENLIRVFQEGKDIHTQTASWMFGLSAEAIDPLMRRAAKTINFGVLYGMSAFRLSQELGIPYEEAQAFIQKYFQSYPKVKAWIEKTLREARTRGYVETLFGRRRYVPDLNARVKGKREAAERMAFNMPVQGTAADLMKLAMVRLFPQLREVGARMLLQVHDELLLEAPKERAEEVAALAKEVMEGVWPLAVPLEVEVGIGEDWLAAKG

SEQ ID NO: 5155 - DNA, 2523 bp, synthetic construct
  misc_feature 1..2523: note = Variant of DNA polymerase I from Thermus sp. strain 2.9
  source 1..2523: mol_type = other DNA
atgcaccatcatcatcatcatggcggtagcggcgtgttaccggtgttcgagcctaaaggtcgcgtgcttctggttgatggccatcatctcgcgtatcgtaacttctttgccctgaaaggattaaccaccagcctgggcgagccggtacagggtgtctacggctttgcaaagtcgctcctgaaagctctgaaagaagacggtgatgtggtgattgttgtctttgatgcgaaagcgccaagttttcgccacgaagcgtacgaagcttacaaagccgggcgtgctccaacgccggaagactttcctcgccaattggcgcttatgaaggaattagtggatttgcttggcctcgaacgcttggaagttcccggtttcgaggcagacgacgtattagcgactctcgcaaagaaagccgaacgtgagggctatgaagtccagatcttgacagcagatcgcgatcttttccagcttttatctccgcgcatctcggtgttacacccggaagggcatcgtatcaccccggaatggctctgggagaaatatggtttgcgtcccgaacaatgggtggattttcgcgccttagcaggcgatccgagcgacaatattccgggagttaaaggtatcggcgagaagacggcgctcaagctccttaaagaatgggggtcgttggagaacttgcttaagaatttagatcaggtcaaaccagagtcagtgcgtgagaagattcttgctcacctcgaagacctcaaattaagccgcgaattgtcccgtgtacgcaccgatttgccgctcgaagttgatttcggtcgccgccgcgaacctgactgggagggtcttaaagcgtttttagagcgtcttgaatttggttcgctcttgcatgaattcggccttttagaaagcccgttactggccgaagaagcaccttggccaccgcccgagggcgcgtttttaggttaccgtttgagtcgcccggaaccgatgtgggccgaattactggctcttgcagcgtctgcccagggacgtgtgtatcgcgcggaagaccctcatggtgcgctccgcggcctcttcgaagtccgtggactccttgccaaagacttagctgttgttgcattgcgcgaaggtcttgatttacctccgactgatgatccaatgcttcttgcgtacctcttggacccgtcaaacacgacgcccgaaggcgtagcccgtcgttacggcggcgagtggaccgaagatgcagcgaaacgcgcgttattggccgaacgtttgcacgaaaatttattaggacgtttgcaaggcgaggaacgtctcctctggctttacgaagaagtggagaaaccattgagtcgcgtgctcgcgcatatggaagctaccggtgtcaaattagacgtggcgtatttggagaatctcagccttgaagttgctgcccacatgcgccgcttggaggaagaagtattccgtttagcaggccgttcctttcgccttaactctcgcgatcagttagaacgtgtgttgttcgatgaacttggtctccctcctatcggcaagacagagaagaccggtaaacgtagcacttcagcggcggttttagaagctcttcgcgaagtccatcccattgtggacaagatcttgcagtaccgcgaaatggcgaaattgaaaggcacctatattgaccgtcttccggcattagtccacccgaaaacgggacgcctccatacccgcttcaaccaaacagccacggcgaccggtcgtttgtcctcctctgatccaaaccttcagaatattccagtacgtaccccattgggccagaagatccgccgtgcgtttgtagctgaggagggttggcgtttagtggccctcgattatcgtcaaattgaattacgtgtccttgcccatctttctggcgatgagaacctcatccgcgtgtttcaggaaggcaaagacattcacactcaaacggcaagctggatgtttggattatcagctgaagcgatcgatcctttgatgcgtcgtgcagcgaagaccatcaatttcggtgttctctacggtatgagtgcctttcgtttgtcgcaggaattaggcattccctatgaagaagctcaggcgttcattcagaaatactttcaaagctatcccaaagttaaagcatggatcgagaagactctccgtgaaggccgcacacgtggttacgtagagaccttatttggacgtcgccgctatgttcccgatttaaacgctcgcgtgaaaggcaagcgtgaagccgccgaacgcatggcgttcaacatgcctgtacagggcacggcagctgacctcatgaaacttgcaatggtgcgcctttttccacaattgcgtgaagttggtgcccgcatggatttgcaggtccacgatgaactcttgttagaagcgccaaaagagcgtgcggaagaggtggcagccctcgcgaaagaagttatggaaggcgtgtggcccttagcggtgcctcttgaagtcgaagttggtattggcgaggattggctggctgccaaagga

SEQ ID NO: 5156 - protein, 841 aa, synthetic construct
  REGION 1..841: note = Variant of DNA polymerase I from Thermus sp. strain 2.9
MHHHHHHGGSGVLPVFEPKGRVLLVDGHHLAYRNFFALKGLTTSLGEPVQGVYGFAKSLLKALKEDGDVVIVVFDAKAPSFRHEAYEAYKAGRAPTPEDFPRQLALMKELVDLLGLERLEVPGFEADDVLATLAKKAEREGYEVQILTADRDLFQLLSPRISVLHPEGHRITPEWLWEKYGLRPEQWVDFRALAGDPSDNIPGVKGIGEKTALKLLKEWGSLENLLKNLDQVKPESVREKILAHLEDLKLSRELSRVRTDLPLEVDFGRRREPDWEGLKAFLERLEFGSLLHEFGLLESPLLAEEAPWPPPEGAFLGYRLSRPEPMWAELLALAASAQGRVYRAEDPHGALRGLFEVRGLLAKDLAVVALREGLDLPPTDDPMLLAYLLDPSNTTPEGVARRYGGEWTEDAAKRALLAERLHENLLGRLQGEERLLWLYEEVEKPLSRVLAHMEATGVKLDVAYLENLSLEVAAHMRRLEEEVFRLAGRSFRLNSRDQLERVLFDELGLPPIGKTEKTGKRSTSAAVLEALREVHPIVDKILQYREMAKLKGTYIDRLPALVHPKTGRLHTRFNQTATATGRLSSSDPNLQNIPVRTPLGQKIRRAFVAEEGWRLVALDYRQIELRVLAHLSGDENLIRVFQEGKDIHTQTASWMFGLSAEAIDPLMRRAAKTINFGVLYGMSAFRLSQELGIPYEEAQAFIQKYFQSYPKVKAWIEKTLREGRTRGYVETLFGRRRYVPDLNARVKGKREAAERMAFNMPVQGTAADLMKLAMVRLFPQLREVGARMDLQVHDELLLEAPKERAEEVAALAKEVMEGVWPLAVPLEVEVGIGEDWLAAKG

SEQ ID NO: 5157 - DNA, 2523 bp, synthetic construct
  misc_feature 1..2523: note = Variant of DNA polymerase I from Thermus sp. strain 2.9
  source 1..2523: mol_type = other DNA
atgcaccatcatcatcatcatggcggtagcggcgtgttaccggtgttcgagcctaaaggtcgcgtgcttctggttgatggccatcatctcgcgtatcgtaacttctttgccctgaaaggattaaccaccagcctgggcgagccggtacagggtgtctacggctttgcaaagtcgctcctgaaagctctgaaagaagacggtgatgtggtgattgttgtctttgatgcgaaagcgccaagttttcgccacgaagcgtacgaagcttacaaagccgggcgtgctccaacgccggaagactttcctcgccaattggcgcttatgaaggaattagtggatttgcttggcctcgaacgcttggaagttcccggtttcgaggcagacgacgtattagcgactctcgcaaagaaagccgaacgtgagggctatgaagtccagatcttgacagcagatcgcgatcttttccagcttttatctccgcgcatctcggtgttacacccggaagggcatcgtatcaccccggaatggctctgggagaaatatggtttgcgtcccgaacaatgggtggattttcgcgccttagcaggcgatccgagcgacaatattccgggagttaaaggtatcggcgagaagacggcgctcaagctccttaaagaatgggggtcgttggagaacttgcttaagaatttagatcaggtcaaaccagagtcagtgcgtgagaagattcttgctcacctcgaagacctcaaattaagccgcgaattgtcccgtgtacgcaccgatttgccgctcgaagttgatttcggtcgccgccgcgaacctgactgggagggtcttaaagcgtttttagagcgtcttgaatttggttcgctcttgcatgaattcggccttttagaaagcccgttactggccgaagaagcaccttggccaccgcccgagggcgcgtttttaggttaccgtttgagtcgcccggaaccgatgtgggccgaattactggctcttgcagcgtctgcccagggacgtgtgtatcgcgcggaagaccctcatggtgcgctccgcggcctcttcgaagtccgtggactccttgccaaagacttagctgttgttgcattgcgcgaaggtcttgatttacctccgactgatgatccaatgcttcttgcgtacctcttggacccgtcaaacacgacgcccgaaggcgtagcccgtcgttacggcggcgagtggaccgaagatgcagcgaaacgcgcgttattggccgaacgtttgcacgaaaatttattaggacgtttgcaaggcgaggaacgtctcctctggctttacgaagaagtggagaaaccattgagtcgcgtgctcgcgcatatggaagctaccggtgtcaaattagacgtggcgtatttggagaatctcagccttgaagttgctgcccacatgcgccgcttggaggaagaagtattccgtttagcaggccgttcctttcgccttaactctcgcgatcagttagaacgtgtgttgttcgatgaacttggtctccctcctatcggcaagacagagaagaccggtaaacgtagcacttcagcggcggttttagaagctcttcgcgaagtccatcccattgtggacaagatcttgcagtaccgcgaaatggcgaaattgaaaggcacctatattgaccgtcttccggcattagtccacccgaaaacgggacgcctccatacccgcttcaaccaaacagccacggcgaccggtcgtttgtcctcctctgatccaaaccttcagaatattccagtacgtaccccattgggccagaagatccgccgtgcgtttgtagctgaggagggttggcgtttagtggccctcgattatcgtcaaattgaattacgtgtccttgcccatctttctggcgatgagaacctcatccgcgtgtttcaggaaggcaaagacattcacactcaaacggcaagctggatgtttggattatcagctgaagcgatcgatcctttgatgcgtcgtgcagcgaagaccatcaatttcggtgttctctacggtatgagtgcctttcgtttgtcgcaggaattaggcattccctatgaagaagctcaggcgttcattcagaaatactttcaaagctatcccaaagttaaagcatggatcgagaagactctccgtgaaggccgcacacgtggttacgtagagaccttatttggacgtcgccgctatgttcccgatttaaacgctcgcgtgaaaggcaagcgtgaagccgccgaacgcatggcgttcaacatgcctgtacagggcacggcagctgacctcatgaaacttgcaatggtgcgcctttttccacaattgcgtgaagttggtgcccgcatgctcttgagggtccacgatgaactcttgttagaagcgccaaaagagcgtgcggaagaggtggcagccctcgcgaaagaagttatggaaggcgtgtggcccttagcggtgcctcttgaagtcgaagttggtattggcgaggattggctggctgccaaagga

SEQ ID NO: 5158 - protein, 841 aa, synthetic construct
  REGION 1..841: note = Variant of DNA polymerase I from Thermus sp. strain 2.9
MHHHHHHGGSGVLPVFEPKGRVLLVDGHHLAYRNFFALKGLTTSLGEPVQGVYGFAKSLLKALKEDGDVVIVVFDAKAPSFRHEAYEAYKAGRAPTPEDFPRQLALMKELVDLLGLERLEVPGFEADDVLATLAKKAEREGYEVQILTADRDLFQLLSPRISVLHPEGHRITPEWLWEKYGLRPEQWVDFRALAGDPSDNIPGVKGIGEKTALKLLKEWGSLENLLKNLDQVKPESVREKILAHLEDLKLSRELSRVRTDLPLEVDFGRRREPDWEGLKAFLERLEFGSLLHEFGLLESPLLAEEAPWPPPEGAFLGYRLSRPEPMWAELLALAASAQGRVYRAEDPHGALRGLFEVRGLLAKDLAVVALREGLDLPPTDDPMLLAYLLDPSNTTPEGVARRYGGEWTEDAAKRALLAERLHENLLGRLQGEERLLWLYEEVEKPLSRVLAHMEATGVKLDVAYLENLSLEVAAHMRRLEEEVFRLAGRSFRLNSRDQLERVLFDELGLPPIGKTEKTGKRSTSAAVLEALREVHPIVDKILQYREMAKLKGTYIDRLPALVHPKTGRLHTRFNQTATATGRLSSSDPNLQNIPVRTPLGQKIRRAFVAEEGWRLVALDYRQIELRVLAHLSGDENLIRVFQEGKDIHTQTASWMFGLSAEAIDPLMRRAAKTINFGVLYGMSAFRLSQELGIPYEEAQAFIQKYFQSYPKVKAWIEKTLREGRTRGYVETLFGRRRYVPDLNARVKGKREAAERMAFNMPVQGTAADLMKLAMVRLFPQLREVGARMLLRVHDELLLEAPKERAEEVAALAKEVMEGVWPLAVPLEVEVGIGEDWLAAKG

SEQ ID NO: 5159 - DNA, 2523 bp, synthetic construct
  misc_feature 1..2523: note = Variant of DNA polymerase I from Thermus sp. strain 2.9
  source 1..2523: mol_type = other DNA
atgcaccatcatcatcatcatggcggtagcggcgtgttaccggtgttcgagcctaaaggtcgcgtgcttctggttgatggccatcatctcgcgtatcgtaacttctttgccctgaaaggattaaccaccagcctgggcgagccggtacagggtgtctacggctttgcaaagtcgctcctgaaagctctgaaagaagacggtgatgtggtgattgttgtctttgatgcgaaagcgccaagttttcgccacgaagcgtacgaagcttacaaagccgggcgtgctccaacgccggaagactttcctcgccaattggcgcttatgaaggaattagtggatttgcttggcctcgaacgcttggaagttcccggtttcgaggcagacgacgtattagcgactctcgcaaagaaagccgaacgtgagggctatgaagtccagatcttgacagcagatcgcgatcttttccagcttttatctccgcgcatctcggtgttacacccggaagggcatcgtatcaccccggaatggctctgggagaaatatggtttgcgtcccgaacaatgggtggattttcgcgccttagcaggcgatccgagcgacaatattccgggagttaaaggtatcggcgagaagacggcgctcaagctccttaaagaatgggggtcgttggagaacttgcttaagaatttagatcaggtcaaaccagagtcagtgcgtgagaagattcttgctcacctcgaagacctcaaattaagccgcgaattgtcccgtgtacgcaccgatttgccgctcgaagttgatttcggtcgccgccgcgaacctgactgggagggtcttaaagcgtttttagagcgtcttgaatttggttcgctcttgcatgaattcggccttttagaaagcccgttactggccgaagaagcaccttggccaccgcccgagggcgcgtttttaggttaccgtttgagtcgcccggaaccgatgtgggccgaattactggctcttgcagcgtctgcccagggacgtgtgtatcgcgcggaagaccctcatggtgcgctccgcggcctcttcgaagtccgtggactccttgccaaagacttagctgttgttgcattgcgcgaaggtcttgatttacctccgactgatgatccaatgcttcttgcgtacctcttggacccgtcaaacacgacgcccgaaggcgtagcccgtcgttacggcggcgagtggaccgaagatgcagcgaaacgcgcgttattggccgaacgtttgcacgaaaatttattaggacgtttgcaaggcgaggaacgtctcctctggctttacgaagaagtggagaaaccattgagtcgcgtgctcgcgcatatggaagctaccggtgtcaaattagacgtggcgtatttggagaatctcagccttgaagttgctgcccacatgcgccgcttggaggaagaagtattccgtttagcaggccgttcctttcgccttaactctcgcgatcagttagaacgtgtgttgttcgatgaacttggtctccctcctatcggcaagacagagaagaccggtaaacgtagcacttcagcggcggttttagaagctcttcgcgaagtccatcccattgtggacaagatcttgcagtaccgcgaaatggcgaaattgaaaggcacctatattgaccgtcttccggcattagtccacccgaaaacgggacgcctccatacccgcttcaaccaaacagccacggcgaccggtcgtttgtcctcctctgatccaaaccttcagaatattccagtacgtacctttttgggccagaagatccgccgtgcgtttgtagctgaggagggttggcgtttagtggccctcgattatcgtcaaattgaattacgtgtccttgcccatctttctggcgatgagaacctcatccgcgtgtttcaggaaggcaaagacattcacactcaaacggcaagctggatgtttggattatcagctgaagcgatcgatcctttgatgcgtcgtgcagcgaagaccatcaatttcggtgttctctacggtatgagtgcctttcgtttgtcgcaggaattaggcattccctatgaagaagctcaggcgttcattcagaaatactttcaaagctatcccaaagttaaagcatggatcgagaagactctccgtgaaggccgcacacgtggttacgtagagaccttatttggacgtcgccgctatgttcccgatttaaacgctcgcgtgaaaggcaagcgtgaagccgccgaacgcatggcgttcaacatgcctgtacagggcacggcagctgacctcatgaaacttgcaatggtgcgcctttttccacaattgcgtgaagttggtgcccgcatgctcttgcaggtccacgatgaactcttgttagaagcgccaaaagagcgtgcggaagaggtggcagccctcgcgaaagaagttatggaaggcgtgtggcccttagcggtgcctcttgaagtcgaagttggtattggcgaggattggctggctgccaaagga

SEQ ID NO: 5160 - protein, 841 aa, synthetic construct
  REGION 1..841: note = Variant of DNA polymerase I from Thermus sp. strain 2.9
MHHHHHHGGSGVLPVFEPKGRVLLVDGHHLAYRNFFALKGLTTSLGEPVQGVYGFAKSLLKALKEDGDVVIVVFDAKAPSFRHEAYEAYKAGRAPTPEDFPRQLALMKELVDLLGLERLEVPGFEADDVLATLAKKAEREGYEVQILTADRDLFQLLSPRISVLHPEGHRITPEWLWEKYGLRPEQWVDFRALAGDPSDNIPGVKGIGEKTALKLLKEWGSLENLLKNLDQVKPESVREKILAHLEDLKLSRELSRVRTDLPLEVDFGRRREPDWEGLKAFLERLEFGSLLHEFGLLESPLLAEEAPWPPPEGAFLGYRLSRPEPMWAELLALAASAQGRVYRAEDPHGALRGLFEVRGLLAKDLAVVALREGLDLPPTDDPMLLAYLLDPSNTTPEGVARRYGGEWTEDAAKRALLAERLHENLLGRLQGEERLLWLYEEVEKPLSRVLAHMEATGVKLDVAYLENLSLEVAAHMRRLEEEVFRLAGRSFRLNSRDQLERVLFDELGLPPIGKTEKTGKRSTSAAVLEALREVHPIVDKILQYREMAKLKGTYIDRLPALVHPKTGRLHTRFNQTATATGRLSSSDPNLQNIPVRTFLGQKIRRAFVAEEGWRLVALDYRQIELRVLAHLSGDENLIRVFQEGKDIHTQTASWMFGLSAEAIDPLMRRAAKTINFGVLYGMSAFRLSQELGIPYEEAQAFIQKYFQSYPKVKAWIEKTLREGRTRGYVETLFGRRRYVPDLNARVKGKREAAERMAFNMPVQGTAADLMKLAMVRLFPQLREVGARMLLQVHDELLLEAPKERAEEVAALAKEVMEGVWPLAVPLEVEVGIGEDWLAAKG

SEQ ID NO: 5161 - DNA, 2523 bp, synthetic construct
  misc_feature 1..2523: note = Variant of DNA polymerase I from Thermus sp. strain 2.9
  source 1..2523: mol_type = other DNA
atgcaccatcatcatcatcatggcggtagcggcgtgttaccggtgttcgagcctaaaggtcgcgtgcttctggttgatggccatcatctcgcgtatcgtaacttctttgccctgaaaggattaaccaccagcctgggcgagccggtacagggtgtctacggctttgcaaagtcgctcctgaaagctctgaaagaagacggtgatgtggtgattgttgtctttgatgcgaaagcgccaagttttcgccacgaagcgtacgaagcttacaaagccgggcgtgctccaacgccggaagactttcctcgccaattggcgcttatgaaggaattagtggatttgcttggcctcgaacgcttggaagttcccggtttcgaggcagacgacgtattagcgactctcgcaaagaaagccgaacgtgagggctatgaagtccagatcttgacagcagatcgcgatcttttccagcttttatctccgcgcatctcggtgttacacccggaagggcatcgtatcaccccggaatggctctgggagaaatatggtttgcgtcccgaacaatgggtggattttcgcgccttagcaggcgatccgagcgacaatattccgggagttaaaggtatcggcgagaagacggcgctcaagctccttaaagaatgggggtcgttggagaacttgcttaagaatttagatcaggtcaaaccagagtcagtgcgtgagaagattcttgctcacctcgaagacctcaaattaagccgcgaattgtcccgtgtacgcaccgatttgccgctcgaagttgatttcggtcgccgccgcgaacctgactgggagggtcttaaagcgtttttagagcgtcttgaatttggttcgctcttgcatgaattcggccttttagaaagcccgttactggccgaagaagcaccttggccaccgcccgagggcgcgtttttaggttaccgtttgagtcgcccggaaccgatgtgggccgaattactggctcttgcagcgtctgcccagggacgtgtgtatcgcgcggaagaccctcatggtgcgctccgcggcctcttcgaagtccgtggactccttgccaaagacttagctgttgttgcattgcgcgaaggtcttgatttacctccgactgatgatccaatgcttcttgcgtacctcttggacccgtcaaacacgacgcccgaaggcgtagcccgtcgttacggcggcgagtggaccgaagatgcagcgaaacgcgcgttattggccgaacgtttgcacgaaaatttattaggacgtttgcaaggcgaggaacgtctcctctggctttacgaagaagtggagaaaccattgagtcgcgtgctcgcgcatatggaagctaccggtgtcaaattagacgtggcgtatttggagaatctcagccttgaagttgctgcccacatgcgccgcttggaggaagaagtattccgtttagcaggccgttcctttcgccttaactctcgcgatcagttagaacgtgtgttgttcgatgaacttggtctccctcctatcggcaagacagagaagaccggtaaacgtagcacttcagcggcggttttagaagctcttcgcgaagtccatcccattgtggacaagatcttgcagtaccgcgaaatggcgaaattgaaaggcacctatattgaccgtcttccggcattagtccacccgaaaacgggacgcctccatacccgcttcaaccaaacagccacggcgaccggtcgtttgtcctcctctgatccaaaccttcagaatattccagtacgtaccccattgggccagaagatccgccgtgcgtttgtagctgagaagggttggcgtttagtggccctcgattatcgtcaaattgaattacgtgtccttgcccatctttctggcgatgagaacctcatccgcgtgtttcaggaaggcaaagacattcacactcaaacggcaagctggatgtttggattatcagctgaagcgatcgatcctttgatgcgtcgtgcagcgaagaccatcaatttcggtgttctctacggtatgagtgcctttcgtttgtcgcaggaattaggcattccctatgaagaagctcaggcgttcattcagaaatactttcaaagctatcccaaagttaaagcatggatcgagaagactctccgtgaaggccgcacacgtggttacgtagagaccttatttggacgtcgccgctatgttcccgatttaaacgctcgcgtgaaaggcaagcgtgaagccgccgaacgcatggcgttcaacatgcctgtacagggcacggcagctgacctcatgaaacttgcaatggtgcgcctttttccacaattgcgtgaagttggtgcccgcatgctcttgcaggtccacgatgaactcttgttagaagcgccaaaagagcgtgcggaagaggtggcagccctcgcgaaagaagttatggaaggcgtgtggcccttagcggtgcctcttgaagtcgaagttggtattggcgaggattggctggctgccaaagga

SEQ ID NO: 5162 - protein, 841 aa, synthetic construct
  REGION 1..841: note = Variant of DNA polymerase I from Thermus sp. strain 2.9
MHHHHHHGGSGVLPVFEPKGRVLLVDGHHLAYRNFFALKGLTTSLGEPVQGVYGFAKSLLKALKEDGDVVIVVFDAKAPSFRHEAYEAYKAGRAPTPEDFPRQLALMKELVDLLGLERLEVPGFEADDVLATLAKKAEREGYEVQILTADRDLFQLLSPRISVLHPEGHRITPEWLWEKYGLRPEQWVDFRALAGDPSDNIPGVKGIGEKTALKLLKEWGSLENLLKNLDQVKPESVREKILAHLEDLKLSRELSRVRTDLPLEVDFGRRREPDWEGLKAFLERLEFGSLLHEFGLLESPLLAEEAPWPPPEGAFLGYRLSRPEPMWAELLALAASAQGRVYRAEDPHGALRGLFEVRGLLAKDLAVVALREGLDLPPTDDPMLLAYLLDPSNTTPEGVARRYGGEWTEDAAKRALLAERLHENLLGRLQGEERLLWLYEEVEKPLSRVLAHMEATGVKLDVAYLENLSLEVAAHMRRLEEEVFRLAGRSFRLNSRDQLERVLFDELGLPPIGKTEKTGKRSTSAAVLEALREVHPIVDKILQYREMAKLKGTYIDRLPALVHPKTGRLHTRFNQTATATGRLSSSDPNLQNIPVRTPLGQKIRRAFVAEKGWRLVALDYRQIELRVLAHLSGDENLIRVFQEGKDIHTQTASWMFGLSAEAIDPLMRRAAKTINFGVLYGMSAFRLSQELGIPYEEAQAFIQKYFQSYPKVKAWIEKTLREGRTRGYVETLFGRRRYVPDLNARVKGKREAAERMAFNMPVQGTAADLMKLAMVRLFPQLREVGARMLLQVHDELLLEAPKERAEEVAALAKEVMEGVWPLAVPLEVEVGIGEDWLAAKG

SEQ ID NO: 5163 - DNA, 2523 bp, synthetic construct
  misc_feature 1..2523: note = Variant of DNA polymerase I from Thermus sp. strain 2.9
  source 1..2523: mol_type = other DNA
atgcaccatcatcatcatcatggcggtagcggcgtgttaccggtgttcgagcctaaaggtcgcgtgcttctggttgatggccatcatctcgcgtatcgtaacttctttgccctgaaaggattaaccaccagcctgggcgagccggtacagggtgtctacggctttgcaaagtcgctcctgaaagctctgaaagaagacggtgatgtggtgattgttgtctttgatgcgaaagcgccaagttttcgccacgaagcgtacgaagcttacaaagccgggcgtgctccaacgccggaagactttcctcgccaattggcgcttatgaaggaattagtggatttgcttggcctcgaacgcttggaagttcccggtttcgaggcagacgacgtattagcgactctcgcaaagaaagccgaacgtgagggctatgaagtccagatcttgacagcagatcgcgatcttttccagcttttatctccgcgcatctcggtgttacacccggaagggcatcgtatcaccccggaatggctctgggagaaatatggtttgcgtcccgaacaatgggtggattttcgcgccttagcaggcgatccgagcgacaatattccgggagttaaaggtatcggcgagaagacggcgctcaagctccttaaagaatgggggtcgttggagaacttgcttaagaatttagatcaggtcaaaccagagtcagtgcgtgagaagattcttgctcacctcgaagacctcaaattaagccgcgaattgtcccgtgtacgcaccgatttgccgctcgaagttgatttcggtcgccgccgcgaacctgactgggagggtcttaaagcgtttttagagcgtcttgaatttggttcgctcttgcatgaattcggccttttagaaagcccgttactggccgaagaagcaccttggccaccgcccgagggcgcgtttttaggttaccgtttgagtcgcccggaaccgatgtgggccgaattactggctcttgcagcgtctgcccagggacgtgtgtatcgcgcggaagaccctcatggtgcgctccgcggcctcttcgaagtccgtggactccttgccaaagacttagctgttgttgcattgcgcgaaggtcttgatttacctccgactgatgatccaatgcttgtggcgtacctcttggacccgtcaaacacgacgcccgaaggcgtagcccgtcgttacggcggcgagtggaccgaagatgcagcgaaacgcgcgttattggccgaacgtttgcacgaaaatttattaggacgtttgcaaggcgaggaacgtctcctctggctttacgaagaagtggagaaaccattgagtcgcgtgctcgcgcatatggaagctaccggtgtcaaattagacgtggcgtatttggagaatctcagccttgaagttgctgcccacatgcgccgcttggaggaagaagtattccgtttagcaggccgttcctttcgccttaactctcgcgatcagttagaacgtgtgttgttcgatgaacttggtctccctcctatcggcaagacagagaagaccggtaaacgtagcacttcagcggcggttttagaagctcttcgcgaagtccatcccattgtggacaagatcttgcagtaccgcgaaatggcgaaattgaaaggcacctatattgaccgtcttccggcattagtccacccgaaaacgggacgcctccatacccgcttcaaccaaacagccacggcgaccggtcgtttgtcctcctctgatccaaaccttcagaatattccagtacgtaccccattgggccagaagatccgccgtgcgtttgtagctgaggagggttggcgtttagtggccctcgattatcgtcaaattgaattacgtgtccttgcccatctttctggcgatgagaacctcatccgcgtgtttcaggaaggcaaagacattcacactcaaacggcaagctggatgtttggattatcagctgaagcgatcgatcctttgatgcgtcgtgcagcgaagaccatcaatttcggtgttctctacggtatgagtgcctttcgtttgtcgcaggaattaggcattccctatgaagaagctcaggcgttcattcagaaatactttcaaagctatcccaaagttaaagcatggatcgagaagactctccgtgaaggccgcacacgtggttacgtagagaccttatttggacgtcgccgctatgttcccgatttaaacgctcgcgtgaaaggcaagcgtgaagccgccgaacgcatggcgttcaacatgcctgtacagggcacggcagctgacctcatgaaacttgcaatggtgcgcctttttccacaattgcgtgaagttggtgcccgcatgctcttgcaggtccacgatgaactcttgttagaagcgccaaaagagcgtgcggaagaggtggcagccctcgcgaaagaagttatggaaggcgtgtggcccttagcggtgcctcttgaagtcgaagttggtattggtgaggattggctggctgccaaagga

SEQ ID NO: 5164 - protein, 841 aa, synthetic construct
  REGION 1..841: note = Variant of DNA polymerase I from Thermus sp. strain 2.9
MHHHHHHGGSGVLPVFEPKGRVLLVDGHHLAYRNFFALKGLTTSLGEPVQGVYGFAKSLLKALKEDGDVVIVVFDAKAPSFRHEAYEAYKAGRAPTPEDFPRQLALMKELVDLLGLERLEVPGFEADDVLATLAKKAEREGYEVQILTADRDLFQLLSPRISVLHPEGHRITPEWLWEKYGLRPEQWVDFRALAGDPSDNIPGVKGIGEKTALKLLKEWGSLENLLKNLDQVKPESVREKILAHLEDLKLSRELSRVRTDLPLEVDFGRRREPDWEGLKAFLERLEFGSLLHEFGLLESPLLAEEAPWPPPEGAFLGYRLSRPEPMWAELLALAASAQGRVYRAEDPHGALRGLFEVRGLLAKDLAVVALREGLDLPPTDDPMLVAYLLDPSNTTPEGVARRYGGEWTEDAAKRALLAERLHENLLGRLQGEERLLWLYEEVEKPLSRVLAHMEATGVKLDVAYLENLSLEVAAHMRRLEEEVFRLAGRSFRLNSRDQLERVLFDELGLPPIGKTEKTGKRSTSAAVLEALREVHPIVDKILQYREMAKLKGTYIDRLPALVHPKTGRLHTRFNQTATATGRLSSSDPNLQNIPVRTPLGQKIRRAFVAEEGWRLVALDYRQIELRVLAHLSGDENLIRVFQEGKDIHTQTASWMFGLSAEAIDPLMRRAAKTINFGVLYGMSAFRLSQELGIPYEEAQAFIQKYFQSYPKVKAWIEKTLREGRTRGYVETLFGRRRYVPDLNARVKGKREAAERMAFNMPVQGTAADLMKLAMVRLFPQLREVGARMLLQVHDELLLEAPKERAEEVAALAKEVMEGVWPLAVPLEVEVGIGEDWLAAKG

SEQ ID NO: 5165 - DNA, 2523 bp, synthetic construct
  misc_feature 1..2523: note = Variant of DNA polymerase I from Thermus sp. strain 2.9
  source 1..2523: mol_type = other DNA
atgcaccatcatcatcatcatggcggtagcggcgtgttaccggtgttcgagcctaaaggtcgcgtgcttctggttgatggccatcatctcgcgtatcgtaacttctttgccctgaaaggattaaccaccagcctgggcgagccggtacagggtgtctacggctttgcaaagtcgctcctgaaagctctgaaagaagacggtgatgtggtgattgttgtctttgatgcgaaagcgccaagttttcgccacgaagcgtacgaagcttacaaagccgggcgtgctccaacgccggaagactttcctcgccaattggcgcttatgaaggaattagtggatttgcttggcctcgaacgcttggaagttcccggtttcgaggcagacgacgtattagcgactctcgcaaagaaagccgaacgtgagggctatgaagtccagatcttgacagcagatcgcgatcttttccagcttttatctccgcgcatctcggtgttacacccggaagggcatcgtatcaccccggaatggctctgggagaaatatggtttgcgtcccgaacaatgggtggattttcgcgccttagcaggcgatccgagcgacaatattccgggagttaaaggtatcggcgagaagacggcgctcaagctccttaaagaatgggggtcgttggagaacttgcttaagaatttagatcaggtcaaaccagagtcagtgcgtgagaagattcttgctcacctcgaagacctcaaattaagccgcgaattgtcccgtgtacgcaccgatttgccgctcgaagttgatttcggtcgccgccgcgaacctgactgggagggtcttaaagcgtttttagagcgtcttgaatttggttcgctcttgcatgaattcggccttttagaaagcccgttactggccgaagaagcaccttggccaccgcccgagggcgcgtttttaggttaccgtttgagtcgcccggaaccgatgtgggccgaattactggctcttgcagcgtctgcccagggacgtgtgtatcgcgcggaagaccctcatggtgcgctccgcggcctcttcgaagtccgtggactccttgccaaagacttagctgttgttgcattgcgcgaaggtcttgatttacctccgactgatgatccaatgcttcttgcgtacctcttggacccgtcaaacacgacgcccgaaggcgtagcccgtcgttacggcggcgagtggaccgaagatgcagcgaaacgcgcgttattggccgaacgtttgcacgaaaatttattaggacgtttgcaaggcgaggaacgtctcctctggctttacgaagaagtggagaaaccattgagtcgcgtgctcgcgcatatggaagctaccggtgtcaaattagacgtggcgtatttggagaatctcagccttgaagttgctgcccacatgcgccgcttggaggaagaagtattccgtttagcaggccgttcctttcgccttaactctcgcgatcagttagaacgtgtgttgttcgatgaacttggtctccctcctatcggcaagacagagaagaccggtaaacgtagcacttcagcggcggttttagaagctcttcgcgaagtccatcccattgtggacaagatcttgcagtaccgcgaaatggcgaaattgaaaggcacctatattgaccgtcttccggcattagtccacccgaaaacgggacgcctccatacccgcttcaaccaaacagccacggcgaccggtcgtttgtcctcctctgatccaaaccttcagaatattccagtacgtaccccattgggccagaagatccgccgtgcgtttgtagctgaggagggttggcgtttagtggccctcgattatcgtcaaattgaattacgtgtccttgcccatctttctggcgatgagaacctcatccgcgtgtttcaggaaggcaaagacattcacactcaaacggcaagctggatgtttggattatcagctgaagcgatcgatcctttgatgcgtcgtgcagcgaagaccatcaatttcggtgttctctacggtatgagtgcctttcgtttgtcgcaggaattaggcattccctatgaagaagctcaggcgttcattcagaaatactttcaaagctatcccaaagttaaatcgtggatcgagaagactctccgtgaaggccgcacacgtggttacgtagagaccttatttggacgtcgccgctatgttcccgatttaaacgctcgcgtgaaaggcaagcgtgaagccgccgaacgcatggcgttcaacatgcctgtacagggcacggcagctgacctcatgaaacttgcaatggtgcgcctttttccacaattgcgtgaagttggtgcccgcatgctcttgcaggtccacgatgaactcttgttagaagcgccaaaagagcgtgcggaagaggtggcagccctcgcgaaagaagttatggaaggcgtgtggcccttagcggtgcctcttgaagtcgaagttggtattggcgaggattggctggctgccaaagga

SEQ ID NO: 5166 - protein, 841 aa, synthetic construct
  REGION 1..841: note = Variant of DNA polymerase I from Thermus sp. strain 2.9
MHHHHHHGGSGVLPVFEPKGRVLLVDGHHLAYRNFFALKGLTTSLGEPVQGVYGFAKSLLKALKEDGDVVIVVFDAKAPSFRHEAYEAYKAGRAPTPEDFPRQLALMKELVDLLGLERLEVPGFEADDVLATLAKKAEREGYEVQILTADRDLFQLLSPRISVLHPEGHRITPEWLWEKYGLRPEQWVDFRALAGDPSDNIPGVKGIGEKTALKLLKEWGSLENLLKNLDQVKPESVREKILAHLEDLKLSRELSRVRTDLPLEVDFGRRREPDWEGLKAFLERLEFGSLLHEFGLLESPLLAEEAPWPPPEGAFLGYRLSRPEPMWAELLALAASAQGRVYRAEDPHGALRGLFEVRGLLAKDLAVVALREGLDLPPTDDPMLLAYLLDPSNTTPEGVARRYGGEWTEDAAKRALLAERLHENLLGRLQGEERLLWLYEEVEKPLSRVLAHMEATGVKLDVAYLENLSLEVAAHMRRLEEEVFRLAGRSFRLNSRDQLERVLFDELGLPPIGKTEKTGKRSTSAAVLEALREVHPIVDKILQYREMAKLKGTYIDRLPALVHPKTGRLHTRFNQTATATGRLSSSDPNLQNIPVRTPLGQKIRRAFVAEEGWRLVALDYRQIELRVLAHLSGDENLIRVFQEGKDIHTQTASWMFGLSAEAIDPLMRRAAKTINFGVLYGMSAFRLSQELGIPYEEAQAFIQKYFQSYPKVKSWIEKTLREGRTRGYVETLFGRRRYVPDLNARVKGKREAAERMAFNMPVQGTAADLMKLAMVRLFPQLREVGARMLLQVHDELLLEAPKERAEEVAALAKEVMEGVWPLAVPLEVEVGIGEDWLAAKG

SEQ ID NO: 5167 - DNA, 2523 bp, synthetic construct
  misc_feature 1..2523: note = Variant of DNA polymerase I from Thermus sp. strain 2.9
  source 1..2523: mol_type = other DNA
atgcaccatcatcatcatcatggcggtagcggcgtgttaccggtgttcgagcctaaaggtcgcgtgcttctggttgatggccatcatctcgcgtatcgtaacttctttgccctgaaaggattaaccaccagcctgggcgagccggtacagggtgtctacggctttgcaaagtcgctcctgaaagctctgaaagaagacggtgatgtggtgattgttgtctttgatgcgaaagcgccaagttttcgccacgaagcgtacgaagcttacaaagccgggcgtgctccaacgccggaagactttcctcgccaattggcgcttatgaaggaattagtggatttgcttggcctcgaacgcttggaagttcccggtttcgaggcagacgacgtattagcgactctcgcaaagaaagccgaacgtgagggctatgaagtccagatcttgacagcagatcgcgatcttttccagcttttatctccgcgcatctcggtgttacacccggaagggcatcgtatcaccccggaatggctctgggagaaatatggtttgcgtcccgaacaatgggtggattttcgcgccttagcaggcgatccgagcgacaatattccgggagttaaaggtatcggcgagaagacggcgctcaagctccttaaagaatgggggtcgttggagaacttgcttaagaatttagatcaggtcaaaccagagtcagtgcgtgagaagattcttgctcacctcgaagacctcaaattaagccgcgaattgtcccgtgtacgcaccgatttgccgctcgaagttgatttcggccgccgccgcgaacctgactgggagggtcttaaagcgtttttagagcgtcttgaatttggttcgctcttgcatgaattcggccttttagaaagcccgttactggccgaagaagcaccttggccaccgcccgagggcgcgtttttaggttaccgtttgagtcgcccggaaccgatgtgggccgaattactggctcttgcagcgtctgcccagggacgtgtgtatcgcgcggaagaccctcatggtgcgctccgcggcctcttcgaagtccgtggactccttgccaaagacttagctgttgttgcattgcgcgaaggtcttgatttacctccgactgatgatccaatgcttcttgcgtacctcttggacccgtcaaacacgacgcccgaaggcgtagcccgtcgttacggcggcgagtggaccgaagatgcagcgaaacgcgcgttattggccgaacgtttgcacgaaaatttattaggacgtttgcaaggcgaggaacgtctcctctggctttacgaagaagtggagaaaccattgagtcgcgtgctcgcgcatatggaagctaccggtgtcaaattagacgtggcgtatttggagaatcttcaccttgaagttgctgcccacatgcgccgcttggaggaagaagtattccgtttagcaggccgttcctttcgccttaactctcgcgatcagttagaacgtgtgttgttcgatgaacttggtctccctcctatcggcaagacagagaagaccggtaaacgtagcacttcagcggcggttttagaagctcttcgcgaagtccatcccattgtggacaagatcttgcagtaccgcgaaatggcgaaattgaaaggcacctatattgaccgtcttccggcattagtccacccgaaaacgggacgcctccatacccgcttcaaccaaacagccacggcgaccggtcgtttgtcctcctctgatccaaaccttcagaatattccagtacgtaccccattgggccagaagatccgccgtgcgtttgtagctgaggagggttggcgtttagtggccctcgattatcgtcaaattgaattacgtgtccttgcccatctttctggcgatgagaacctcatccgcgtgtttcaggaaggcaaagacattcacactcaaacggcaagctggatgtttggattatcagctgaagcgatcgatcctttgatgcgtcgtgcagcgaagaccatcaatttcggtgttctctacggtatgagtgcctttcgtttgtcgcaggaattaggcattccctatgaagaagctcaggcgttcattcagaaatactttcaaagctatcccaaagttaaagcatggatcgagaagactctccgcgaaggccgcacacgtggttacgtagagaccttatttggacgtcgccgctatgttcccgatttaaacgctcgcgtgaaaagcaaacgtgaagccgccgaacgcatggcgttcaacatgcctgtacagggcacggcagctgacctcatgaaacttgcaatggtgcgcctttttccacaattgcgtgaagttggtgcccgcatgctcttgcaggtccacgatgaactcttgttagaagcgccaaaagagcgtgcggaagaggtggcagccctcgcgaaagaagttatggaaggcgtgtggcccttagcggtgcctcttgaagtcgaagttggtattggcgaggattggctggctgccaaagga

SEQ ID NO: 5168 - protein, 841 aa, synthetic construct
  REGION 1..841: note = Variant of DNA polymerase I from Thermus sp. strain 2.9
MHHHHHHGGSGVLPVFEPKGRVLLVDGHHLAYRNFFALKGLTTSLGEPVQGVYGFAKSLLKALKEDGDVVIVVFDAKAPSFRHEAYEAYKAGRAPTPEDFPRQLALMKELVDLLGLERLEVPGFEADDVLATLAKKAEREGYEVQILTADRDLFQLLSPRISVLHPEGHRITPEWLWEKYGLRPEQWVDFRALAGDPSDNIPGVKGIGEKTALKLLKEWGSLENLLKNLDQVKPESVREKILAHLEDLKLSRELSRVRTDLPLEVDFGRRREPDWEGLKAFLERLEFGSLLHEFGLLESPLLAEEAPWPPPEGAFLGYRLSRPEPMWAELLALAASAQGRVYRAEDPHGALRGLFEVRGLLAKDLAVVALREGLDLPPTDDPMLLAYLLDPSNTTPEGVARRYGGEWTEDAAKRALLAERLHENLLGRLQGEERLLWLYEEVEKPLSRVLAHMEATGVKLDVAYLENLHLEVAAHMRRLEEEVFRLAGRSFRLNSRDQLERVLFDELGLPPIGKTEKTGKRSTSAAVLEALREVHPIVDKILQYREMAKLKGTYIDRLPALVHPKTGRLHTRFNQTATATGRLSSSDPNLQNIPVRTPLGQKIRRAFVAEEGWRLVALDYRQIELRVLAHLSGDENLIRVFQEGKDIHTQTASWMFGLSAEAIDPLMRRAAKTINFGVLYGMSAFRLSQELGIPYEEAQAFIQKYFQSYPKVKAWIEKTLREGRTRGYVETLFGRRRYVPDLNARVKSKREAAERMAFNMPVQGTAADLMKLAMVRLFPQLREVGARMLLQVHDELLLEAPKERAEEVAALAKEVMEGVWPLAVPLEVEVGIGEDWLAAKG

SEQ ID NO: 5169 - DNA, 2523 bp, synthetic construct
  misc_feature 1..2523: note = Variant of DNA polymerase I from Thermus sp. strain 2.9
  source 1..2523: mol_type = other DNA
atgcaccatcatcatcatcatggcggtagcggcgtgttaccggtgttcgagcctaaaggtcgcgtgcttctggttgatggccatcatctcgcgtatcgtaacttctttgccctgaaaggattaaccaccagcctgggcgagccggtacagggtgtctacggctttgcaaagtcgctcctgaaagctctgaaagaagacggtgatgtggtgattgttgtctttgatgcgaaagcgccaagttttcgccacgaagcgtacgaagcttacaaagccgggcgtgctccaacgccggaagactttcctcgccaattggcgcttatgaaggaattagtggatttgcttggcctcgaacgcttggaagttcccggtttcgaggcagacgacgtattagcgactctcgcaaagaaagccgaacgtgagggctatgaagtccagatcttgacagcagatcgcgatcttttccagcttttatctccgcgcatctcggtgttacacccggaagggcatcgtatcaccccggaatggctctgggagaaatatggtttgcgtcccgaacaatgggtggattttcgcgccttagcaggcgatccgagcgacaatattccgggagttaaaggtatcggcgagaagacggcgctcaagctccttaaagaatgggggtcgttggagaacttgcttaagaatttagatcaggtcaaaccagagtcagtgcgtgagaagattcttgctcacctcgaagacctcaaattaagccgcgaattgtcccgtgtacgcaccgatttgccgctcgaagttgatttcggtcgccgccgcgaacctgactgggagggtcttaaagcgtttttagagcgtcttgaatttggttcgctcttgcatgaattcggccttttagaaagcccgttactggccgaagaaccgccttggccaccgcccgagggcgcgtttttaggttaccgtttgagtcgcccggaaccgatgtgggccgaattactggctcttgcagcgtctgcccagggacgtgtgtatcgcgcggaagaccctcatggtgcgctccgcggcctcttcgaagtccgtggactccttgccaaagacttagctgttgttgcattgcgcgaaggtcttgatttacctccgactgatgatccaatgcttcttgcgtacctcttggacccgtcaaacacgacgcccgaaggcgtagcccgtcgttacggcggcgagtggaccgaagatgcagcgaaacgcgcgttattggccgaacgtttgcacgaaaatttattaggacgtttgcaaggcgaggaacgtctcctctggctttacgaagaagtggagaaaccattgagtcgcgtgctcgcgcatatggaagctaccggtgtcaaattagacgtggcgtatttggagaatctcagccttgaagttgctgcccacatgcgccgcttggaggaagaagtattccgtttagcaggccgttcctttcgccttaactctcgcgatcagttagaacgtgtgttgttcgatgaacttggtctccctcctatcggcaagacagagaagaccggtaaacgtagcacttcagcggcggttttagaagctcttcgcgaagtccatcccattgtggacaagatcttgcagtaccgcgaaatggcgaaattgaaaggcacctatattgaccgtcttccggcattagtccacccgaaaacgggacgcctccatacccgcttcaaccaaacagccacggcgaccggtcgtttgtcctcctctgatccaaaccttcagaatattccagtacgtaccccattgggccagaagatccgccgtgcgtttgtagctgaggagggttggcgtttagtggccctcgattatcgtcaaattgaattacgtgtccttgcccatctttctggcgatgagaacctcatccgcgtgtttcaggaaggcaaagacattcacactcaaacggcaagctggatgtttggattatcagctgaagcgatcgatcctttgatgcgtcgtgcagcgaagaccatcaatttcggtgttctctacggtatgagtgcctttcgtttgtcgcaggaattaggcattccctatgaagaagctcaggcgttcattcagaaatactttcaaagctatcccaaagttaaagcatggatcgagaagactctccgtgaaggccgcacacgtggttacgtagagaccttatttggacgtcgccgctatgttcccgatttaaacgctcgcgtgaaaggcaagcgtgaagccgccgaacgcatggcgttcaacatgcctgtacagggcacggcagctgacctcatgaaacttgcaatggtgcgcctttttccacaattgcgtgaagttggtgcccgcatgctcttgcaggtccacgatgaactcttgttagaagcgccaaaagagcgtgcggaagaggtggcagccctcgcgaaagaagttatggaaggcgtgtggcccttagcggtgcctcttgaagtcgaagttggtattggcgaggattggctggctgccaaagga

SEQ ID NO: 5170 - protein, 841 aa, synthetic construct
  REGION 1..841: note = Variant of DNA polymerase I from Thermus sp. strain 2.9
MHHHHHHGGSGVLPVFEPKGRVLLVDGHHLAYRNFFALKGLTTSLGEPVQGVYGFAKSLLKALKEDGDVVIVVFDAKAPSFRHEAYEAYKAGRAPTPEDFPRQLALMKELVDLLGLERLEVPGFEADDVLATLAKKAEREGYEVQILTADRDLFQLLSPRISVLHPEGHRITPEWLWEKYGLRPEQWVDFRALAGDPSDNIPGVKGIGEKTALKLLKEWGSLENLLKNLDQVKPESVREKILAHLEDLKLSRELSRVRTDLPLEVDFGRRREPDWEGLKAFLERLEFGSLLHEFGLLESPLLAEEPPWPPPEGAFLGYRLSRPEPMWAELLALAASAQGRVYRAEDPHGALRGLFEVRGLLAKDLAVVALREGLDLPPTDDPMLLAYLLDPSNTTPEGVARRYGGEWTEDAAKRALLAERLHENLLGRLQGEERLLWLYEEVEKPLSRVLAHMEATGVKLDVAYLENLSLEVAAHMRRLEEEVFRLAGRSFRLNSRDQLERVLFDELGLPPIGKTEKTGKRSTSAAVLEALREVHPIVDKILQYREMAKLKGTYIDRLPALVHPKTGRLHTRFNQTATATGRLSSSDPNLQNIPVRTPLGQKIRRAFVAEEGWRLVALDYRQIELRVLAHLSGDENLIRVFQEGKDIHTQTASWMFGLSAEAIDPLMRRAAKTINFGVLYGMSAFRLSQELGIPYEEAQAFIQKYFQSYPKVKAWIEKTLREGRTRGYVETLFGRRRYVPDLNARVKGKREAAERMAFNMPVQGTAADLMKLAMVRLFPQLREVGARMLLQVHDELLLEAPKERAEEVAALAKEVMEGVWPLAVPLEVEVGIGEDWLAAKG

SEQ ID NO: 5171 - DNA, 2523 bp, synthetic construct
  misc_feature 1..2523: note = Variant of DNA polymerase I from Thermus sp. strain 2.9
  source 1..2523: mol_type = other DNA
atgcaccatcatcatcatcatggcggtagcggcgtgttaccggtgttcgagcctaaaggtcgcgtgcttctggttgatggccatcatctcgcgtatcgtaacttctttgccctgaaaggattaaccaccagcctgggcgagccggtacagggtgtctacggctttgcaaagtcgctcctgaaagctctgaaagaagacggtgatgtggtgattgttgtctttgatgcgaaagcgccaagttttcgccacgaagcgtacgaagcttacaaagccgggcgtgctccaacgccggaagactttcctcgccaattggcgcttatgaaggaattagtggatttgcttggcctcgaacgcttggaagttcccggtttcgaggcagacgacgtattagcgactctcgcaaagaaagccgaacgtgagggctatgaagtccagatcttgacagcagatcgcgatcttttccagcttttatctccgcgcatctcggtgttacacccggaagggcatcgtatcaccccggaatggctctgggagaaatatggtttgcgtcccgaacaatgggtggattttcgcgccttagcaggcgatccgagcgacaatattccgggagttaaaggtatcggcgagaagacggcgctcaagctccttaaagaatgggggtcgttggagaacttgcttaagaatttagatcaggtcaaaccagagtcagtgcgtgagaagattcttgctcacctcgaagacctcaaattaagccgcgaattgtcccgtgtacgcaccgatttgccgctcgaagttgatttcggtcgccgccgcgaacctgactgggagggtcttaaagcgtttttagagcgtcttgaatttggttcgctcttgcatgaattcggccttttagaaagcccgttactggccgaagaagcaccttggccaccgcccgagggcgcgtttttaggttaccgtttgagtcgcccggaaccgatgtgggccgaattactggctcttgcagcgtctgcccagggacgtgtgtatcgcgcggaagaccctcatggtgcgctccgcggcctcttcgaagtccgtggactccttgccaaagacttagctgttgttgcattgcgcgaaggtcttgatttacctccgactgatgatccaatgcttcttgcgtacctcttggacccgtcaaacacgacgcccgaaggcgtagcccgtcgttacggcggcgagtggaccgaagatgcagcgaaacgcgcgttattggccgaacgtttgcacgaaaatttattaggacgtttgcaaggcgaggaacgtctcctctggctttacgaagaagtggagaaaccattgagtcgcgtgctcgcgcatatggaagctaccggtgtcaaattagacgtggcgtatttggagaatctcagccttgaagttgctgcccacatgcgccgcttggaggaagaagtattccgtttagcaggccgttcctttcgccttaactctcgcgatcagttagaacgtgtgttgttcgatgaacttggtctccctcctatcggcaagacagagaagaccggtaaacgtagcacttcagcggcggttttagaagctcttcgcgaagtccatcccattgtggacaagatcttgcagtaccgcgaaatggcgaaattgaaaggcacctatattgaccgtcttccggcattagtccacccgaaaacgggacgcctccatacccgcttcaaccaaacagccacggcgaccggtcgtttgtcctcctctgatccaaaccttcagaatattccagtacgtaccccattgggccagaagatccgccgtgcgtttgtagctgaggagggttggcgtttagtggccctcgattatcgtcaaattgaattacgtgtccttgcccatctttctggcgatgagaacctcatccgcgtgtttcaggaaggcaaagacattcacactcaaacggcaagctggatgtttggattatcagctgaagcgatcgatcctttgatgcgtcgtgcagcgaagaccatcaatttcggtgttctctacggtatgagtgcctttcgtttgtcgcaggaattaggcattccctatgaagaagctcaggcgttcattcagaaatactttcaaagctatcccaaagttaaagcatggatcgagaagactctccgtgaaggccgcacacgtggttacgtagagaccttatttggacgtcgccgctatgttcccttgttaaacgctcgcgtgaaaggcaagcgtgaagccgccgaacgcatggcgttcaacatgcctgtacagggcacggcagctgacctcatgaaacttgcaatggtgcgcctttttccacaattgcgtgaagttggtgcccgcatgctcttgcaggtccacgatgaactcttgttagaagcgccaaaagagcgtgcggaagaggtggcagccctcgcgaaagaagttatggaaggcgtgtggcccttagcggtgcctcttgaagtcgaagttggtattggcgaggattggctggctgccaaagga

SEQ ID NO: 5172 - protein, 841 aa, synthetic construct
  REGION 1..841: note = Variant of DNA polymerase I from Thermus sp. strain 2.9
MHHHHHHGGSGVLPVFEPKGRVLLVDGHHLAYRNFFALKGLTTSLGEPVQGVYGFAKSLLKALKEDGDVVIVVFDAKAPSFRHEAYEAYKAGRAPTPEDFPRQLALMKELVDLLGLERLEVPGFEADDVLATLAKKAEREGYEVQILTADRDLFQLLSPRISVLHPEGHRITPEWLWEKYGLRPEQWVDFRALAGDPSDNIPGVKGIGEKTALKLLKEWGSLENLLKNLDQVKPESVREKILAHLEDLKLSRELSRVRTDLPLEVDFGRRREPDWEGLKAFLERLEFGSLLHEFGLLESPLLAEEAPWPPPEGAFLGYRLSRPEPMWAELLALAASAQGRVYRAEDPHGALRGLFEVRGLLAKDLAVVALREGLDLPPTDDPMLLAYLLDPSNTTPEGVARRYGGEWTEDAAKRALLAERLHENLLGRLQGEERLLWLYEEVEKPLSRVLAHMEATGVKLDVAYLENLSLEVAAHMRRLEEEVFRLAGRSFRLNSRDQLERVLFDELGLPPIGKTEKTGKRSTSAAVLEALREVHPIVDKILQYREMAKLKGTYIDRLPALVHPKTGRLHTRFNQTATATGRLSSSDPNLQNIPVRTPLGQKIRRAFVAEEGWRLVALDYRQIELRVLAHLSGDENLIRVFQEGKDIHTQTASWMFGLSAEAIDPLMRRAAKTINFGVLYGMSAFRLSQELGIPYEEAQAFIQKYFQSYPKVKAWIEKTLREGRTRGYVETLFGRRRYVPLLNARVKGKREAAERMAFNMPVQGTAADLMKLAMVRLFPQLREVGARMLLQVHDELLLEAPKERAEEVAALAKEVMEGVWPLAVPLEVEVGIGEDWLAAKG

SEQ ID NO: 5173 - DNA, 2523 bp, synthetic construct
  misc_feature 1..2523: note = Variant of DNA polymerase I from Thermus sp. strain 2.9
  source 1..2523: mol_type = other DNA
atgcaccatcatcatcatcatggcggtagcggcgtgttaccggtgttcgagcctaaaggtcgcgtgcttctggttgatggccatcatctcgcgtatcgtaacttctttgccctgaaaggattaaccaccagcctgggcgagccggtacagggtgtctacggctttgcaaagtcgctcctgaaagctctgaaagaagacggtgatgtggtgattgttgtctttgatgcgaaagcgccaagttttcgccacgaagcgtacgaagcttacaaagccgggcgtgctccaacgccggaagactttcctcgccaattggcgcttatgaaggaattagtggatttgcttggcctcgaacgcttggaagttcccggtttcgaggcagacgacgtattagcgactctcgcaaagaaagccgaacgtgagggctatgaagtccagatcttgacagcagatcgcgatcttttccagcttttatctccgcgcatctcggtgttacacccggaagggcatcgtatcaccccggaatggctctgggagaaatatggtttgcgtcccgaacaatgggtggattttcgcgccttagcaggcgatccgagcgacaatattccgggagttaaaggtatcggcgagaagacggcgctcaagctccttaaagaatgggggtcgttggagaacttgcttaagaatttagatcaggtcaaaccagagtcagtgcgtgagaagattcttgctcacctcgaagacctcaaattaagccgcgaattgtcccgtgtacgcaccgatttgccgctcgaagttgatttcggtcgccgccgcgaacctgactgggagggtcttaaagcgtttttagagcgtcttgaatttggttcgctcttgcatgaattcggccttttagaaagcccgttactggccgaagaagcaccttggccaccgcccgagggcgcgtttttaggttaccgtttgagtcgcccggaaccgatgtgggccgaattactggctcttgcagcgtctgcccagggacgtgtgtatcgcgcggaagaccctcatggtgcgctccgcggcctcttcgaagtccgtggactccttgccaaagacttagctgttgttgcattgcgcgaaggtcttgatttacctccgactgatgatccaatgcttcttgcgtacctcttggacccgtcaaacacgacgcccgaaggcgtagcccgtcgttacggcggcgagtggaccgaagatgcagcgaaacgcgcgttattggccgaacgtttgcacgaaaatttattaggacgtttgcaaggcgaggaacgtctcctctggctttacgaagaagtggagaaaccattgagtcgcgtgctcgcgcatatggaagctaccggtgtcaaattagacgtggcgtatttggagaatctcagccttgaagttgctgcccacatgcgccgcttggaggaagaagtattccgtttagcaggccgttcctttcgccttaactctcgcgatcagttagaacgtgtgttgttcgatgaacttggtctccctcctatcggcaagacagagaagaccggtaaacgtagcacttcagcggcggttttagaagctcttcgcgaagtccatcccattgtggacaagatcttgcagtaccgcgaaatggcgaaattgaaaggcacctatattgaccgtcttccggcattagtccacccgaaaacgggacgcctccatacccgcttcaaccaaacagccacggcgaccggtcgtttgtcctcctctgatccaaaccttcagaatattccagtacgtaccccattgggccagaagatccgccgtgcgtttgtagctgaggagggttggcgtttagtggccctcgattatcgtcaaattgaattacgtgtccttgcccatctttctggcgatgagaacctcatccgcgtgtttcaggaaggcaaagacattcacactcaaacggcaagctggatgtttggattatcagctgaagcgatcgatcctttgatgcgtcgtgcagcgaagaccatcaatttcggtgttctctacggtatgagtgcctttcgtttgtcgcaggaattaggcattcccctggaagaagctcaggcgttcattcagaaatactttcaaagctatcccaaagttaaagcatggatcgagaagactctccgtgaaggccgcacacgtggttacgtagagaccttatttggacgtcgccgctatgttcccgatttaaacgctcgcgtgaaaggcaagcgtgaagccgccgaacgcatggcgttcaacatgcctgtacagggcacggcagctgacctcatgaaacttgcaatggtgcgcctttttccacaattgcgtgaagttggtgcccgcatgctcttgcaggtccacgatgaactcttgttagaagcgccaaaagagcgtgcggaagaggtggcagccctcgcgaaagaagttatggaaggcgtgtggcccttagcggtgcctcttgaagtcgaagttggtattggcgaggattggctggctgccaaagga

SEQ ID NO: 5174 - protein, 841 aa, synthetic construct
  REGION 1..841: note = Variant of DNA polymerase I from Thermus sp. strain 2.9
MHHHHHHGGSGVLPVFEPKGRVLLVDGHHLAYRNFFALKGLTTSLGEPVQGVYGFAKSLLKALKEDGDVVIVVFDAKAPSFRHEAYEAYKAGRAPTPEDFPRQLALMKELVDLLGLERLEVPGFEADDVLATLAKKAEREGYEVQILTADRDLFQLLSPRISVLHPEGHRITPEWLWEKYGLRPEQWVDFRALAGDPSDNIPGVKGIGEKTALKLLKEWGSLENLLKNLDQVKPESVREKILAHLEDLKLSRELSRVRTDLPLEVDFGRRREPDWEGLKAFLERLEFGSLLHEFGLLESPLLAEEAPWPPPEGAFLGYRLSRPEPMWAELLALAASAQGRVYRAEDPHGALRGLFEVRGLLAKDLAVVALREGLDLPPTDDPMLLAYLLDPSNTTPEGVARRYGGEWTEDAAKRALLAERLHENLLGRLQGEERLLWLYEEVEKPLSRVLAHMEATGVKLDVAYLENLSLEVAAHMRRLEEEVFRLAGRSFRLNSRDQLERVLFDELGLPPIGKTEKTGKRSTSAAVLEALREVHPIVDKILQYREMAKLKGTYIDRLPALVHPKTGRLHTRFNQTATATGRLSSSDPNLQNIPVRTPLGQKIRRAFVAEEGWRLVALDYRQIELRVLAHLSGDENLIRVFQEGKDIHTQTASWMFGLSAEAIDPLMRRAAKTINFGVLYGMSAFRLSQELGIPLEEAQAFIQKYFQSYPKVKAWIEKTLREGRTRGYVETLFGRRRYVPDLNARVKGKREAAERMAFNMPVQGTAADLMKLAMVRLFPQLREVGARMLLQVHDELLLEAPKERAEEVAALAKEVMEGVWPLAVPLEVEVGIGEDWLAAKG

SEQ ID NO: 5175 - DNA, 2523 bp, synthetic construct
  misc_feature 1..2523: note = Variant of DNA polymerase I from Thermus sp. strain 2.9
  source 1..2523: mol_type = other DNA
atgcaccatcatcatcatcatggcggtagcggcgtgttaccggtgttcgagcctaaaggtcgcgtgcttctggttgatggccatcatctcgcgtatcgtaacttctttgccctgaaaggattaaccaccagcctgggcgagccggtacagggtgtctacggctttgcaaagtcgctcctgaaagctctgaaagaagacggtgatgtggtgattgttgtctttgatgcgaaagcgccaagttttcgccacgaagcgtacgaagcttacaaagccgggcgtgctccaacgccggaagactttcctcgccaattggcgcttatgaaggaattagtggatttgcttggcctcgaacgcttggaagttcccggtttcgaggcagacgacgtattagcgactctcgcaaagaaagccgaacgtgagggctatgaagtccagatcttgacagcagatcgcgatcttttccagcttttatctccgcgcatctcggtgttacacccggaagggcatcgtatcaccccggaatggctctgggagaaatatggtttgcgtcccgaacaatgggtggattttcgcgccttagcaggcgatccgagcgacaatattccgggagttaaaggtatcggcgagaagacggcgctcaagctccttaaagaatgggggtcgttggagaacttgcttaagaatttagatcaggtcaaaccagagtcagtgcgtgagaagattcttgctcacctcgaagacctcaaattaagccgcgaattgtcccgtgtacgcaccgatttgccgctcgaagttgatttcggtcgccgccgcgaacctgactgggagggtcttaaagcgtttttagagcgtcttgaatttggttcgctcttgcatgaattcggccttttagaaagcccgttactggccgaagaagcaccttggccaccgcccgagggcgcgtttttaggttaccgtttgagtcgcccggaaccgatgtgggccgaattactggctcttgcagcgtctgcccagggacgtgtgtatcgcgcggaagaccctcatggtgcgctccgcggcctcttcgaagtccgtggactccttgccaaagacttagctgttgttgcattgcgcgaaggtcttgatttacctccgactgatgatccaatgcttcttgcgtacctcttggacccgtcaaacacgacgcccgaaggcgtagcccgtcgttacggcggcgagtggaccgaagatgcaccgaaacgcgcgttattggccgaacgtttgcacgaaaatttattaggacgtttgcaaggcgaggaacgtctcctctggctttacgaagaagtggagaaaccattgagtcgcgtgctcgcgcatatggaagctaccggtgtcaaattagacgtggcgtatttggagaatctcagccttgaagttgctgcccacatgcgccgcttggaggaagaagtattccgtttagcaggccgttcctttcgccttaactctcgcgatcagttagaacgtgtgttgttcgatgaacttggtctccctcctatcggcaagacagagaagaccggtaaacgtagcacttcagcggcggttttagaagctcttcgcgaagtccatcccattgtggacaagatcttgcagtaccgcgaaatggcgaaattgaaaggcacctatattgaccgtcttccggcattagtccacccgaaaacgggacgcctccatacccgcttcaaccaaacagccacggcgaccggtcgtttgtcctcctctgatccaaaccttcagaatattccagtacgtaccccattgggccagaagatccgccgtgcgtttgtagctgaggagggttggcgtttagtggccctcgattatcgtcaaattgaattacgtgtccttgcccatctttctggcgatgagaacctcatccgcgtgtttcaggaaggcaaagacattcacactcaaacggcaagctggatgtttggattatcagctgaagcgatcgatcctttgatgcgtcgtgcagcgaagaccatcaatttcggtgttctctacggtatgagtgcctttcgtttgtcgcaggaattaggcattccctatgaagaagctcaggcgttcattcagaaatactttcaaagctatcccaaagttaaagcatggatcgagaagactctccgtgaaggccgcacacgtggttacgtagagaccttatttggacgtcgccgctatgttcccgatttaaacgctcgcgtgaaaggcaagcgtgaagccgccgaacgcatggcgttcaacatgcctgtacagggcacggcagctgacctcatgaaacttgcaatggtgcgcctttttccacaattgcgtgaagttggtgcccgcatgctcttgcaggtccacgatgaactcttgttagaagcgccaaaagagcgtgcggaagaggtggcagccctcgcgaaagaagttatggaaggcgtgtggcccttagcggtgcctcttgaagtcgaagttggtattggcgaggattggctggctgccaaagga

SEQ ID NO: 5176 - protein, 841 aa, synthetic construct
  REGION 1..841: note = Variant of DNA polymerase I from Thermus sp. strain 2.9
MHHHHHHGGSGVLPVFEPKGRVLLVDGHHLAYRNFFALKGLTTSLGEPVQGVYGFAKSLLKALKEDGDVVIVVFDAKAPSFRHEAYEAYKAGRAPTPEDFPRQLALMKELVDLLGLERLEVPGFEADDVLATLAKKAEREGYEVQILTADRDLFQLLSPRISVLHPEGHRITPEWLWEKYGLRPEQWVDFRALAGDPSDNIPGVKGIGEKTALKLLKEWGSLENLLKNLDQVKPESVREKILAHLEDLKLSRELSRVRTDLPLEVDFGRRREPDWEGLKAFLERLEFGSLLHEFGLLESPLLAEEAPWPPPEGAFLGYRLSRPEPMWAELLALAASAQGRVYRAEDPHGALRGLFEVRGLLAKDLAVVALREGLDLPPTDDPMLLAYLLDPSNTTPEGVARRYGGEWTEDAPKRALLAERLHENLLGRLQGEERLLWLYEEVEKPLSRVLAHMEATGVKLDVAYLENLSLEVAAHMRRLEEEVFRLAGRSFRLNSRDQLERVLFDELGLPPIGKTEKTGKRSTSAAVLEALREVHPIVDKILQYREMAKLKGTYIDRLPALVHPKTGRLHTRFNQTATATGRLSSSDPNLQNIPVRTPLGQKIRRAFVAEEGWRLVALDYRQIELRVLAHLSGDENLIRVFQEGKDIHTQTASWMFGLSAEAIDPLMRRAAKTINFGVLYGMSAFRLSQELGIPYEEAQAFIQKYFQSYPKVKAWIEKTLREGRTRGYVETLFGRRRYVPDLNARVKGKREAAERMAFNMPVQGTAADLMKLAMVRLFPQLREVGARMLLQVHDELLLEAPKERAEEVAALAKEVMEGVWPLAVPLEVEVGIGEDWLAAKG

SEQ ID NO: 5177 - DNA, 2523 bp, synthetic construct
  misc_feature 1..2523: note = Variant of DNA polymerase I from Thermus sp. strain 2.9
  source 1..2523: mol_type = other DNA
atgcaccatcatcatcatcatggcggtagcggcgtgttaccggtgttcgagcctaaaggtcgcgtgcttctggttgatggccatcatctcgcgtatcgtaacttctttgccctgaaaggattaaccaccagcctgggcgagccggtacagggtgtctacggctttgcaaagtcgctcctgaaagctctgaaagaagacggtgatgtggtgattgttgtctttgatgcgaaagcgccaagttttcgccacgaagcgtacgaagcttacaaagccgggcgtgctccaacgccggaagactttcctcgccaattggcgcttatgaaggaattagtggatttgcttggcctcgaacgcttggaagttcccggtttcgaggcagacgacgtattagcgactctcgcaaagaaagccgaacgtgagggctatgaagtccagatcttgacagcagatcgcgatcttttccagcttttatctccgcgcatctcggtgttacacccggaagggcatcgtatcaccccggaatggctctgggagaaatatggtttgcgtcccgaacaatgggtggattttcgcgccttagcaggcgatccgagcgacaatattccgggagttaaaggtatcggcgagaagacggcgctcaagctccttaaagaatgggggtcgttggagaacttgcttaagaatttagatcaggtcaaaccagagtcagtgcgtgagaagattcttgctcacctcgaagacctcaaattaagccgcgaattgtcccgtgtacgcaccgatttgccgctcgaagttgatttcggtcgccgccgcgaacctgactgggagggtcttaaagcgtttttagagcgtcttgaatttggttcgctcttgcatgaattcggccttttagaaagcccgttactggccgaagaagcaccttggccaccgcccgagggcgcgtttttaggttaccgtttgagtcgcccggaaccgatgtgggccgaattactggctcttgcagcgtctgcccagggacgtgtgtatcgcgcggaagaccctcatggtgcgctccgcggcctcttcgaagtccgtggactccttgccaaagacttagctgttgttgcattgcgcgaaggtcttgatttacctccgactgatgatccaatgcttcttgcgtacctcttggacccgtcaaacacgacgcccgaaggcgtagcccgtcgttacggcggcgagtggaccgaagatgcagcgaaacgcgcgttattggccgaacgtttgcacgaaaatttattaggacgtttgcaaggcgaggaacgtctcctctggctttacgaagaagtggagaaaccattgagtcgcgtgctcgcgcatatggaagctaccggtgtcaaattagacgtggcgtatttggagaatctcagccttgaagttgctgcccacatgcgccgcttggaggaagaagtattccgtttagcaggccgttcctttcgccttaactctcgcgatcagttagaacgtgtgttgttcgatgaacttggtctccctcctatcggcaagacagagaagaccggtaaacgtagcacttcagcggcggttttagaagctcttcgcgaagtccatcccattgtggacaagatcttgcagtaccgcgaaatggcgaaattgaaaggcacctatattgaccgtcttccggcattagtccacccgaaaacgggacgcctccatacccgcttcaaccaaacagccacggcgaccggtcgtttgtcctcctctgatccaaaccttcagaatattccagtacgtaccccattgggccagaagatccgccgtgcgtttgtagctgaggagggttggcgtttagtggccctcgattatcgtcaaattgaattacgtgtccttgcccatctttctggcgatgagaacctcatccgcgtgtttcaggaaggcaaagacattcacactcaaacggcaagctggatgtttggattatcagctgaagcgatcgatcctttgatgcgtcgtgcagcgaagaccatcaatttcggtgttctctacggtatgagtgcctttcgtttgtcgcaggaattaggcattccctatgaagaagctcaggcgttcattcagaaatactttcaaagctatcccaaagttaaagcatggatcgagaagactctccgtgaaggccgcacacgtggttacgtagagaccttatttggacgtcgccgctatgttcccgatttaaacgctcgcgtgaaaggcaagcgtgaagccgccgaacgcatggcgttcaacatgcctgtacagggcacggcagctgacctcatgaaacttgcaatggtgcgcctttttccacaattgcgtgaagttggtgcccgcatgctcttgcaggtccacgatgaactcttgttagaagcgccaaaagagcgtgcggaagaggtggcagccctcgcgaaagaagttatggctggcgtgtggcccttagcggtgcctcttgaagtcgaagttggtattggcgaggattggctggctgccaaagga

SEQ ID NO: 5178 - protein, 841 aa, synthetic construct
  REGION 1..841: note = Variant of DNA polymerase I from Thermus sp. strain 2.9
MHHHHHHGGSGVLPVFEPKGRVLLVDGHHLAYRNFFALKGLTTSLGEPVQGVYGFAKSLLKALKEDGDVVIVVFDAKAPSFRHEAYEAYKAGRAPTPEDFPRQLALMKELVDLLGLERLEVPGFEADDVLATLAKKAEREGYEVQILTADRDLFQLLSPRISVLHPEGHRITPEWLWEKYGLRPEQWVDFRALAGDPSDNIPGVKGIGEKTALKLLKEWGSLENLLKNLDQVKPESVREKILAHLEDLKLSRELSRVRTDLPLEVDFGRRREPDWEGLKAFLERLEFGSLLHEFGLLESPLLAEEAPWPPPEGAFLGYRLSRPEPMWAELLALAASAQGRVYRAEDPHGALRGLFEVRGLLAKDLAVVALREGLDLPPTDDPMLLAYLLDPSNTTPEGVARRYGGEWTEDAAKRALLAERLHENLLGRLQGEERLLWLYEEVEKPLSRVLAHMEATGVKLDVAYLENLSLEVAAHMRRLEEEVFRLAGRSFRLNSRDQLERVLFDELGLPPIGKTEKTGKRSTSAAVLEALREVHPIVDKILQYREMAKLKGTYIDRLPALVHPKTGRLHTRFNQTATATGRLSSSDPNLQNIPVRTPLGQKIRRAFVAEEGWRLVALDYRQIELRVLAHLSGDENLIRVFQEGKDIHTQTASWMFGLSAEAIDPLMRRAAKTINFGVLYGMSAFRLSQELGIPYEEAQAFIQKYFQSYPKVKAWIEKTLREGRTRGYVETLFGRRRYVPDLNARVKGKREAAERMAFNMPVQGTAADLMKLAMVRLFPQLREVGARMLLQVHDELLLEAPKERAEEVAALAKEVMAGVWPLAVPLEVEVGIGEDWLAAKG

SEQ ID NO: 5179 - DNA, 2523 bp, synthetic construct
  misc_feature 1..2523: note = Variant of DNA polymerase I from Thermus sp. strain 2.9
  source 1..2523: mol_type = other DNA
atgcaccatcatcatcatcatggcggtagcggcgtgttaccggtgttcgagcctaaaggtcgcgtgcttctggttgatggccatcatctcgcgtatcgtaacttctttgccctgaaaggattaaccaccagcctgggcgagccggtacagggtgtctacggctttgcaaagtcgctcctgaaagctctgaaagaagacggtgatgtggtgattgttgtctttgatgcgaaagcgccaagttttcgccacgaagcgtacgaagcttacaaagccgggcgtgctccaacgccggaagactttcctcgccaattggcgcttatgaaggaattagtggatttgcttggcctcgaacgcttggaagttcccggtttcgaggcagacgacgtattagcgactctcgcaaagaaagccgaacgtgagggctatgaagtccagatcttgacagcagatcgcgatcttttccagcttttatctccgcgcatctcggtgttacacccggaagggcatcgtatcaccccggaatggctctgggagaaatatggtttgcgtcccgaacaatgggtggattttcgcgccttagcaggcgatccgagcgacaatattccgggagttaaaggtatcggcgagaagacggcgctcaagctccttaaagaatgggggtcgttggagaacttgcttaagaatttagatcaggtcaaaccagagtcagtgcgtgagaagattcttgctcacctcgaagacctcaaattaagccgcgaattgtcccgtgtacgcaccgatttgccgctcgaagttgatttcggtcgccgccgcgaacctgactgggagggtcttaaagcgtttttagagcgtcttgaatttggttcgctcttgcatgaattcggccttttagaaagcccgttactggccgaagaagcaccttggccaccgcccgagggcgcgtttttaggttaccgtttgagtcgcccggaaccgatgtgggccgaattactggctcttgcagcgtctgcccagggacgtgtgtatcgcgcggaagaccctcatggtgcgctccgcggcctcttcgaagtccgtggactccttgccaaagacttagctgttgttgcattgcgcgaaggtcttgatttacctccgactgatgatccaatgcttcttgcgtacctcttggacccgtcaaacacgacgcccgaaggcgtagcccgtcgttacggcggcgagtggaccgaagatgcagcgaaacgcgcgttattggccgaacgtttgcacgaaaatttattaggacgtttgcaaggcgaggaacgtctcctctggctttacgaagaagtggagaaaccattgagtcgcgtgctcgcgcatatggaagctaccggtgtcaaattagacgtggcgtatttggagaatctcagccttgaagttgctgcccacatgcgccgcttggaggaagaagtattccgtttagcaggccgttcctttcgccttaactctcgcgatcagttagaacgtgtgttgttcgatgaacttggtctccctcctatcggcaagacagagaagaccggtaaacgtagcacttcagcggcggttttagaagctcttcgcgaagtccatcccattgtggacaagatcttgcagtaccgcgaaatggcgaaattgaaaggcacctatattgaccgtcttccggcattagtccacccgaaaacgggacgcctccatacccgcttcaaccaaacagccacggcgaccggtcgtttgtcctcctctgatccaaaccttcagaatattccagtacgtaccccattgggccagaagatccgccgtgcgtttgtagctgaggagggttggcgtttagtggccctcgattatcgtcaaattgaattacgtgtccttgcccatctttctggcgatgagaacctcatccgcgtgtttcaggaaggcaaagacattcacactcaaacggcaagctggatgtttggattatcagctgaagcgatcgatcctttgatgcgtcgtgcagcgaagaccatcaatttcggtgttctctacggtatgagtgcctttcgtttgtcgcaggaattaggcattccctatgaagaagctcaggcgttcattcagaaatactttcaagggtatcccaaagttaaagcatggatcgagaagactctccgtgaaggccgcacacgtggttacgtagagaccttatttggacgtcgccgctatgttcccgatttaaacgctcgcgtgaaaggcaagcgtgaagccgccgaacgcatggcgttcaacatgcctgtacagggcacggcagctgacctcatgaaacttgcaatggtgcgcctttttccacaattgcgtgaagttggtgcccgcatgctcttgcaggtccacgatgaactcttgttagaagcgccaaaagagcgtgcggaagaggtggcagccctcgcgaaagaagttatggaaggcgtgtggcccttagcggtgcctcttgaagtcgaagttggtattggcgaggattggctggctgccaaagga

SEQ ID NO: 5180 - protein, 841 aa, synthetic construct
  REGION 1..841: note = Variant of DNA polymerase I from Thermus sp. strain 2.9
MHHHHHHGGSGVLPVFEPKGRVLLVDGHHLAYRNFFALKGLTTSLGEPVQGVYGFAKSLLKALKEDGDVVIVVFDAKAPSFRHEAYEAYKAGRAPTPEDFPRQLALMKELVDLLGLERLEVPGFEADDVLATLAKKAEREGYEVQILTADRDLFQLLSPRISVLHPEGHRITPEWLWEKYGLRPEQWVDFRALAGDPSDNIPGVKGIGEKTALKLLKEWGSLENLLKNLDQVKPESVREKILAHLEDLKLSRELSRVRTDLPLEVDFGRRREPDWEGLKAFLERLEFGSLLHEFGLLESPLLAEEAPWPPPEGAFLGYRLSRPEPMWAELLALAASAQGRVYRAEDPHGALRGLFEVRGLLAKDLAVVALREGLDLPPTDDPMLLAYLLDPSNTTPEGVARRYGGEWTEDAAKRALLAERLHENLLGRLQGEERLLWLYEEVEKPLSRVLAHMEATGVKLDVAYLENLSLEVAAHMRRLEEEVFRLAGRSFRLNSRDQLERVLFDELGLPPIGKTEKTGKRSTSAAVLEALREVHPIVDKILQYREMAKLKGTYIDRLPALVHPKTGRLHTRFNQTATATGRLSSSDPNLQNIPVRTPLGQKIRRAFVAEEGWRLVALDYRQIELRVLAHLSGDENLIRVFQEGKDIHTQTASWMFGLSAEAIDPLMRRAAKTINFGVLYGMSAFRLSQELGIPYEEAQAFIQKYFQGYPKVKAWIEKTLREGRTRGYVETLFGRRRYVPDLNARVKGKREAAERMAFNMPVQGTAADLMKLAMVRLFPQLREVGARMLLQVHDELLLEAPKERAEEVAALAKEVMEGVWPLAVPLEVEVGIGEDWLAAKG

SEQ ID NO: 5181 - DNA, 2523 bp, synthetic construct
  misc_feature 1..2523: note = Variant of DNA polymerase I from Thermus sp. strain 2.9
  source 1..2523: mol_type = other DNA
atgcaccatcatcatcatcatggcggtagcggcgtgttaccggtgttcgagcctaaaggtcgcgtgcttctggttgatggccatcatctcgcgtatcgtaacttctttgccctgaaaggattaaccaccagcctgggcgagccggtacagggtgtctacggctttgcaaagtcgctcctgaaagctctgaaagaagacggtgatgtggtgattgttgtctttgatgcgaaagcgccaagttttcgccacgaagcgtacgaagcttacaaagccgggcgtgctccaacgccggaagactttcctcgccaattggcgcttatgaaggaattagtggatttgcttggcctcgaacgcttggaagttcccggtttcgaggcagacgacgtattagcgactctcgcaaagaaagccgaacgtgagggctatgaagtccagatcttgacagcagatcgcgatcttttccagcttttatctccgcgcatctcggtgttacacccggaagggcatcgtatcaccccggaatggctctgggagaaatatggtttgcgtcccgaacaatgggtggattttcgcgccttagcaggcgatccgagcgacaatattccgggagttaaaggtatcggcgagaagacggcgctcaagctccttaaagaatgggggtcgttggagaacttgcttaagaatttagatcaggtcaaaccagagtcagtgcgtgagaagattcttgctcacctcgaagacctcaaattaagccgcgaattgtcccgtgtacgcaccgatttgccgctcgaagttgatttcggtcgccgccgcgaacctgactgggagggtcttaaagcgtttttagagcgtcttgaatttggttcgctcttgcatgaattcggccttttagaaagcccgttactggccgaagaagcaccttggccaccgcccgagggcgcgtttttaggttaccgtttgagtcgcccggaaccgatgtgggccgaattactggctcttgcagcgtctgcccagggacgtgtgtatcgcgcggaagaccctcatggtgcgctccgcggcctcttcgaagtccgtggactccttgccaaagacttagctgttgttgcattgcgcgaaggtcttgatttacctccgactgatgatccaatgcttcttgcgtacctcttggacccgtcaaacacgacgcccgaaggcgtagcccgtcgttacggcggcgagtggaccgaagatgcagcgaaacgcgcgttattggccgaacgtttgcacgaaaatttattaggacgtttgcaaggcgaggaacgtctcctctggctttacgaagaagtggagaaaccattgagtcgcgtgctcgcgcatatggaagctaccggtgtcaaattagacgtggcgtatttggagaatctcagccttgaagttgctgcccacatgcgccgcttggaggaagaagtattccgtttagcaggccgttcctttcgccttaactctcgcgatcagttagaacgtgtgttgttcgatgaacttggtctccctcctatcggcaagacagagaagaccggtaaacgtagcacttcagcggcggttttagaagctcttcgcgaagtccatcccattgtggacaagatcttgcagtaccgcgaaatggcgaaattgaaaggcacctatattgaccgtcttccggcattagtccacccgaaaacgggacgcctccatacccgcttcaaccaaacagccacggcgaccggtcgtttgtcctcctctgatccaaaccttcagaatattccagtacgtaccccattgggccagaagatccgccgtgcgtttgtagctgaggagggttggcgtttagtggccctcgattatcgtcaaattgaattacgtgtccttgcccatctttctggcgatgagaacctcatccgcgtgtttcaggaaggcaaagacattcacactcaaacggcaagctggatgtttggattatcagctgaagcgatcgatcctttgatgcgtcgtgcagcgaagaccatcaatttcggtgttctctacggtatgagtgcctttcgtttgtcgcaggaattaggcattccctatgaagaagctcagaggttcattcagaaatactttcaaagctatcccaaagttaaagcatggatcgagaagactctccgtgaaggccgcacacgtggttacgtagagaccttatttggacgtcgccgctatgttcccgatttaaacgctcgcgtgaaaggcaagcgtgaagccgccgaacgcatggcgttcaacatgcctgtacagggcacggcagctgacctcatgaaacttgcaatggtgcgcctttttccacaattgcgtgaagttggtgcccgcatgctcttgcaggtccacgatgaactcttgttagaagcgccaaaagagcgtgcggaagaggtggcagccctcgcgaaagaagttatggaaggcgtgtggcccttagcggtgcctcttgaagtcgaagttggtattggcgaggattggctggctgccaaagga

SEQ ID NO: 5182 - protein, 841 aa, synthetic construct
  REGION 1..841: note = Variant of DNA polymerase I from Thermus sp. strain 2.9
MHHHHHHGGSGVLPVFEPKGRVLLVDGHHLAYRNFFALKGLTTSLGEPVQGVYGFAKSLLKALKEDGDVVIVVFDAKAPSFRHEAYEAYKAGRAPTPEDFPRQLALMKELVDLLGLERLEVPGFEADDVLATLAKKAEREGYEVQILTADRDLFQLLSPRISVLHPEGHRITPEWLWEKYGLRPEQWVDFRALAGDPSDNIPGVKGIGEKTALKLLKEWGSLENLLKNLDQVKPESVREKILAHLEDLKLSRELSRVRTDLPLEVDFGRRREPDWEGLKAFLERLEFGSLLHEFGLLESPLLAEEAPWPPPEGAFLGYRLSRPEPMWAELLALAASAQGRVYRAEDPHGALRGLFEVRGLLAKDLAVVALREGLDLPPTDDPMLLAYLLDPSNTTPEGVARRYGGEWTEDAAKRALLAERLHENLLGRLQGEERLLWLYEEVEKPLSRVLAHMEATGVKLDVAYLENLSLEVAAHMRRLEEEVFRLAGRSFRLNSRDQLERVLFDELGLPPIGKTEKTGKRSTSAAVLEALREVHPIVDKILQYREMAKLKGTYIDRLPALVHPKTGRLHTRFNQTATATGRLSSSDPNLQNIPVRTPLGQKIRRAFVAEEGWRLVALDYRQIELRVLAHLSGDENLIRVFQEGKDIHTQTASWMFGLSAEAIDPLMRRAAKTINFGVLYGMSAFRLSQELGIPYEEAQRFIQKYFQSYPKVKAWIEKTLREGRTRGYVETLFGRRRYVPDLNARVKGKREAAERMAFNMPVQGTAADLMKLAMVRLFPQLREVGARMLLQVHDELLLEAPKERAEEVAALAKEVMEGVWPLAVPLEVEVGIGEDWLAAKG

SEQ ID NO: 5183 - DNA, 2523 bp, synthetic construct
  misc_feature 1..2523: note = Variant of DNA polymerase I from Thermus sp. strain 2.9
  source 1..2523: mol_type = other DNA
atgcaccatcatcatcatcatggcggtagcggcgtgttaccggtgttcgagcctaaaggtcgcgtgcttctggttgatggccatcatctcgcgtatcgtaacttctttgccctgaaaggattaaccaccagcctgggcgagccggtacagggtgtctacggctttgcaaagtcgctcctgaaagctctgaaagaagacggtgatgtggtgattgttgtctttgatgcgaaagcgccaagttttcgccacgaagcgtacgaagcttacaaagccgggcgtgctccaacgccggaagactttcctcgccaattggcgcttatgaaggaattagtggatttgcttggcctcgaacgcttggaagttcccggtttcgaggcagacgacgtattagcgactctcgcaaagaaagccgaacgtgagggctatgaagtccagatcttgacagcagatcgcgatcttttccagcttttatctccgcgcatctcggtgttacacccggaagggcatcgtatcaccccggaatggctctgggagaaatatggtttgcgtcccgaacaatgggtggattttcgcgccttagcaggcgatccgagcgacaatattccgggagttaaaggtatcggcgagaagacggcgctcaagctccttaaagaatgggggtcgttggagaacttgcttaagaatttagatcaggtcaaaccagagtcagtgcgtgagaagattcttgctcacctcgaagacctcaaattaagccgcgaattgtcccgtgtacgcaccgatttgccgctcgaagttgatttcggtcgccgccgcgaacctgactgggagggtcttaaagcgtttttagagcgtcttgaatttggttcgctcttgcatgaattcggccttttagaaagcccgttactggccgaagaagcaccttggccaccgcccgagggcgcgtttttaggttaccgtttgagtcgcccggaaccgatgtgggccgaattactggctcttgcagcgtctgcccagggacgtgtgtatcgcgcggaagaccctcatggtgcgctccgcggcctcttcgaagtccgtggactccttgccaaagacttagctgttgttgcattgcgcgaaggtcttgatttacctccgactgatgatccaatgcttcttgcgtacctcttggacccgtcaaacacgacgcccgaaggcgtagcccgtcgttacggcggcgagtggaccgaagatgcagcgaaacgcgcgttattggccgaacgtttgcacgaaaatttattaggacgtttgcaaggcgaggaacgtctcctctggctttacgaagaagtggagaaaccattgagtcgcgtgctcgcgcatatggaagctaccggtgtcaaattagacgtggcgtatttggagaatctcagccttgaagttgctgcccacatgcgccgcttggaggaagaagtattccgtttagcaggccgttcctttcgccttaactctcgcgatcagttagaacgtgtgttgttcgatgaacttggtctccctcctatcggcaagacagagaagaccggtaaacgtagcacttcagcggcggttttagaagctcttcgcgaagtccatcccattgtggacaagatcttgcagtaccgcgaaatggcgaaattgaaaggcacctatattgaccgtcttccggcattagtccacccgaaaacgggacgcctccatacccgcttcaaccaaacagccacggcgaccggtcgtttgtcctcctctgatccaaaccttcagaatattccagtacgtaccccattgggccagaagatccgccgtgcgtttgtagctgaggagggttggcgtttagtggccctcgattatcgtcaaattgaattacgtgtccttgcccatctttctggcgatgagaacctcatccgcgtgtttcaggaaggcaaagacattcacactcaaacggcaagctggatgtttggattatcagctgaagcgatcgatcctttgatgcgtcgtgcagcgaagaccatcaatttcggtgttctctacggtatgagtgcctttcgtttgtcgcaggaattaggcattccctatgaagaagctcaggcgttcattcagaaatactttcaaagctatcccaaagttaaagcatggatcgagaagactctccgtgaaggccgcacacgtggttacgtagagaccttatttggacgtcgccgctatgttcccgatttaaacgctcgcgtgaaaggcaagcgtgaagccgccgaacgcatggcgttcaacatgcctgtacagggcacggcagctgacctcatgaaacttgcaatggtgcgcctttttccacaattgcgtgaagttggtgcctggatgctcttgcaggtccacgatgaactcttgttagaagcgccaaaagagcgtgcggaagaggtggcagccctcgcgaaagaagttatggaaggcgtgtggcccttagcggtgcctcttgaagtcgaagttggtattggcgaggattggctggctgccaaagga

SEQ ID NO: 5184 - protein, 841 aa, synthetic construct
  REGION 1..841: note = Variant of DNA polymerase I from Thermus sp. strain 2.9
MHHHHHHGGSGVLPVFEPKGRVLLVDGHHLAYRNFFALKGLTTSLGEPVQGVYGFAKSLLKALKEDGDVVIVVFDAKAPSFRHEAYEAYKAGRAPTPEDFPRQLALMKELVDLLGLERLEVPGFEADDVLATLAKKAEREGYEVQILTADRDLFQLLSPRISVLHPEGHRITPEWLWEKYGLRPEQWVDFRALAGDPSDNIPGVKGIGEKTALKLLKEWGSLENLLKNLDQVKPESVREKILAHLEDLKLSRELSRVRTDLPLEVDFGRRREPDWEGLKAFLERLEFGSLLHEFGLLESPLLAEEAPWPPPEGAFLGYRLSRPEPMWAELLALAASAQGRVYRAEDPHGALRGLFEVRGLLAKDLAVVALREGLDLPPTDDPMLLAYLLDPSNTTPEGVARRYGGEWTEDAAKRALLAERLHENLLGRLQGEERLLWLYEEVEKPLSRVLAHMEATGVKLDVAYLENLSLEVAAHMRRLEEEVFRLAGRSFRLNSRDQLERVLFDELGLPPIGKTEKTGKRSTSAAVLEALREVHPIVDKILQYREMAKLKGTYIDRLPALVHPKTGRLHTRFNQTATATGRLSSSDPNLQNIPVRTPLGQKIRRAFVAEEGWRLVALDYRQIELRVLAHLSGDENLIRVFQEGKDIHTQTASWMFGLSAEAIDPLMRRAAKTINFGVLYGMSAFRLSQELGIPYEEAQAFIQKYFQSYPKVKAWIEKTLREGRTRGYVETLFGRRRYVPDLNARVKGKREAAERMAFNMPVQGTAADLMKLAMVRLFPQLREVGAWMLLQVHDELLLEAPKERAEEVAALAKEVMEGVWPLAVPLEVEVGIGEDWLAAKG

SEQ ID NO: 5185 - DNA, 2523 bp, synthetic construct
  misc_feature 1..2523: note = Variant of DNA polymerase I from Thermus sp. strain 2.9
  source 1..2523: mol_type = other DNA
atgcaccatcatcatcatcatggcggtagcggcgtgttaccggtgttcgagcctaaaggtcgcgtgcttctggttgatggccatcatctcgcgtatcgtaacttctttgccctgaaaggattaaccaccagcctgggcgagccggtacagggtgtctacggctttgcaaagtcgctcctgaaagctctgaaagaagacggtgatgtggtgattgttgtctttgatgcgaaagcgccaagttttcgccacgaagcgtacgaagcttacaaagccgggcgtgctccaacgccggaagactttcctcgccaattggcgcttatgaaggaattagtggatttgcttggcctcgaacgcttggaagttcccggtttcgaggcagacgacgtattagcgactctcgcaaagaaagccgaacgtgagggctatgaagtccagatcttgacagcagatcgcgatcttttccagcttttatctccgcgcatctcggtgttacacccggaagggcatcgtatcaccccggaatggctctgggagaaatatggtttgcgtcccgaacaatgggtggattttcgcgccttagcaggcgatccgagcgacaatattccgggagttaaaggtatcggcgagaagacggcgctcaagctccttaaagaatgggggtcgttggagaacttgcttaagaatttagatcaggtcaaaccagagtcagtgcgtgagaagattcttgctcacctcgaagacctcaaattaagccgcgaattgtcccgtgtacgcaccgatttgccgctcgaagttgatttcggtcgccgccgcgaacctgactgggagggtcttaaagcgtttttagagcgtcttgaatttggttcgctcttgcatgaattcggccttttagaaagcccgttactggccgaagaagcaccttggccaccgcccgagggcgcgtttttaggttaccgtttgagtcgcccggaaccgatgtgggccgaattactggctcttgcagcgtctgcccagggacgtgtgtatcgcgcggaagaccctcatggtgcgctccgcggcctcttcgaagtccgtggactccttgccaaagacttagctgttgttgcattgcgcgaaggtcttgatttacctccgactgatgatccaatgcttcttgcgtacctcttggacccgtcaaacacgacgcccgaaggcgtagcccgtcgttacggcggcgagtggaccgaagatgcagcgaaacgcgcgttattggccgaacgtttgcacgaaaatttattaggacgtttgcaaggcgaggaacgtctcctctggctttacgaagaagtggagaaaccattgagtcgcgtgctcgcgcatatggaagctaccggtgtcaaattagacgtggcgtatttggagaatctcagccttgaagttgctgcccacatgcgccgcttggaggaagaagtattccgtttagcaggccgttcctttcgccttaactctcgcgatcagttagaacgtgtgttgttcgatgaacttggtctccctcctatcggcaagacagagaagaccggtaaacgtagcacttcagcggcggttttagaagctcttcgcgaagtccatcccattgtggacaagatcttgcagtaccgcgaaatggcgaaattgaaaggcacctatattgaccgtcttccggcattagtccacccgaaaacgggacgcctccatacccgcttcaaccaaacagccacggcgaccggtcgtttgtcctcctctgatccaaaccttcagaatattccagtacgtaccccattgggccagaagatccgccgtgcgtttgtagctgaggagggttggcgtttagtggccctcgattatcgtcaaattgaattacgtgtccttgcccatctttctggcgatgagaacctcatccgcgtgtttcaggaaggcaaagacattcacactcaaacggcaagctggatgtttggattatcagctgaagcgatcgatcctttgatgcgtcgtgcagcgaagaccatcaatttcggtgttctctacggtatgagtgcctttcgtttgtcgcaggaattaggcattccctatgaagaagctcaggcgttcattcagaaatactttcaaagctatcccaaagttaaagcatggatcgagaagactctccgtgaaggccgcacacgtggttacgtagagaccttatttggacgtcgccgctatgttcccgatttaaactcgcgcgtgaaaggcaagcgtgaagccgccgaacgcatggcgttcaacatgcctgtacagggcacggcagctgacctcatgaaacttgcaatggtgcgcctttttccacaattgcgtgaagttggtgcccgcatgctcttgcaggtccacgatgaactcttgttagaagcgccaaaagagcgtgcggaagaggtggcagccctcgcgaaagaagttatggaaggcgtgtggcccttagcggtgcctcttgaagtcgaagttggtattggcgaggattggctggctgccaaagga

SEQ ID NO: 5186 - protein, 841 aa, synthetic construct
  REGION 1..841: note = Variant of DNA polymerase I from Thermus sp. strain 2.9
MHHHHHHGGSGVLPVFEPKGRVLLVDGHHLAYRNFFALKGLTTSLGEPVQGVYGFAKSLLKALKEDGDVVIVVFDAKAPSFRHEAYEAYKAGRAPTPEDFPRQLALMKELVDLLGLERLEVPGFEADDVLATLAKKAEREGYEVQILTADRDLFQLLSPRISVLHPEGHRITPEWLWEKYGLRPEQWVDFRALAGDPSDNIPGVKGIGEKTALKLLKEWGSLENLLKNLDQVKPESVREKILAHLEDLKLSRELSRVRTDLPLEVDFGRRREPDWEGLKAFLERLEFGSLLHEFGLLESPLLAEEAPWPPPEGAFLGYRLSRPEPMWAELLALAASAQGRVYRAEDPHGALRGLFEVRGLLAKDLAVVALREGLDLPPTDDPMLLAYLLDPSNTTPEGVARRYGGEWTEDAAKRALLAERLHENLLGRLQGEERLLWLYEEVEKPLSRVLAHMEATGVKLDVAYLENLSLEVAAHMRRLEEEVFRLAGRSFRLNSRDQLERVLFDELGLPPIGKTEKTGKRSTSAAVLEALREVHPIVDKILQYREMAKLKGTYIDRLPALVHPKTGRLHTRFNQTATATGRLSSSDPNLQNIPVRTPLGQKIRRAFVAEEGWRLVALDYRQIELRVLAHLSGDENLIRVFQEGKDIHTQTASWMFGLSAEAIDPLMRRAAKTINFGVLYGMSAFRLSQELGIPYEEAQAFIQKYFQSYPKVKAWIEKTLREGRTRGYVETLFGRRRYVPDLNSRVKGKREAAERMAFNMPVQGTAADLMKLAMVRLFPQLREVGARMLLQVHDELLLEAPKERAEEVAALAKEVMEGVWPLAVPLEVEVGIGEDWLAAKG

SEQ ID NO: 5187 - DNA, 2523 bp, synthetic construct
  misc_feature 1..2523: note = Variant of DNA polymerase I from Thermus sp. strain 2.9
  source 1..2523: mol_type = other DNA
atgcaccatcatcatcatcatggcggtagcggcgtgttaccggtgttcgagcctaaaggtcgcgtgcttctggttgatggccatcatctcgcgtatcgtaacttctttgccctgaaaggattaaccaccagcctgggcgagccggtacagggtgtctacggctttgcaaagtcgctcctgaaagctctgaaagaagacggtgatgtggtgattgttgtctttgatgcgaaagcgccaagttttcgccacgaagcgtacgaagcttacaaagccgggcgtgctccaacgccggaagactttcctcgccaattggcgcttatgaaggaattagtggatttgcttggcctcgaacgcttggaagttcccggtttcgaggcagacgacgtattagcgactctcgcaaagaaagccgaacgtgagggctatgaagtccagatcttgacagcagatcgcgatcttttccagcttttatctccgcgcatctcggtgttacacccggaagggcatcgtatcaccccggaatggctctgggagaaatatggtttgcgtcccgaacaatgggtggattttcgcgccttagcaggcgatccgagcgacaatattccgggagttaaaggtatcggcgagaagacggcgctcaagctccttaaagaatgggggtcgttggagaacttgcttaagaatttagatcaggtcaaaccagagtcagtgcgtgagaagattcttgctcacctcgaagacctcaaattaagccgcgaattgtcccgtgtacgcaccgatttgccgctcgaagttgatttcggccgccgccgcgaacctgactgggagggtcttaaagcgtttttagagcgtcttgaatttggttcgctcttgcatgaattcggccttttagaaagcccgttactggccgaagaagcaccttggccaccgcccgagggcgcgtttttaggttaccgtttgagtcgcccggaaccgatgtgggccgaattactggctcttgcagcgtctgcccagggacgtgtgtatcgcgcggaagaccctcatggtgcgctccgcggcctcttcgaagtccgtggactccttgccaaagacttagctgttgttgcattgcgcgaaggtcttgatttacctccgactgatgatccaatgcttcttgcgtacctcttggacccgtcaaacacgacgcccgaaggcgtagcccgtcgttacggcggcgagtggaccgaagatgcagcgaaacgcgcgttattggccgaacgtttgcacgaaaatttattaggacgtttgcaaggcgaggaacgtctcctctggctttacgaagaagtggagaaaccattgagtcgcgtgctcgcgcatatggaagctaccggtgtcaaattagacgtggcgtatttggagaatcttcaccttgaagttgctgccgaaatgcgccgcttggaggaagaagtattccgtttagcaggccgctcctttcgccttaactctcgcgatcagttagaacgtgtgttgttcgatgaacttggtctccctcctatcggcaagacagagaagaccggtaaacgtagcacttcagcggcggttttagaagctcttcgcgaagtccatcccattgtggacaagatcttgcagtaccgcgaaatggcgaaattgaaaggcacctatattgaccgtcttccggcattagtccacccgaaaacgggacgcctccatacccgcttcaaccaaacagccacggcgaccggtcgtttgtcctcctctgatccaaaccttcagaatattccagtacgtaccccattgggccagaagatccgccgtgcgtttgtagctgaggagggttggcgtttagtggccctcgattatcgtcaaattgaattacgtgtccttgcccatctttctggcgatgagaacctcatccgcgtgtttcaggaaggcaaagacattcacactcaaacggcaagctggatgtttggattatcagctgaagcgatcgatcctttgatgcgtcgtgcagcgaagaccatcaatttcggtgttctctacggtatgagtgcctttcgtttgtcgcaggaattaggcattccctatgaagaagctcaggcgttcattcagaaatactttcaaagctatcccaaagttaaagcatggatcgagaagactctccgcgaaggccgcacacgtggttacgtagagaccttatttggacgtcgccgctatgttcccgatttaaacgctcgcgtgaaaggcgtacgtgaagccgccgaacgcatggcgttcaacatgcctgtacagggcacggcagctgacctcatgaaacttgcaatggtgcgcctttttccacaattgcgtgaagttggtgcccgcatgctcttgcaggtccacgatgaactcttgttagaagcgccaaaagagcgtgcggaagaggtggcagccctcgcgaaagaagttatggaaggcgtgtggcccttagcggtgcctcttgaagtcgaagttggtattggcgaggattggctggctgccaaagga

SEQ ID NO: 5188 - protein, 841 aa, synthetic construct
  REGION 1..841: note = Variant of DNA polymerase I from Thermus sp. strain 2.9
MHHHHHHGGSGVLPVFEPKGRVLLVDGHHLAYRNFFALKGLTTSLGEPVQGVYGFAKSLLKALKEDGDVVIVVFDAKAPSFRHEAYEAYKAGRAPTPEDFPRQLALMKELVDLLGLERLEVPGFEADDVLATLAKKAEREGYEVQILTADRDLFQLLSPRISVLHPEGHRITPEWLWEKYGLRPEQWVDFRALAGDPSDNIPGVKGIGEKTALKLLKEWGSLENLLKNLDQVKPESVREKILAHLEDLKLSRELSRVRTDLPLEVDFGRRREPDWEGLKAFLERLEFGSLLHEFGLLESPLLAEEAPWPPPEGAFLGYRLSRPEPMWAELLALAASAQGRVYRAEDPHGALRGLFEVRGLLAKDLAVVALREGLDLPPTDDPMLLAYLLDPSNTTPEGVARRYGGEWTEDAAKRALLAERLHENLLGRLQGEERLLWLYEEVEKPLSRVLAHMEATGVKLDVAYLENLHLEVAAEMRRLEEEVFRLAGRSFRLNSRDQLERVLFDELGLPPIGKTEKTGKRSTSAAVLEALREVHPIVDKILQYREMAKLKGTYIDRLPALVHPKTGRLHTRFNQTATATGRLSSSDPNLQNIPVRTPLGQKIRRAFVAEEGWRLVALDYRQIELRVLAHLSGDENLIRVFQEGKDIHTQTASWMFGLSAEAIDPLMRRAAKTINFGVLYGMSAFRLSQELGIPYEEAQAFIQKYFQSYPKVKAWIEKTLREGRTRGYVETLFGRRRYVPDLNARVKGVREAAERMAFNMPVQGTAADLMKLAMVRLFPQLREVGARMLLQVHDELLLEAPKERAEEVAALAKEVMEGVWPLAVPLEVEVGIGEDWLAAKG

SEQ ID NO: 5189 - DNA, 2523 bp, synthetic construct
  misc_feature 1..2523: note = Variant of DNA polymerase I from Thermus sp. strain 2.9
  source 1..2523: mol_type = other DNA
atgcaccatcatcatcatcatggcggtagcggcgtgttaccggtgttcgagcctaaaggtcgcgtgcttctggttgatggccatcatctcgcgtatcgtaacttctttgccctgaaaggattaaccaccagccgcggcgagccggtacagggtgtctacggctttgcaaagtcgctcctgaaagctctgaaagaagacggtgatgtggtgattgttgtctttgatgcgaaagcgccaagttttcgccacgaagcgtacgaagcttacaaagccgggcgtgctccaacgccggaagactttcctcgccaattggcgcttatgaaggaattagtggatttgcttggcctcgaacgcttggaagttcccggtttcgaggcagacgacgtattagcgactctcgcaaagaaagccgaacgtgagggctatgaagtccagatcttgacagcagatcgcgatcttttccagcttttatctccgcgcatctcggtgttacacccggaagggcatcgtatcaccccggaatggctctgggagaaatatggtttgcgtcccgaacaatgggtggattttcgcgccttagcaggcgatccgagcgacaatattccgggagttaaaggtatcggcgagaagacggcgctcaagctccttaaagaatgggggtcgttggagaacttgcttaagaatttagatcaggtcaaaccagagtcagtgcgtgagaagattcttgctcacctcgaagacctcaaattaagccgcgaattgtcccgtgtacgcaccgatttgccgctcgaagttgatttccgccgccgccgcgaacctgactgggagggtcttaaagcgtttttagagcgtcttgaatttggttcgctcttgcatgaattcggccttttagaaagcccgttactggccgaagaagcaccttggccaccgcccgagggcgcgtttttaggttaccgtttgagtcgcccggaaccgatgtgggccgaattactggctcttgcagcgtctgcccagggacgtgtgtatcgcgcggaagaccctcatggtgcgctccgcggcctcttcgaagtccgtggactccttgccaaagacttagctgttgttgcattgcgcgaaggtcttgatttacctccgactgatgatccaatgcttcttgcgtacctcttggacccgtcaaacacgacgcccgaaggcgtagcccgtcgttacggcggcgagtggaccgaagatgcagcgaaacgcgcgttattggccgaacgtttgcacgaaaatttattaggacgtttgcaaggcgaggaacgtctcctctggctttacgaagaagtggagaaaccattgagtcgcgtgctcgcgcatatggaagctaccggtgtcaaattagacgtggcgtatttggagaatctcagccttgaagttgctgccgaaatgcgccgcttggaggaagaagtattccgtttagcaggccgttcctttcgccttaactctcgcgatcagttagaacgtgtgttgttcgatgaacttggtctccctcctatcggcaagacagagaagaccggtaaacgtagcacttcagcggcggttttagaagctcttcgcgaagtccatcccattgtggacaagatcttgcagtaccgcgaaatggcgaaattgaaaggcacctatattgaccgtcttccggcattagtccacccgaaaacgggacgcctccatacccgcttcaaccaaacagccacggcgaccggtcgtttgtccagttctgatccaaaccttcagaatattccagtacgtaccccattgggccagaagatccgccgtgcgtttgtagctgaggagggttggcgtttagtggccctcgattatcgtcaaattgaattacgtgtccttgcccatctttctggcgatgagaacctcatccgcgtgtttcaggaaggcaaagacattcacactcaaacggcaagctggatgtttggattatcagctgaagcgatcgatcctttgatgcgtcgtgcagcgaagaccatcaatttcggtgttctctacggtatgagtgcctttcgtttgtcgcaggaattaggcattccctatgaagaagctcaggcgttcattcagaaatactttcaaagctatcccaaagttaaagcatggatcgagaagactctccgcgaaggccgcacacgtggttacgtagagaccttatttggacgtcgccgctatgttcccgatttaaacgctcgcgtgaaaggcaagcgtgaagccgccgaacgcatggcgttcaacatgcctgtacagggcacggcagctgacctcatgaaacttgcaatggtgcgcctttttccacaattgcgtgaagttggtgcccgcatgctcttgcaggtccacgatgaactcttgttagaagcgccaaaagagcgtgcggaagaggtggcagccctcgcgaaagaagttatggaaggcgtgtggcccttagcggtgcctcttgaagtcgaagttggtattggcgaggattggctggctgccaaagga

SEQ ID NO: 5190 - protein, 841 aa, synthetic construct
  REGION 1..841: note = Variant of DNA polymerase I from Thermus sp. strain 2.9
MHHHHHHGGSGVLPVFEPKGRVLLVDGHHLAYRNFFALKGLTTSRGEPVQGVYGFAKSLLKALKEDGDVVIVVFDAKAPSFRHEAYEAYKAGRAPTPEDFPRQLALMKELVDLLGLERLEVPGFEADDVLATLAKKAEREGYEVQILTADRDLFQLLSPRISVLHPEGHRITPEWLWEKYGLRPEQWVDFRALAGDPSDNIPGVKGIGEKTALKLLKEWGSLENLLKNLDQVKPESVREKILAHLEDLKLSRELSRVRTDLPLEVDFRRRREPDWEGLKAFLERLEFGSLLHEFGLLESPLLAEEAPWPPPEGAFLGYRLSRPEPMWAELLALAASAQGRVYRAEDPHGALRGLFEVRGLLAKDLAVVALREGLDLPPTDDPMLLAYLLDPSNTTPEGVARRYGGEWTEDAAKRALLAERLHENLLGRLQGEERLLWLYEEVEKPLSRVLAHMEATGVKLDVAYLENLSLEVAAEMRRLEEEVFRLAGRSFRLNSRDQLERVLFDELGLPPIGKTEKTGKRSTSAAVLEALREVHPIVDKILQYREMAKLKGTYIDRLPALVHPKTGRLHTRFNQTATATGRLSSSDPNLQNIPVRTPLGQKIRRAFVAEEGWRLVALDYRQIELRVLAHLSGDENLIRVFQEGKDIHTQTASWMFGLSAEAIDPLMRRAAKTINFGVLYGMSAFRLSQELGIPYEEAQAFIQKYFQSYPKVKAWIEKTLREGRTRGYVETLFGRRRYVPDLNARVKGKREAAERMAFNMPVQGTAADLMKLAMVRLFPQLREVGARMLLQVHDELLLEAPKERAEEVAALAKEVMEGVWPLAVPLEVEVGIGEDWLAAKG

SEQ ID NO: 5191 - DNA, 2523 bp, synthetic construct
  misc_feature 1..2523: note = Variant of DNA polymerase I from Thermus sp. strain 2.9
  source 1..2523: mol_type = other DNA
atgcaccatcatcatcatcatggcggtagcggcgtgttaccggtgttcgagcctaaaggtcgcgtgcttctggttgatggccatcatctcgcgtatcgtaacttctttgccctgaaaggattaaccaccagcctgggcgagccggtacagggtgtctacggctttgcaaagtcgctcctgaaagctctgaaagaagacggtgatgtggtgattgttgtctttgatgcgaaagcgccaagttttcgccacgaagcgtacgaagcttacaaagccgggcgtgctccaacgccggaagactttcctcgccaattggcgcttatgaaggaattagtggatttgcttggcctcgaacgcttggaagttcccggtttcgaggcagacgacgtattagcgactctcgcaaagaaagccgaacgtgagggctatgaagtccagatcttgacagcagatcgcgatcttttccagcttttatctccgcgcatctcggtgttacacccggaagggcatcgtatcaccccggaatggctctgggagaaatatggtttgcgtcccgaacaatgggtggattttcgcgccttagcaggcgatccgagcgacaatattccgggagttaaaggtatcggcgagaagacggcgctcaagctccttaaagaatgggggtcgttggagaacttgcttaagaatttagatcaggtcaaaccagagtcagtgcgtgagaagattcttgctcacctcgaagacctcaaattaagccgcgaattgtcccgtgtacgcaccgatttgccgctcgaagttgatttcggtcgccgccgcgaacctgactgggagggtcttaaagcgtttttagagcgtcttgaatttggttcgctcttgcatgaattcggccttttagaaagcccgttactggccgaagaagcaccttggccaccgcccgagggcgcgtttttaggttaccgtttgagtcgcccggaaccgatgtgggccgaattactggctcttgcagcgtctgcccagggacgtgtgtatcgcgcggaagaccctcatggtgcgctccgcggcctcttcgaagtccgtggactccttgccaaaggtttagctgttgttgcattgcgcgaaggtcttgatttacctccgactgatgatccaatgcttcttgcgtacctcttggacccgtcaaacacgacgcccgaaggcgtagcccgtcgttacggcggcgagtggaccgaagatgcagcgaaacgcgcgttattggccgaacgtttgcacgaaaatttattaggacgtttgcaaggcgaggaacgtctcctctggctttacgaagaagtggagaaaccattgagtcgcgtgctcgcgcatatggaagctaccggtgtcaaattagacgtggcgtatttggagaatctcagccttgaagttgctgcccacatgcgccgcttggaggaagaagtattccgtttagcaggccgttcctttcgccttaactctcgcgatcagttagaacgtgtgttgttcgatgaacttggtctccctcctatcggcaagacagagaagaccggtaaacgtagcacttcagcggcggttttagaagctcttcgcgaagtccatcccattgtggacaagatcttgcagtaccgcgaaatggcgaaattgaaaggcacctatattgaccgtcttccggcattagtccacccgaaaacgggacgcctccatacccgcttcaaccaaacagccacggcgaccggtcgtttgtcctcctctgatccaaaccttcagaatattccagtacgtaccccattgggccagaagatccgccgtgcgtttgtagctgaggagggttggcgtttagtggccctcgattatcgtcaaattgaattacgtgtccttgcccatctttctggcgatgagaacctcatccgcgtgtttcaggaaggcaaagacattcacactcaaacggcaagctggatgtttggattatcagctgaagcgatcgatcctttgatgcgtcgtgcagcgaagaccatcaatttcggtgttctctacggtatgagtgcctttcgtttgtcgcaggaattaggcattccctatgaagaagctcaggcgttcattcagaaatactttcaaagctatcccaaagttaaagcatggatcgagaagactctccgtgaaggccgcacacgtggttacgtagagaccttatttggacgtcgccgctatgttcccgatttaaacgctcgcgtgaaaggcaagcgtgaagccgccgaacgcatggcgttcaacatgcctgtacagggcacggcagctgacctcatgaaacttgcaatggtgcgcctttttccacaattgcgtgaagttggtgcccgcatgctcttgcaggtccacgatgaactcttgttagaagcgccaaaagagcgtgcggaagaggtggcagccctcgcgaaagaagttatggaaggcgtgtggcccttagcggtgcctcttgaagtcgaagttggtattggcgaggattggctggctgccaaagga

SEQ ID NO: 5192 - protein, 841 aa, synthetic construct
  REGION 1..841: note = Variant of DNA polymerase I from Thermus sp. strain 2.9
MHHHHHHGGSGVLPVFEPKGRVLLVDGHHLAYRNFFALKGLTTSLGEPVQGVYGFAKSLLKALKEDGDVVIVVFDAKAPSFRHEAYEAYKAGRAPTPEDFPRQLALMKELVDLLGLERLEVPGFEADDVLATLAKKAEREGYEVQILTADRDLFQLLSPRISVLHPEGHRITPEWLWEKYGLRPEQWVDFRALAGDPSDNIPGVKGIGEKTALKLLKEWGSLENLLKNLDQVKPESVREKILAHLEDLKLSRELSRVRTDLPLEVDFGRRREPDWEGLKAFLERLEFGSLLHEFGLLESPLLAEEAPWPPPEGAFLGYRLSRPEPMWAELLALAASAQGRVYRAEDPHGALRGLFEVRGLLAKGLAVVALREGLDLPPTDDPMLLAYLLDPSNTTPEGVARRYGGEWTEDAAKRALLAERLHENLLGRLQGEERLLWLYEEVEKPLSRVLAHMEATGVKLDVAYLENLSLEVAAHMRRLEEEVFRLAGRSFRLNSRDQLERVLFDELGLPPIGKTEKTGKRSTSAAVLEALREVHPIVDKILQYREMAKLKGTYIDRLPALVHPKTGRLHTRFNQTATATGRLSSSDPNLQNIPVRTPLGQKIRRAFVAEEGWRLVALDYRQIELRVLAHLSGDENLIRVFQEGKDIHTQTASWMFGLSAEAIDPLMRRAAKTINFGVLYGMSAFRLSQELGIPYEEAQAFIQKYFQSYPKVKAWIEKTLREGRTRGYVETLFGRRRYVPDLNARVKGKREAAERMAFNMPVQGTAADLMKLAMVRLFPQLREVGARMLLQVHDELLLEAPKERAEEVAALAKEVMEGVWPLAVPLEVEVGIGEDWLAAKG

SEQ ID NO: 5193 - DNA, 2523 bp, synthetic construct
  misc_feature 1..2523: note = Variant of DNA polymerase I from Thermus sp. strain 2.9
  source 1..2523: mol_type = other DNA
atgcaccatcatcatcatcatggcggtagcggcgtgttaccggtgttcgagcctaaaggtcgcgtgcttctggttgatggccatcatctcgcgtatcgtaacttctttgccctgaaaggattaaccaccagcctgggcgagccggtacagggtgtctacggctttgcaaagtcgctcctgaaagctctgaaagaagacggtgatgtggtgattgttgtctttgatgcgaaagcgccaagttttcgccacgaagcgtacgaagcttacaaagccgggcgtgctccaacgccggaagactttcctcgccaattggcgcttatgaaggaattagtggatttgcttggcctcgaacgcttggaagttcccggtttcgaggcagacgacgtattagcgactctcgcaaagaaagccgaacgtgagggctatgaagtccagatcttgacagcagatcgcgatcttttccagcttttatctccgcgcatctcggtgttacacccggaagggcatcgtatcaccccggaatggctctgggagaaatatggtttgcgtcccgaacaatgggtggattttcgcgccttagcaggcgatccgagcgacaatattccgggagttaaaggtatcggcgagaagacggcgctcaagctccttaaagaatgggggtcgttggagaacttgcttaagaatttagatcaggtcaaaccagagtcagtgcgtgagaagattcttgctcacctcgaagacctcaaattaagccgcgaattgtcccgtgtacgcaccgatttgccgctcgaagttgatttcggtcgccgccgcgaacctgactgggagggtcttaaagcgtttttagagcgtcttgaatttggttcgctcttgcatgaattcggccttttagaaagcccgttactggccgaagaagcaccttggccaccgcccgagggcgcgtttttaggttaccgtttgagtcgcccggaaccgatgtgggccgaattactggctcttgcagcgtctgcccagggacgtgtgtatcgcgcggaagaccctcatggtgcgctccgcggcctcttcgaagtccgtggactccttgccaaagacttagctgttgttgcattgcgcgaaggtcttgatttacctccgactgatgatccaatgcttcttgcgtacctcttggacccgtcaaacacgacgcccgaaggcgtagcccgtcgttacggcggcgagtggaccgaagatgcagcgaaacgcgcgttattggccgaacgtttgcacgaaaatttattaggacgtttgcaaggcgaggaacgtctcctctggctttacgaagaagtggagaaaccattgagtcgcgtgctcgcgcatatggaagctaccggtgtcaaattagacgtggcgtatttggagaatctcagccttgaagttgctgcccacatgcgccgcttggaggaagaagtattccgtttagcaggccgttcctttcgccttaactctcgcgatcagttagaacgtgtgttgttcgatgaacttggtctccctcctatcggcaagacagagaagaccggtaaacgtagcacttcagcggcggttttagaagctcttcgcgaagtccatcccatttcggacaagatcttgcagtaccgcgaaatggcgaaattgaaaggcacctatattgaccgtcttccggcattagtccacccgaaaacgggacgcctccatacccgcttcaaccaaacagccacggcgaccggtcgtttgtcctcctctgatccaaaccttcagaatattccagtacgtaccccattgggccagaagatccgccgtgcgtttgtagctgaggagggttggcgtttagtggccctcgattatcgtcaaattgaattacgtgtccttgcccatctttctggcgatgagaacctcatccgcgtgtttcaggaaggcaaagacattcacactcaaacggcaagctggatgtttggattatcagctgaagcgatcgatcctttgatgcgtcgtgcagcgaagaccatcaatttcggtgttctctacggtatgagtgcctttcgtttgtcgcaggaattaggcattccctatgaagaagctcaggcgttcattcagaaatactttcaaagctatcccaaagttaaagcatggatcgagaagactctccgtgaaggccgcacacgtggttacgtagagaccttatttggacgtcgccgctatgttcccgatttaaacgctcgcgtgaaaggcaagcgtgaagccgccgaacgcatggcgttcaacatgcctgtacagggcacggcagctgacctcatgaaacttgcaatggtgcgcctttttccacaattgcgtgaagttggtgcccgcatgctcttgcaggtccacgatgaactcttgttagaagcgccaaaagagcgtgcggaagaggtggcagccctcgcgaaagaagttatggaaggcgtgtggcccttagcggtgcctcttgaagtcgaagttggtattggcgaggattggctggctgccaaagga

SEQ ID NO: 5194 - protein, 841 aa, synthetic construct
  REGION 1..841: note = Variant of DNA polymerase I from Thermus sp. strain 2.9
MHHHHHHGGSGVLPVFEPKGRVLLVDGHHLAYRNFFALKGLTTSLGEPVQGVYGFAKSLLKALKEDGDVVIVVFDAKAPSFRHEAYEAYKAGRAPTPEDFPRQLALMKELVDLLGLERLEVPGFEADDVLATLAKKAEREGYEVQILTADRDLFQLLSPRISVLHPEGHRITPEWLWEKYGLRPEQWVDFRALAGDPSDNIPGVKGIGEKTALKLLKEWGSLENLLKNLDQVKPESVREKILAHLEDLKLSRELSRVRTDLPLEVDFGRRREPDWEGLKAFLERLEFGSLLHEFGLLESPLLAEEAPWPPPEGAFLGYRLSRPEPMWAELLALAASAQGRVYRAEDPHGALRGLFEVRGLLAKDLAVVALREGLDLPPTDDPMLLAYLLDPSNTTPEGVARRYGGEWTEDAAKRALLAERLHENLLGRLQGEERLLWLYEEVEKPLSRVLAHMEATGVKLDVAYLENLSLEVAAHMRRLEEEVFRLAGRSFRLNSRDQLERVLFDELGLPPIGKTEKTGKRSTSAAVLEALREVHPISDKILQYREMAKLKGTYIDRLPALVHPKTGRLHTRFNQTATATGRLSSSDPNLQNIPVRTPLGQKIRRAFVAEEGWRLVALDYRQIELRVLAHLSGDENLIRVFQEGKDIHTQTASWMFGLSAEAIDPLMRRAAKTINFGVLYGMSAFRLSQELGIPYEEAQAFIQKYFQSYPKVKAWIEKTLREGRTRGYVETLFGRRRYVPDLNARVKGKREAAERMAFNMPVQGTAADLMKLAMVRLFPQLREVGARMLLQVHDELLLEAPKERAEEVAALAKEVMEGVWPLAVPLEVEVGIGEDWLAAKG

SEQ ID NO: 5195 - DNA, 2523 bp, synthetic construct
  misc_feature 1..2523: note = Variant of DNA polymerase I from Thermus sp. strain 2.9
  source 1..2523: mol_type = other DNA
atgcaccatcatcatcatcatggcggtagcggcgtgttaccggtgttcgagcctaaaggtcgcgtgcttctggttgatggccatcatctcgcgtatcgtaacttctttgccctgaaaggattaaccaccagcctgggcgagccggtacagggtgtctacggctttgcaaagtcgctcctgaaagctctgaaagaagacggtgatgtggtgattgttgtctttgatgcgaaagcgccaagttttcgccacgaagcgtacgaagcttacaaagccgggcgtgctccaacgccggaagactttcctcgccaattggcgcttatgaaggaattagtggatttgcttggcctcgaacgcttggaagttcccggtttcgaggcagacgacgtattagcgactctcgcaaagaaagccgaacgtgagggctatgaagtccagatcttgacagcagatcgcgatcttttccagcttttatctccgcgcatctcggtgttacacccggaagggcatcgtatcaccccggaatggctctgggagaaatatggtttgcgtcccgaacaatgggtggattttcgcgccttagcaggcgatccgagcgacaatattccgggagttaaaggtatcggcgagaagacggcgctcaagctccttaaagaatgggggtcgttggagaacttgcttaagaatttagatcaggtcaaaccagagtcagtgcgtgagaagattcttgctcacctcgaagacctcaaattaagccgcgaattgtcccgtgtacgcaccgatttgccgctcgaagttgatttcggtcgccgccgcgaacctgactgggagggtcttaaagcgtttttagagcgtcttgaatttggttcgctcttgcatgaattcggccttttagaaagcccgttactggccgaagaagcaccttggccaccgcccgagggcgcgtttttaggttaccgtttgagtcgcccggaaccgatgtgggccgaattactggctcttgcagcgtctgcccagggacgtgtgtatcgcgcggaagaccctcatggtgcgctccgcggcctcttcgaagtccgtggactccttgccaaagacttagctgttgttgcattgcgcgaaggtcttgatttacctccgactgatgatccaatgcttcttgcgtacctcttggacccgtcaaacacgacgcccgaaggcgtagcccgtcgttacggcggcgagtggaccgaagatgcagcgaaacgcgcgttattggccgaacgtttgcacgaaaatttattaggacgtttgcaaggcgaggaacgtctcctctggctttacgaagaagtggagaaaccattgagtcgcgtgctcgcgcatatggaagctaccggtgtcaaattagacgtggcgtatttggagaatctcagccttgaagttgctgcccacatgcgccgcttggaggaagaagtattccgtttagcaggccgttcctttcgccttaactctcgcgatcagttagaacgtgtgttgttcgatgaacttggtctccctcctatcggcaagacagagaagaccggtaaacgtagcacttcagcggcggttttagaagctcttcgcgaagtccatcccattgtggacaagatcttgcagtaccgcgaaatggcgaaattgaaaggcacctatattgaccgtcttccggcattagtccacccgaaaacgggacgcctccatacccgcttcaaccaaacagccacggcgaccggtcgtttgtcctcctctgatccaaaccttcagaatattccagtacgtaccccattgggccagaagatccgccgtgcgtttgtagctgagagtggttggcgtttagtggccctcgattatcgtcaaattgaattacgtgtccttgcccatctttctggcgatgagaacctcatccgcgtgtttcaggaaggcaaagacattcacactcaaacggcaagctggatgtttggattatcagctgaagcgatcgatcctttgatgcgtcgtgcagcgaagaccatcaatttcggtgttctctacggtatgagtgcctttcgtttgtcgcaggaattaggcattccctatgaagaagctcaggcgttcattcagaaatactttcaaagctatcccaaagttaaagcatggatcgagaagactctccgtgaaggccgcacacgtggttacgtagagaccttatttggacgtcgccgctatgttcccgatttaaacgctcgcgtgaaaggcaagcgtgaagccgccgaacgcatggcgttcaacatgcctgtacagggcacggcagctgacctcatgaaacttgcaatggtgcgcctttttccacaattgcgtgaagttggtgcccgcatgctcttgcaggtccacgatgaactcttgttagaagcgccaaaagagcgtgcggaagaggtggcagccctcgcgaaagaagttatggaaggcgtgtggcccttagcggtgcctcttgaagtcgaagttggtattggcgaggattggctggctgccaaagga

SEQ ID NO: 5196 - protein, 841 aa, synthetic construct
  REGION 1..841: note = Variant of DNA polymerase I from Thermus sp. strain 2.9
MHHHHHHGGSGVLPVFEPKGRVLLVDGHHLAYRNFFALKGLTTSLGEPVQGVYGFAKSLLKALKEDGDVVIVVFDAKAPSFRHEAYEAYKAGRAPTPEDFPRQLALMKELVDLLGLERLEVPGFEADDVLATLAKKAEREGYEVQILTADRDLFQLLSPRISVLHPEGHRITPEWLWEKYGLRPEQWVDFRALAGDPSDNIPGVKGIGEKTALKLLKEWGSLENLLKNLDQVKPESVREKILAHLEDLKLSRELSRVRTDLPLEVDFGRRREPDWEGLKAFLERLEFGSLLHEFGLLESPLLAEEAPWPPPEGAFLGYRLSRPEPMWAELLALAASAQGRVYRAEDPHGALRGLFEVRGLLAKDLAVVALREGLDLPPTDDPMLLAYLLDPSNTTPEGVARRYGGEWTEDAAKRALLAERLHENLLGRLQGEERLLWLYEEVEKPLSRVLAHMEATGVKLDVAYLENLSLEVAAHMRRLEEEVFRLAGRSFRLNSRDQLERVLFDELGLPPIGKTEKTGKRSTSAAVLEALREVHPIVDKILQYREMAKLKGTYIDRLPALVHPKTGRLHTRFNQTATATGRLSSSDPNLQNIPVRTPLGQKIRRAFVAESGWRLVALDYRQIELRVLAHLSGDENLIRVFQEGKDIHTQTASWMFGLSAEAIDPLMRRAAKTINFGVLYGMSAFRLSQELGIPYEEAQAFIQKYFQSYPKVKAWIEKTLREGRTRGYVETLFGRRRYVPDLNARVKGKREAAERMAFNMPVQGTAADLMKLAMVRLFPQLREVGARMLLQVHDELLLEAPKERAEEVAALAKEVMEGVWPLAVPLEVEVGIGEDWLAAKG

SEQ ID NO: 5197 - DNA, 2523 bp, synthetic construct
  misc_feature 1..2523: note = Variant of DNA polymerase I from Thermus sp. strain 2.9
  source 1..2523: mol_type = other DNA
atgcaccatcatcatcatcatggcggtagcggcgtgttaccggtgttcgagcctaaaggtcgcgtgcttctggttgatggccatcatctcgcgtatcgtaacttctttgccctgaaaggattaaccaccagcctgggcgagccggtacagggtgtctacggctttgcaaagtcgctcctgaaagctctgaaagaagacggtgatgtggtgattgttgtctttgatgcgaaagcgccaagttttcgccacgaagcgtacgaagcttacaaagccgggcgtgctccaacgccggaagactttcctcgccaattggcgcttatgaaggaattagtggatttgcttggcctcgaacgcttggaagttcccggtttcgaggcagacgacgtattagcgactctcgcaaagaaagccgaacgtgagggctatgaagtccagatcttgacagcagatcgcgatcttttccagcttttatctccgcgcatctcggtgttacacccggaagggcatcgtatcaccccggaatggctctgggagaaatatggtttgcgtcccgaacaatgggtggattttcgcgccttagcaggcgatccgagcgacaatattccgggagttaaaggtatcggcgagaagacggcgctcaagctccttaaagaatgggggtcgttggagaacttgcttaagaatttagatcaggtcaaaccagagtcagtgcgtgagaagattcttgctcacctcgaagacctcaaattaagccgcgaattgtcccgtgtacgcaccgatttgccgctcgaagttgatttcggtcgccgccgcgaacctgactgggagggtcttaaagcgtttttagagcgtcttgaatttggttcgctcttgcatgaattcggccttttagaaagcccgttactggccgaagaagcaccttggccaccgcccgagggcgcgtttttaggttaccgtttgagtcgcccggaaccgatgtgggccgaattactggctcttgcagcgtctgcccagggacgtgtgtatcgcgcggaagaccctcatggtgcgctccgcggcctcttcgaagtccgtggactccttgccaaagacttagctgttgttgcattgcgcgaaggtcttgatttacctccgactgatgatccaatgcttcttgcgtacctcttggacccgtcaaacacgacgcccgaaggcgtagcccgtcgttacggcggcgagtggaccgaagatgcagcgaaacgcgcgttattggccgaacgtttgcacgaaaatttattaggacgtttgcaaggcgaggaacgtctcctctggctttacgaagaagtggagaaaccattgagtcgcgtgctcgcgcatatggaagctaccggtgtcaaattagacgtggcgtatttggagaatctcagccttgaagttgctgcccacatgcgccgcttggaggaagaagtattccgtttagcaggccgttcctttcgccttaactctcgcgatcagttagaacgtgtgttgttcgatgaacttggtctccctcctatcggcaagacagagaagaccggtaaacgtagcacttcagcggcggttttagaagctcttcgcgaagtccatcccattgcggacaagatcttgcagtaccgcgaaatggcgaaattgaaaggcacctatattgaccgtcttccggcattagtccacccgaaaacgggacgcctccatacccgcttcaaccaaacagccacggcgaccggtcgtttgtcctcctctgatccaaaccttcagaatattccagtacgtaccccattgggccagaagatccgccgtgcgtttgtagctgaggagggttggcgtttagtggccctcgattatcgtcaaattgaattacgtgtccttgcccatctttctggcgatgagaacctcatccgcgtgtttcaggaaggcaaagacattcacactcaaacggcaagctggatgtttggattatcagctgaagcgatcgatcctttgatgcgtcgtgcagcgaagaccatcaatttcggtgttctctacggtatgagtgcctttcgtttgtcgcaggaattaggcattccctatgaagaagctcaggcgttcattcagaaatactttcaaagctatcccaaagttaaagcatggatcgagaagactctccgtgaaggccgcacacgtggttacgtagagaccttatttggacgtcgccgctatgttcccgatttaaacgctcgcgtgaaaggcaagcgtgaagccgccgaacgcatggcgttcaacatgcctgtacagggcacggcagctgacctcatgaaacttgcaatggtgcgcctttttccacaattgcgtgaagttggtgcccgcatgctcttgcaggtccacgatgaactcttgttagaagcgccaaaagagcgtgcggaagaggtggcagccctcgcgaaagaagttatggaaggcgtgtggcccttagcggtgcctcttgaagtcgaagttggtattggcgaggattggctggctgccaaagga

SEQ ID NO: 5198 - protein, 841 aa, synthetic construct
  REGION 1..841: note = Variant of DNA polymerase I from Thermus sp. strain 2.9
MHHHHHHGGSGVLPVFEPKGRVLLVDGHHLAYRNFFALKGLTTSLGEPVQGVYGFAKSLLKALKEDGDVVIVVFDAKAPSFRHEAYEAYKAGRAPTPEDFPRQLALMKELVDLLGLERLEVPGFEADDVLATLAKKAEREGYEVQILTADRDLFQLLSPRISVLHPEGHRITPEWLWEKYGLRPEQWVDFRALAGDPSDNIPGVKGIGEKTALKLLKEWGSLENLLKNLDQVKPESVREKILAHLEDLKLSRELSRVRTDLPLEVDFGRRREPDWEGLKAFLERLEFGSLLHEFGLLESPLLAEEAPWPPPEGAFLGYRLSRPEPMWAELLALAASAQGRVYRAEDPHGALRGLFEVRGLLAKDLAVVALREGLDLPPTDDPMLLAYLLDPSNTTPEGVARRYGGEWTEDAAKRALLAERLHENLLGRLQGEERLLWLYEEVEKPLSRVLAHMEATGVKLDVAYLENLSLEVAAHMRRLEEEVFRLAGRSFRLNSRDQLERVLFDELGLPPIGKTEKTGKRSTSAAVLEALREVHPIADKILQYREMAKLKGTYIDRLPALVHPKTGRLHTRFNQTATATGRLSSSDPNLQNIPVRTPLGQKIRRAFVAEEGWRLVALDYRQIELRVLAHLSGDENLIRVFQEGKDIHTQTASWMFGLSAEAIDPLMRRAAKTINFGVLYGMSAFRLSQELGIPYEEAQAFIQKYFQSYPKVKAWIEKTLREGRTRGYVETLFGRRRYVPDLNARVKGKREAAERMAFNMPVQGTAADLMKLAMVRLFPQLREVGARMLLQVHDELLLEAPKERAEEVAALAKEVMEGVWPLAVPLEVEVGIGEDWLAAKG

SEQ ID NO: 5199 - DNA, 2523 bp, synthetic construct
  misc_feature 1..2523: note = Variant of DNA polymerase I from Thermus sp. strain 2.9
  source 1..2523: mol_type = other DNA
atgcaccatcatcatcatcatggcggtagcggcgtgttaccggtgttcgagcctaaaggtcgcgtgcttctggttgatggccatcatctcgcgtatcgtaacttctttgccctgaaaggattaaccaccagcctgggcgagccggtacagggtgtctacggctttgcaaagtcgctcctgaaagctctgaaagaagacggtgatgtggtgattgttgtctttgatgcgaaagcgccaagttttcgccacgaagcgtacgaagcttacaaagccgggcgtgctccaacgccggaagactttcctcgccaattggcgcttatgaaggaattagtggatttgcttggcctcgaacgcttggaagttcccggtttcgaggcagacgacgtattagcgactctcgcaaagaaagccgaacgtgagggctatgaagtccagatcttgacagcagatcgcgatcttttccagcttttatctccgcgcatctcggtgttacacccggaagggcatcgtatcaccccggaatggctctgggagaaatatggtttgcgtcccgaacaatgggtggattttcgcgccttagcaggcgatccgagcgacaatattccgggagttaaaggtatcggcgagaagacggcgctcaagctccttaaagaatgggggtcgttggagaacttgcttaagaatttagatcaggtcaaaccagagtcagtgcgtgagaagattcttgctcacctcgaagacctcaaattaagccgcgaattgtcccgtgtacgcaccgatttgccgctcgaagttgatttcggtcgccgccgcgaacctgactgggagggtcttaaagcgtttttagagcgtcttgaatttggttcgctcttgcatgaattcggccttttagaaagcccgttactggccgaagaagcaccttggccaccgcccgagggcgcgtttttaggttaccgtttgagtcgcccggaaccgatgtgggccgaattactggctcttgcagcgtctgcccagggacgtgtgtatcgcgcggaagaccctcatggtgcgctccgcggcctcttcgaagtccgtggactccttgccaaagacttagctgttgttgcattgcgcgaaggtcttgatttacctccgactgatgatccaatgcttcttgcgtacctcttggacccgtcaaacacgacgcccgaaggcgtagcccgtcgttacggcggcgagtggaccgaagatgcagcgaaacgcgcgttattggccgaacgtttgcacgaaaatttattaggacgtttgcaaggcgaggaacgtctcctctggctttacgaagaagtggagaaaccattgagtcgcgtgctcgcgcatatggaagctaccggtgtcaaattagacgtggcgtatttggagaatctcagccttgaagttgctgcccacatgcgccgcttggaggaagaagtattccgtttagcaggccgttcctttcgccttaactctcgcgatcagttagaacgtgtgttgttcgatgaacttggtctccctcctatcggcaagacagagaagaccggtaaacgtagcacttcagcggcggttttagaagctcttcgcgaagtccatcccattgtggacaagatcttgcagtaccgcgaaatggcgaaattgaaaggcacctatattgaccgtcttccggcattagtccacccgaaaacgggacgcctccatacccgcttcaaccaaacagccacggcgaccggtcgtttgtcctcctctgatccaaaccttcagaatattccagtacgtaccccattgggccagaagatccgccgtgcgtttgtagctgaggagggttggcgtttagtggccctcgattatcgtcaaattgaattacgtgtccttgcccatctttctggcgatgagaacctcatccgcgtgtttcaggaaggcaaagacattcacactcaaacggcaagctggatgtttggattatcagctgaagcgatcgatcctttgatgcgtcgtgcagcgaagaccatcaatttcggtgttctctacggtatgagtgcctttcgtttgtcgcaggaattaggcattccctatgaagaagctcaggcgttcattcagaaatactttcaaagctatcccaaagttaaagcatggatcgagaagactctccgtgaaggccgcacacgtggttacgtagagaccttatttggacgtcgccgctatgttcccgatttaaacgctcgcgtgaaatcgaagcgtgaagccgccgaacgcatggcgttcaacatgcctgtacagggcacggcagctgacctcatgaaacttgcaatggtgcgcctttttccacaattgcgtgaagttggtgcccgcatgctcttgcaggtccacgatgaactcttgttagaagcgccaaaagagcgtgcggaagaggtggcagccctcgcgaaagaagttatggaaggcgtgtggcccttagcggtgcctcttgaagtcgaagttggtattggcgaggattggctggctgccaaagga

SEQ ID NO: 5200 - protein, 841 aa, synthetic construct
  REGION 1..841: note = Variant of DNA polymerase I from Thermus sp. strain 2.9
MHHHHHHGGSGVLPVFEPKGRVLLVDGHHLAYRNFFALKGLTTSLGEPVQGVYGFAKSLLKALKEDGDVVIVVFDAKAPSFRHEAYEAYKAGRAPTPEDFPRQLALMKELVDLLGLERLEVPGFEADDVLATLAKKAEREGYEVQILTADRDLFQLLSPRISVLHPEGHRITPEWLWEKYGLRPEQWVDFRALAGDPSDNIPGVKGIGEKTALKLLKEWGSLENLLKNLDQVKPESVREKILAHLEDLKLSRELSRVRTDLPLEVDFGRRREPDWEGLKAFLERLEFGSLLHEFGLLESPLLAEEAPWPPPEGAFLGYRLSRPEPMWAELLALAASAQGRVYRAEDPHGALRGLFEVRGLLAKDLAVVALREGLDLPPTDDPMLLAYLLDPSNTTPEGVARRYGGEWTEDAAKRALLAERLHENLLGRLQGEERLLWLYEEVEKPLSRVLAHMEATGVKLDVAYLENLSLEVAAHMRRLEEEVFRLAGRSFRLNSRDQLERVLFDELGLPPIGKTEKTGKRSTSAAVLEALREVHPIVDKILQYREMAKLKGTYIDRLPALVHPKTGRLHTRFNQTATATGRLSSSDPNLQNIPVRTPLGQKIRRAFVAEEGWRLVALDYRQIELRVLAHLSGDENLIRVFQEGKDIHTQTASWMFGLSAEAIDPLMRRAAKTINFGVLYGMSAFRLSQELGIPYEEAQAFIQKYFQSYPKVKAWIEKTLREGRTRGYVETLFGRRRYVPDLNARVKSKREAAERMAFNMPVQGTAADLMKLAMVRLFPQLREVGARMLLQVHDELLLEAPKERAEEVAALAKEVMEGVWPLAVPLEVEVGIGEDWLAAKG

SEQ ID NO: 5201 - DNA, 2523 bp, synthetic construct
  misc_feature 1..2523: note = Variant of DNA polymerase I from Thermus sp. strain 2.9
  source 1..2523: mol_type = other DNA
atgcaccatcatcatcatcatggcggtagcggcgtgttaccggtgttcgagcctaaaggtcgcgtgcttctggttgatggccatcatctcgcgtatcgtaacttctttgccctgaaaggattaaccaccagcctgggcgagccggtacagggtgtctacggctttgcaaagtcgctcctgaaagctctgaaagaagacggtgatgtggtgattgttgtctttgatgcgaaagcgccaagttttcgccacgaagcgtacgaagcttacaaagccgggcgtgctccaacgccggaagactttcctcgccaattggcgcttatgaaggaattagtggatttgcttggcctcgaacgcttggaagttcccggtttcgaggcagacgacgtattagcgactctcgcaaagaaagccgaacgtgagggctatgaagtccagatcttgacagcagatcgcgatcttttccagcttttatctccgcgcatctcggtgttacacccggaagggcatcgtatcaccccggaatggctctgggagaaatatggtttgcgtcccgaacaatgggtggattttcgcgccttagcaggcgatccgagcgacaatattccgggagttaaaggtatcggcgagaagacggcgctcaagctccttaaagaatgggggtcgttggagaacttgcttaagaatttagatcaggtcaaaccagagtcagtgcgtgagaagattcttgctcacctcgaagacctcaaattaagccgcgaattgtcccgtgtacgcaccgatttgccgctcgaagttgatttcggtcgccgccgcgaacctgactgggagggtcttaaagcgtttttagagcgtcttgaatttggttcgctcttgcatgaattcggccttttagaaagcccgttactggccgaagaagcaccttggccaccgcccgagggcgcgtttttaggttaccgtttgagtcgcccggaaccgatgtgggccgaattactggctcttgcagcgtctgcccagggacgtgtgtatcgcgcggaagaccctcatggtgcgctccgcggcctcttcgaagtccgtggactccttgccaaagacttagctgttgttgcattgcgcgaaggtcttgatttacctccgactgatgatccaatgcttcttgcgtacctcttggacccgtcagagacgacgcccgaaggcgtagcccgtcgttacggcggcgagtggaccgaagatgcagcgaaacgcgcgttattggccgaacgtttgcacgaaaatttattaggacgtttgcaaggcgaggaacgtctcctctggctttacgaagaagtggagaaaccattgagtcgcgtgctcgcgcatatggaagctaccggtgtcaaattagacgtggcgtatttggagaatctcagccttgaagttgctgcccacatgcgccgcttggaggaagaagtattccgtttagcaggccgttcctttcgccttaactctcgcgatcagttagaacgtgtgttgttcgatgaacttggtctccctcctatcggcaagacagagaagaccggtaaacgtagcacttcagcggcggttttagaagctcttcgcgaagtccatcccattgtggacaagatcttgcagtaccgcgaaatggcgaaattgaaaggcacctatattgaccgtcttccggcattagtccacccgaaaacgggacgcctccatacccgcttcaaccaaacagccacggcgaccggtcgtttgtcctcctctgatccaaaccttcagaatattccagtacgtaccccattgggccagaagatccgccgtgcgtttgtagctgaggagggttggcgtttagtggccctcgattatcgtcaaattgaattacgtgtccttgcccatctttctggcgatgagaacctcatccgcgtgtttcaggaaggcaaagacattcacactcaaacggcaagctggatgtttggattatcagctgaagcgatcgatcctttgatgcgtcgtgcagcgaagaccatcaatttcggtgttctctacggtatgagtgcctttcgtttgtcgcaggaattaggcattccctatgaagaagctcaggcgttcattcagaaatactttcaaagctatcccaaagttaaagcatggatcgagaagactctccgtgaaggccgcacacgtggttacgtagagaccttatttggacgtcgccgctatgttcccgatttaaacgctcgcgtgaaaggcaagcgtgaagccgccgaacgcatggcgttcaacatgcctgtacagggcacggcagctgacctcatgaaacttgcaatggtgcgcctttttccacaattgcgtgaagttggtgcccgcatgctcttgcaggtccacgatgaactcttgttagaagcgccaaaagagcgtgcggaagaggtggcagccctcgcgaaagaagttatggaaggcgtgtggcccttagcggtgcctcttgaagtcgaagttggtattggcgaggattggctggctgccaaagga

SEQ ID NO: 5202 - protein, 841 aa, synthetic construct
  REGION 1..841: note = Variant of DNA polymerase I from Thermus sp. strain 2.9
MHHHHHHGGSGVLPVFEPKGRVLLVDGHHLAYRNFFALKGLTTSLGEPVQGVYGFAKSLLKALKEDGDVVIVVFDAKAPSFRHEAYEAYKAGRAPTPEDFPRQLALMKELVDLLGLERLEVPGFEADDVLATLAKKAEREGYEVQILTADRDLFQLLSPRISVLHPEGHRITPEWLWEKYGLRPEQWVDFRALAGDPSDNIPGVKGIGEKTALKLLKEWGSLENLLKNLDQVKPESVREKILAHLEDLKLSRELSRVRTDLPLEVDFGRRREPDWEGLKAFLERLEFGSLLHEFGLLESPLLAEEAPWPPPEGAFLGYRLSRPEPMWAELLALAASAQGRVYRAEDPHGALRGLFEVRGLLAKDLAVVALREGLDLPPTDDPMLLAYLLDPSETTPEGVARRYGGEWTEDAAKRALLAERLHENLLGRLQGEERLLWLYEEVEKPLSRVLAHMEATGVKLDVAYLENLSLEVAAHMRRLEEEVFRLAGRSFRLNSRDQLERVLFDELGLPPIGKTEKTGKRSTSAAVLEALREVHPIVDKILQYREMAKLKGTYIDRLPALVHPKTGRLHTRFNQTATATGRLSSSDPNLQNIPVRTPLGQKIRRAFVAEEGWRLVALDYRQIELRVLAHLSGDENLIRVFQEGKDIHTQTASWMFGLSAEAIDPLMRRAAKTINFGVLYGMSAFRLSQELGIPYEEAQAFIQKYFQSYPKVKAWIEKTLREGRTRGYVETLFGRRRYVPDLNARVKGKREAAERMAFNMPVQGTAADLMKLAMVRLFPQLREVGARMLLQVHDELLLEAPKERAEEVAALAKEVMEGVWPLAVPLEVEVGIGEDWLAAKG

SEQ ID NO: 5203 - DNA, 2523 bp, synthetic construct
  misc_feature 1..2523: note = Variant of DNA polymerase I from Thermus sp. strain 2.9
  source 1..2523: mol_type = other DNA
atgcaccatcatcatcatcatggcggtagcggcgtgttaccggtgttcgagcctaaaggtcgcgtgcttctggttgatggccatcatctcgcgtatcgtaacttctttgccctgaaaggattaaccaccagcctgggcgagccggtacagggtgtctacggctttgcaaagtcgctcctgaaagctctgaaagaagacggtgatgtggtgattgttgtctttgatgcgaaagcgccaagttttcgccacgaagcgtacgaagcttacaaagccgggcgtgctccaacgccggaagactttcctcgccaattggcgcttatgaaggaattagtggatttgcttggcctcgaacgcttggaagttcccggtttcgaggcagacgacgtattagcgactctcgcaaagaaagccgaacgtgagggctatgaagtccagatcttgacagcagatcgcgatcttttccagcttttatctccgcgcatctcggtgttacacccggaagggcatcgtatcaccccggaatggctctgggagaaatatggtttgcgtcccgaacaatgggtggattttcgcgccttagcaggcgatccgagcgacaatattccgggagttaaaggtatcggcgagaagacggcgctcaagctccttaaagaatgggggtcgttggagaacttgcttaagaatttagatcaggtcaaaccagagtcagtgcgtgagaagattcttgctcacctcgaagacctcaaattaagccgcgaattgtcccgtgtacgcaccgatttgccgctcgaagttgatttcggtcgccgccgcgaacctgactgggagggtcttaaagcgtttttagagcgtcttgaatttggttcgctcttgcatgaattcggccttttagaaagcccgttactggccgaagaagcaccttggccaccgcccgagggcgcgtttttaggttaccgtttgagtcgcccggaaccgatgtgggccgaattactggctcttgcagcgtctgcccagggacgtgtgtatcgcgcggaagaccctcatggtgcgctccgcggcctcttcgaagtccgtggactccttgccaaagacttagctgttgttgcattgcgcgaaggtcttgatttacctccgactgatgatccaatgcttcttgcgtacctcttggacccgtcaaacacgacgcccgaaggcgtagcccgtcgttacggcggcgagtggaccgaagatgcagcgaaacgcgcgttattggccgaacgtttgcacgaaaatttattaggacgtttgcaaggcgaggaacgtctcctctggctttacgaagaagtggagaaaccattgagtcgcgtgctcgcgcatatggaagctaccggtgtcaaattagacgtggcgtatttggagaatctcagccttgaagttgctgcccacatgcgccgcttggaggaagaagtattccgtttagcaggccgttcctttcgccttaactctcgcgatcagttagaacgtgtgttgttcgatgaacttggtctccctcctatcggcaagacagagaagaccggtaaacgtagcacttcagcggcggttttagaagctcttcgcgaagtccatcccattgtggacaagatcttgcagtaccgcgaaatggcgaaattgaaaggcacctatattgaccgtcttccggcattagtccacccgaaaacgggacgcctccatacccgcttcaaccaaacagccacggcgaccggtcgtttgtcctcctctgatccaaaccttcagaatattccagtacgtaccccattgggccagaagatccgccgtgcgtttgtagctgaggagggttggcgtttagtggccctcgattatcgtcaaattgaattacgtgtccttgcccatctttctggcgatgagaacctcatccgcgtgtttcaggaaggcaaagacattcacactcaaacggcaagctggatgtttggattatcagctgaagcgatcgatcctttgatgcgtcgtgcagcgaagaccatcaatttcggtgttctctacggtatgagtgcctttcgtttgtcgcaggaattaggcattccctatgaagaagctcaggcgttcattcagaaatactttcaaagctatcccaaagttaaagcatggatcgagaagactctccgtgaaggccgcacacgtggttacgtagagaccttatttggacgtcgccgctatgttcccgatttaaacgctcgcgtgaaaggcaagcgtgaagccgccgaacgcatggcgttcaacatgcctgtacagggcacggcagctgacctcatgaaacttgcaatggtgcgcctttttccacaattgcgtgaagttggtgcccgcatgactttgcaggtccacgatgaactcttgttagaagcgccaaaagagcgtgcggaagaggtggcagccctcgcgaaagaagttatggaaggcgtgtggcccttagcggtgcctcttgaagtcgaagttggtattggcgaggattggctggctgccaaagga

SEQ ID NO: 5204 - protein, 841 aa, synthetic construct
  REGION 1..841: note = Variant of DNA polymerase I from Thermus sp. strain 2.9
MHHHHHHGGSGVLPVFEPKGRVLLVDGHHLAYRNFFALKGLTTSLGEPVQGVYGFAKSLLKALKEDGDVVIVVFDAKAPSFRHEAYEAYKAGRAPTPEDFPRQLALMKELVDLLGLERLEVPGFEADDVLATLAKKAEREGYEVQILTADRDLFQLLSPRISVLHPEGHRITPEWLWEKYGLRPEQWVDFRALAGDPSDNIPGVKGIGEKTALKLLKEWGSLENLLKNLDQVKPESVREKILAHLEDLKLSRELSRVRTDLPLEVDFGRRREPDWEGLKAFLERLEFGSLLHEFGLLESPLLAEEAPWPPPEGAFLGYRLSRPEPMWAELLALAASAQGRVYRAEDPHGALRGLFEVRGLLAKDLAVVALREGLDLPPTDDPMLLAYLLDPSNTTPEGVARRYGGEWTEDAAKRALLAERLHENLLGRLQGEERLLWLYEEVEKPLSRVLAHMEATGVKLDVAYLENLSLEVAAHMRRLEEEVFRLAGRSFRLNSRDQLERVLFDELGLPPIGKTEKTGKRSTSAAVLEALREVHPIVDKILQYREMAKLKGTYIDRLPALVHPKTGRLHTRFNQTATATGRLSSSDPNLQNIPVRTPLGQKIRRAFVAEEGWRLVALDYRQIELRVLAHLSGDENLIRVFQEGKDIHTQTASWMFGLSAEAIDPLMRRAAKTINFGVLYGMSAFRLSQELGIPYEEAQAFIQKYFQSYPKVKAWIEKTLREGRTRGYVETLFGRRRYVPDLNARVKGKREAAERMAFNMPVQGTAADLMKLAMVRLFPQLREVGARMTLQVHDELLLEAPKERAEEVAALAKEVMEGVWPLAVPLEVEVGIGEDWLAAKG

SEQ ID NO: 5205 - DNA, 2523 bp, synthetic construct
  misc_feature 1..2523: note = Variant of DNA polymerase I from Thermus sp. strain 2.9
  source 1..2523: mol_type = other DNA
atgcaccatcatcatcatcatggcggtagcggcgtgttaccggtgttcgagcctaaaggtcgcgtgcttctggttgatggccatcatctcgcgtatcgtaacttctttgccctgaaaggattaaccaccagcctgggcgagccggtacagggtgtctacggctttgcaaagtcgctcctgaaagctctgaaagaagacggtgatgtggtgattgttgtctttgatgcgaaagcgccaagttttcgccacgaagcgtacgaagcttacaaagccgggcgtgctccaacgccggaagactttcctcgccaattggcgcttatgaaggaattagtggatttgcttggcctcgaacgcttggaagttcccggtttcgaggcagacgacgtattagcgactctcgcaaagaaagccgaacgtgagggctatgaagtccagatcttgacagcagatcgcgatcttttccagcttttatctccgcgcatctcggtgttacacccggaagggcatcgtatcaccccggaatggctctgggagaaatatggtttgcgtcccgaacaatgggtggattttcgcgccttagcaggcgatccgagcgacaatattccgggagttaaaggtatcggcgagaagacggcgctcaagctccttaaagaatgggggtcgttggagaacttgcttaagaatttagatcaggtcaaaccagagtcagtgcgtgagaagattcttgctcacctcgaagacctcaaattaagccgcgaattgtcccgtgtacgcaccgatttgccgctcgaagttgatttcggtcgccgccgcgaacctgactgggagggtcttaaagcgtttttagagcgtcttgaatttggttcgctcttgcatgaattcggccttttagaaagcccgttactggccgaagaagcaccttggccaccgcccgagggcgcgtttttaggttaccgtttgagtcgcccggaaccgatgtgggccgaattactggctcttgcagcgtctgcccagggacgtgtgtatcgcgcggaagaccctcatggtgcgctccgcggcctcttcgaagtccgtggactccttgccaaagacttagctgttgttgcattgcgcgaaggtcttgatttacctccgactgatgatccaatgcttcttgcgtacctcttggacccgtcaaacacgacgcccgaaggcgtagcccgtcgttacggcggcgagtggaccgaagatgcagcgaaacgcgcgttattggccgaacgtttgcacgaaaatacgttaggacgtttgcaaggcgaggaacgtctcctctggctttacgaagaagtggagaaaccattgagtcgcgtgctcgcgcatatggaagctaccggtgtcaaattagacgtggcgtatttggagaatctcagccttgaagttgctgcccacatgcgccgcttggaggaagaagtattccgtttagcaggccgttcctttcgccttaactctcgcgatcagttagaacgtgtgttgttcgatgaacttggtctccctcctatcggcaagacagagaagaccggtaaacgtagcacttcagcggcggttttagaagctcttcgcgaagtccatcccattgtggacaagatcttgcagtaccgcgaaatggcgaaattgaaaggcacctatattgaccgtcttccggcattagtccacccgaaaacgggacgcctccatacccgcttcaaccaaacagccacggcgaccggtcgtttgtcctcctctgatccaaaccttcagaatattccagtacgtaccccattgggccagaagatccgccgtgcgtttgtagctgaggagggttggcgtttagtggccctcgattatcgtcaaattgaattacgtgtccttgcccatctttctggcgatgagaacctcatccgcgtgtttcaggaaggcaaagacattcacactcaaacggcaagctggatgtttggattatcagctgaagcgatcgatcctttgatgcgtcgtgcagcgaagaccatcaatttcggtgttctctacggtatgagtgcctttcgtttgtcgcaggaattaggcattccctatgaagaagctcaggcgttcattcagaaatactttcaaagctatcccaaagttaaagcatggatcgagaagactctccgtgaaggccgcacacgtggttacgtagagaccttatttggacgtcgccgctatgttcccgatttaaacgctcgcgtgaaaggcaagcgtgaagccgccgaacgcatggcgttcaacatgcctgtacagggcacggcagctgacctcatgaaacttgcaatggtgcgcctttttccacaattgcgtgaagttggtgcccgcatgctcttgcaggtccacgatgaactcttgttagaagcgccaaaagagcgtgcggaagaggtggcagccctcgcgaaagaagttatggaaggcgtgtggcccttagcggtgcctcttgaagtcgaagttggtattggcgaggattggctggctgccaaagga

SEQ ID NO: 5206 - protein, 841 aa, synthetic construct
  REGION 1..841: note = Variant of DNA polymerase I from Thermus sp. strain 2.9
MHHHHHHGGSGVLPVFEPKGRVLLVDGHHLAYRNFFALKGLTTSLGEPVQGVYGFAKSLLKALKEDGDVVIVVFDAKAPSFRHEAYEAYKAGRAPTPEDFPRQLALMKELVDLLGLERLEVPGFEADDVLATLAKKAEREGYEVQILTADRDLFQLLSPRISVLHPEGHRITPEWLWEKYGLRPEQWVDFRALAGDPSDNIPGVKGIGEKTALKLLKEWGSLENLLKNLDQVKPESVREKILAHLEDLKLSRELSRVRTDLPLEVDFGRRREPDWEGLKAFLERLEFGSLLHEFGLLESPLLAEEAPWPPPEGAFLGYRLSRPEPMWAELLALAASAQGRVYRAEDPHGALRGLFEVRGLLAKDLAVVALREGLDLPPTDDPMLLAYLLDPSNTTPEGVARRYGGEWTEDAAKRALLAERLHENTLGRLQGEERLLWLYEEVEKPLSRVLAHMEATGVKLDVAYLENLSLEVAAHMRRLEEEVFRLAGRSFRLNSRDQLERVLFDELGLPPIGKTEKTGKRSTSAAVLEALREVHPIVDKILQYREMAKLKGTYIDRLPALVHPKTGRLHTRFNQTATATGRLSSSDPNLQNIPVRTPLGQKIRRAFVAEEGWRLVALDYRQIELRVLAHLSGDENLIRVFQEGKDIHTQTASWMFGLSAEAIDPLMRRAAKTINFGVLYGMSAFRLSQELGIPYEEAQAFIQKYFQSYPKVKAWIEKTLREGRTRGYVETLFGRRRYVPDLNARVKGKREAAERMAFNMPVQGTAADLMKLAMVRLFPQLREVGARMLLQVHDELLLEAPKERAEEVAALAKEVMEGVWPLAVPLEVEVGIGEDWLAAKG

SEQ ID NO: 5207 - DNA, 2523 bp, synthetic construct
  misc_feature 1..2523: note = Variant of DNA polymerase I from Thermus sp. strain 2.9
  source 1..2523: mol_type = other DNA
atgcaccatcatcatcatcatggcggtagcggcgtgttaccggtgttcgagcctaaaggtcgcgtgcttctggttgatggccatcatctcgcgtatcgtaacttctttgccctgaaaggattaaccaccagcctgggcgagccggtacagggtgtctacggctttgcaaagtcgctcctgaaagctctgaaagaagacggtgatgtggtgattgttgtctttgatgcgaaagcgccaagttttcgccacgaagcgtacgaagcttacaaagccgggcgtgctccaacgccggaagactttcctcgccaattggcgcttatgaaggaattagtggatttgcttggcctcgaacgcttggaagttcccggtttcgaggcagacgacgtattagcgactctcgcaaagaaagccgaacgtgagggctatgaagtccagatcttgacagcagatcgcgatcttttccagcttttatctccgcgcatctcggtgttacacccggaagggcatcgtatcaccccggaatggctctgggagaaatatggtttgcgtcccgaacaatgggtggattttcgcgccttagcaggcgatccgagcgacaatattccgggagttaaaggtatcggcgagaagacggcgctcaagctccttaaagaatgggggtcgttggagaacttgcttaagaatttagatcaggtcaaaccagagtcagtgcgtgagaagattcttgctcacctcgaagacctcaaattaagccgcgaattgtcccgtgtacgcaccgatttgccgctcgaagttgatttcggtcgccgccgcgaacctgactgggagggtcttaaagcgtttttagagcgtcttgaatttggttcgctcttgcatgaattcggccttttagaaagcccgttactggccgaagaagcaccttggccaccgcccgagggcgcgtttttaggttaccgtttgagtcgcccggaaccgatgtgggccgaattactggctcttgcagcgtctgcccagggacgtgtgtatcgcgcggaagaccctcatggtgcgctccgcggcctcttcgaagtccgtggactccttgccaaagacttagctgttgttgcattgcgcgaaggtcttgatttacctccgactgatgatccaatgcttcttgcgtacctcttggacccgtcaaacacgacgcccgaaggcgtagcccgtcgttacggcggcgagtggaccgaagatgcagcgaaacgcgcgttattggccgaacgtttgcacgaaaatttattaggacgtttgcaaggcgaggaacgtctcctctggctttacgaagaagtggagaaaccattgagtcgcgtgctcgcgcatatggaagctaccggtgtcaaattagacgtggcgtatttggagaatctcagccttgaagttgctgcccacatgcgccgcttggaggaagaagtattccgtttagcaggccgttcctttcgccttaactctcgcgatcagttagaacgtgtgttgttcgatgaacttggtctccctcctatcggcaagacagagaagaccggtaaacgtagcacttcagcggcggttttagaagctcttcgcgaagtccatcccattgtggacaagatcttgcagtaccgcgaaatggcgaaattgaaaggcacctatattgaccgtcttccggcattagtccacccgaaaacgggacgcctccatacccgcttcaaccaaacagccacggcgaccggtcgtttgtcctcctctgatccaaaccttcagaatattccagtacgtaccccattgggccagaagatccgccgtgcgtttgtagctgagcttggttggcgtttagtggccctcgattatcgtcaaattgaattacgtgtccttgcccatctttctggcgatgagaacctcatccgcgtgtttcaggaaggcaaagacattcacactcaaacggcaagctggatgtttggattatcagctgaagcgatcgatcctttgatgcgtcgtgcagcgaagaccatcaatttcggtgttctctacggtatgagtgcctttcgtttgtcgcaggaattaggcattccctatgaagaagctcaggcgttcattcagaaatactttcaaagctatcccaaagttaaagcatggatcgagaagactctccgtgaaggccgcacacgtggttacgtagagaccttatttggacgtcgccgctatgttcccgatttaaacgctcgcgtgaaaggcaagcgtgaagccgccgaacgcatggcgttcaacatgcctgtacagggcacggcagctgacctcatgaaacttgcaatggtgcgcctttttccacaattgcgtgaagttggtgcccgcatgctcttgcaggtccacgatgaactcttgttagaagcgccaaaagagcgtgcggaagaggtggcagccctcgcgaaagaagttatggaaggcgtgtggcccttagcggtgcctcttgaagtcgaagttggtattggcgaggattggctggctgccaaagga

SEQ ID NO: 5208 - protein, 841 aa, synthetic construct
  REGION 1..841: note = Variant of DNA polymerase I from Thermus sp. strain 2.9
MHHHHHHGGSGVLPVFEPKGRVLLVDGHHLAYRNFFALKGLTTSLGEPVQGVYGFAKSLLKALKEDGDVVIVVFDAKAPSFRHEAYEAYKAGRAPTPEDFPRQLALMKELVDLLGLERLEVPGFEADDVLATLAKKAEREGYEVQILTADRDLFQLLSPRISVLHPEGHRITPEWLWEKYGLRPEQWVDFRALAGDPSDNIPGVKGIGEKTALKLLKEWGSLENLLKNLDQVKPESVREKILAHLEDLKLSRELSRVRTDLPLEVDFGRRREPDWEGLKAFLERLEFGSLLHEFGLLESPLLAEEAPWPPPEGAFLGYRLSRPEPMWAELLALAASAQGRVYRAEDPHGALRGLFEVRGLLAKDLAVVALREGLDLPPTDDPMLLAYLLDPSNTTPEGVARRYGGEWTEDAAKRALLAERLHENLLGRLQGEERLLWLYEEVEKPLSRVLAHMEATGVKLDVAYLENLSLEVAAHMRRLEEEVFRLAGRSFRLNSRDQLERVLFDELGLPPIGKTEKTGKRSTSAAVLEALREVHPIVDKILQYREMAKLKGTYIDRLPALVHPKTGRLHTRFNQTATATGRLSSSDPNLQNIPVRTPLGQKIRRAFVAELGWRLVALDYRQIELRVLAHLSGDENLIRVFQEGKDIHTQTASWMFGLSAEAIDPLMRRAAKTINFGVLYGMSAFRLSQELGIPYEEAQAFIQKYFQSYPKVKAWIEKTLREGRTRGYVETLFGRRRYVPDLNARVKGKREAAERMAFNMPVQGTAADLMKLAMVRLFPQLREVGARMLLQVHDELLLEAPKERAEEVAALAKEVMEGVWPLAVPLEVEVGIGEDWLAAKG

SEQ ID NO: 5209 - DNA, 2523 bp, synthetic construct
  misc_feature 1..2523: note = Variant of DNA polymerase I from Thermus sp. strain 2.9
  source 1..2523: mol_type = other DNA
atgcaccatcatcatcatcatggcggtagcggcgtgttaccggtgttcgagcctaaaggtcgcgtgcttctggttgatggccatcatctcgcgtatcgtaacttctttgccctgaaaggattaaccaccagcctgggcgagccggtacagggtgtctacggctttgcaaagtcgctcctgaaagctctgaaagaagacggtgatgtggtgattgttgtctttgatgcgaaagcgccaagttttcgccacgaagcgtacgaagcttacaaagccgggcgtgctccaacgccggaagactttcctcgccaattggcgcttatgaaggaattagtggatttgcttggcctcgaacgcttggaagttcccggtttcgaggcagacgacgtattagcgactctcgcaaagaaagccgaacgtgagggctatgaagtccagatcttgacagcagatcgcgatcttttccagcttttatctccgcgcatctcggtgttacacccggaagggcatcgtatcaccccggaatggctctgggagaaatatggtttgcgtcccgaacaatgggtggattttcgcgccttagcaggcgatccgagcgacaatattccgggagttaaaggtatcggcgagaagacggcgctcaagctccttaaagaatgggggtcgttggagaacttgcttaagaatttagatcaggtcaaaccagagtcagtgcgtgagaagattcttgctcacctcgaagacctcaaattaagccgcgaattgtcccgtgtacgcaccgatttgccgctcgaagttgatttcggccgccgccgcgaacctgactgggagggtcttaaagcgtttttagagcgtcttgaatttggttcgctcttgcatgaattcggccttttagaaagcccgttaccggccgaagaagcaccttggccaccgcccgagggcgcgtttttaggttaccgtttgagtcgcccggaaccgatgtgggccgaattactggctcttgcagcgtctgcccagggacgtgtgtatcgcgcggaagaccctcatggtgcgctccgcggcctcttcgaagtccgtggactccttgccaaagacttagctgttgttgcattgcgcgaaggtcttgatttacctccgactgatgatccaatgcttcttgcgtacctcttggacccgtcaaacacgacgcccgaaggcgtagcccgtcgttacggcggcgagtggaccgaagatgcagcgaaacgcgcgttattggccgaacgtttgcacgaaaatttattaggacgtttgcaaggcgaggaacgtctcctctggctttacgaagaagtggagaaaccattgagtcgcgtgctcgcgcatatggaagctaccggtgtcaaattagacgtggcgtatttggagaatctcagccttgaagttgctgcccatatgcgccgcttggaggaagaagtattccgtttagcaggccgttcctttcgccttaactctcgcgatcagttagaacgtgtgttgttcgatgaacttggtctccctcctatcggcaagacagagaagaccggtaaacgtagcacttcagcggcggttttagaagctcttcgcgaagtccatcccattgtggacaagatcttgcagtaccgcgaaatggcgaaattgaaaggcacctatattgaccgtcttccggcattagtccacccgaaaacgggacgcctccatacccgcttcaaccaaacagccacggcgaccggtcgtttgtccagttctgatccaaaccttcagaatattccagtacgtaccccattgggccagaagatccgccgtgcgtttgtagctgaggagggttggcgtttagtggccctcgattatcgtcaaattgaattacgtgtccttgcccatctttctggcgatgagaacctcatccgcgtgtttcaggaaggcaaagacattcacactcaaacggcaagctggatgtttggattatcagctgaagcgatcgatcctttgatgcgtcgtgcagcgaagaccatcaatttcggtgttctctacggtatgagtgcctttcgtttgtcgcaggaattaggcattccctatgaagaagctcaggcgttcattcagaaatactttcaaagctatcccaaagttaaagcatggatcgagaagactctccgtgaaggccgcacacgtggttacgtagagaccttatttggacgtcgccgctatgttcccgatttaaacgctcgcgtgaaaggcgtacgtgaagccgccgaacgcatggcgttcaacatgcctgtacagggcacggcagctgacctcatgaaacttgcaatggtgcgcctttttccacaattgcgtgaagttggtgcccgcatgctcttgcaggtccacgatgaactcttgttagaagcgccaaaagagcgtgcggaagaggtggcagccctcgcgaaagaagttatggaaggcgtgtggcccttagcggtgcctcttgaagtcgaagttggtattggcgaggattggctggctgccaaagga

SEQ ID NO: 5210 - protein, 841 aa, synthetic construct
  REGION 1..841: note = Variant of DNA polymerase I from Thermus sp. strain 2.9
MHHHHHHGGSGVLPVFEPKGRVLLVDGHHLAYRNFFALKGLTTSLGEPVQGVYGFAKSLLKALKEDGDVVIVVFDAKAPSFRHEAYEAYKAGRAPTPEDFPRQLALMKELVDLLGLERLEVPGFEADDVLATLAKKAEREGYEVQILTADRDLFQLLSPRISVLHPEGHRITPEWLWEKYGLRPEQWVDFRALAGDPSDNIPGVKGIGEKTALKLLKEWGSLENLLKNLDQVKPESVREKILAHLEDLKLSRELSRVRTDLPLEVDFGRRREPDWEGLKAFLERLEFGSLLHEFGLLESPLPAEEAPWPPPEGAFLGYRLSRPEPMWAELLALAASAQGRVYRAEDPHGALRGLFEVRGLLAKDLAVVALREGLDLPPTDDPMLLAYLLDPSNTTPEGVARRYGGEWTEDAAKRALLAERLHENLLGRLQGEERLLWLYEEVEKPLSRVLAHMEATGVKLDVAYLENLSLEVAAHMRRLEEEVFRLAGRSFRLNSRDQLERVLFDELGLPPIGKTEKTGKRSTSAAVLEALREVHPIVDKILQYREMAKLKGTYIDRLPALVHPKTGRLHTRFNQTATATGRLSSSDPNLQNIPVRTPLGQKIRRAFVAEEGWRLVALDYRQIELRVLAHLSGDENLIRVFQEGKDIHTQTASWMFGLSAEAIDPLMRRAAKTINFGVLYGMSAFRLSQELGIPYEEAQAFIQKYFQSYPKVKAWIEKTLREGRTRGYVETLFGRRRYVPDLNARVKGVREAAERMAFNMPVQGTAADLMKLAMVRLFPQLREVGARMLLQVHDELLLEAPKERAEEVAALAKEVMEGVWPLAVPLEVEVGIGEDWLAAKG

SEQ ID NO: 5211 - DNA, 2523 bp, synthetic construct
  misc_feature 1..2523: note = Variant of DNA polymerase I from Thermus sp. strain 2.9
  source 1..2523: mol_type = other DNA
atgcaccatcatcatcatcatggcggtagcggcgtgttaccggtgttcgagcctaaaggtcgcgtgcttctggttgatggccatcatctcgcgtatcgtaacttctttgccctgaaaggattaaccaccagcctgggcgagccggtacagggtgtctacggctttgcaaagtcgctcctgaaagctctgaaagaagacggtgatgtggtgattgttgtctttgatgcgaaagcgccaagttttcgccacgaagcgtacgaagcttacaaagccgggcgtgctccaacgccggaagactttcctcgccaattggcgcttatgaaggaattagtggatttgcttggcctcgaacgcttggaagttcccggtttcgaggcagacgacgtattagcgactctcgcaaagaaagccgaacgtgagggctatgaagtccagatcttgacagcagatcgcgatcttttccagcttttatctccgcgcatctcggtgttacacccggaagggcatcgtatcaccccggaatggctctgggagaaatatggtttgcgtcccgaacaatgggtggattttcgcgccttagcaggcgatccgagcgacaatattccgggagttaaaggtatcggcgagaagacggcgctcaagctccttaaagaatgggggtcgttggagaacttgcttaagaatttagatcaggtcaaaccagagtcagtgcgtgagaagattcttgctcacctcgaagacctcaaattaagccgcgaattgtcccgtgtacgcaccgatttgccgctcgaagttgatttcggtcgccgccgcgaacctgactgggagggtcttaaagcgtttttagagcgtcttgaatttggttcgctcttgcatgaattcggccttttagaaagcccgttactggccgaagaagcaccttggccaccgcccgagggcgcgtttttaggttaccgtttgagtcgcccggaaccgatgtgggccgaattactggctcttgcagcgtctgcccagggacgtgtgtatcgcgcggaagaccctcatggtgcgctccgcggcctcttcgaagtccgtggactccttgccaaagacttagctgttgttgcattgcgcgaaggtcttgatttacctccgactgatgatccaatgcttcttgcgtacctcttggacccgtcaaacacgacgcccgaaggcgtagcccgtcgttacggcggcgagtggaccgaagatgcagcgaaacgcgcgttattggccgaacgtttgcacgaaaatttattaggacgtttgcaaggcgaggaacgtctcctctggctttacgaagaagtggagaaaccattgagtcgcgtgctcgcgcatatggaagctaccggtgtcaaattagacgtggcgtatttggagaatctcagccttgaagttgctgcccacatgcgccgcttggaggaagaagtattccgtttagcaggccgttcctttcgccttaactctcgcgatcagttagaacgtgtgttgttcgatcatcttggtctccctcctatcggcaagacagagaagaccggtaaacgtagcacttcagcggcggttttagaagctcttcgcgaagtccatcccattgtggacaagatcttgcagtaccgcgaaatggcgaaattgaaaggcacctatattgaccgtcttccggcattagtccacccgaaaacgggacgcctccatacccgcttcaaccaaacagccacggcgaccggtcgtttgtcctcctctgatccaaaccttcagaatattccagtacgtaccccattgggccagaagatccgccgtgcgtttgtagctgaggagggttggcgtttagtggccctcgattatcgtcaaattgaattacgtgtccttgcccatctttctggcgatgagaacctcatccgcgtgtttcaggaaggcaaagacattcacactcaaacggcaagctggatgtttggattatcagctgaagcgatcgatcctttgatgcgtcgtgcagcgaagaccatcaatttcggtgttctctacggtatgagtgcctttcgtttgtcgcaggaattaggcattccctatgaagaagctcaggcgttcattcagaaatactttcaaagctatcccaaagttaaagcatggatcgagaagactctccgtgaaggccgcacacgtggttacgtagagaccttatttggacgtcgccgctatgttcccgatttaaacgctcgcgtgaaaggcaagcgtgaagccgccgaacgcatggcgttcaacatgcctgtacagggcacggcagctgacctcatgaaacttgcaatggtgcgcctttttccacaattgcgtgaagttggtgcccgcatgctcttgcaggtccacgatgaactcttgttagaagcgccaaaagagcgtgcggaagaggtggcagccctcgcgaaagaagttatggaaggcgtgtggcccttagcggtgcctcttgaagtcgaagttggtattggcgaggattggctggctgccaaagga

SEQ ID NO: 5212 - protein, 841 aa, synthetic construct
  REGION 1..841: note = Variant of DNA polymerase I from Thermus sp. strain 2.9
MHHHHHHGGSGVLPVFEPKGRVLLVDGHHLAYRNFFALKGLTTSLGEPVQGVYGFAKSLLKALKEDGDVVIVVFDAKAPSFRHEAYEAYKAGRAPTPEDFPRQLALMKELVDLLGLERLEVPGFEADDVLATLAKKAEREGYEVQILTADRDLFQLLSPRISVLHPEGHRITPEWLWEKYGLRPEQWVDFRALAGDPSDNIPGVKGIGEKTALKLLKEWGSLENLLKNLDQVKPESVREKILAHLEDLKLSRELSRVRTDLPLEVDFGRRREPDWEGLKAFLERLEFGSLLHEFGLLESPLLAEEAPWPPPEGAFLGYRLSRPEPMWAELLALAASAQGRVYRAEDPHGALRGLFEVRGLLAKDLAVVALREGLDLPPTDDPMLLAYLLDPSNTTPEGVARRYGGEWTEDAAKRALLAERLHENLLGRLQGEERLLWLYEEVEKPLSRVLAHMEATGVKLDVAYLENLSLEVAAHMRRLEEEVFRLAGRSFRLNSRDQLERVLFDHLGLPPIGKTEKTGKRSTSAAVLEALREVHPIVDKILQYREMAKLKGTYIDRLPALVHPKTGRLHTRFNQTATATGRLSSSDPNLQNIPVRTPLGQKIRRAFVAEEGWRLVALDYRQIELRVLAHLSGDENLIRVFQEGKDIHTQTASWMFGLSAEAIDPLMRRAAKTINFGVLYGMSAFRLSQELGIPYEEAQAFIQKYFQSYPKVKAWIEKTLREGRTRGYVETLFGRRRYVPDLNARVKGKREAAERMAFNMPVQGTAADLMKLAMVRLFPQLREVGARMLLQVHDELLLEAPKERAEEVAALAKEVMEGVWPLAVPLEVEVGIGEDWLAAKG

SEQ ID NO: 5213 - DNA, 2523 bp, synthetic construct
  misc_feature 1..2523: note = Variant of DNA polymerase I from Thermus sp. strain 2.9
  source 1..2523: mol_type = other DNA
atgcaccatcatcatcatcatggcggtagcggcgtgttaccggtgttcgagcctaaaggtcgcgtgcttctggttgatggccatcatctcgcgtatcgtaacttctttgccctgaaaggattaaccaccagcctgggcgagccggtacagggtgtctacggctttgcaaagtcgctcctgaaagctctgaaagaagacggtgatgtggtgattgttgtctttgatgcgaaagcgccaagttttcgccacgaagcgtacgaagcttacaaagccgggcgtgctccaacgccggaagactttcctcgccaattggcgcttatgaaggaattagtggatttgcttggcctcgaacgcttggaagttcccggtttcgaggcagacgacgtattagcgactctcgcaaagaaagccgaacgtgagggctatgaagtccagatcttgacagcagatcgcgatcttttccagcttttatctccgcgcatctcggtgttacacccggaagggcatcgtatcaccccggaatggctctgggagaaatatggtttgcgtcccgaacaatgggtggattttcgcgccttagcaggcgatccgagcgacaatattccgggagttaaaggtatcggcgagaagacggcgctcaagctccttaaagaatgggggtcgttggagaacttgcttaagaatttagatcaggtcaaaccagagtcagtgcgtgagaagattcttgctcacctcgaagacctcaaattaagccgcgaattgtcccgtgtacgcaccgatttgccgctcgaagttgatttcggtcgccgccgcgaacctgactgggagggtcttaaagcgtttttagagcgtcttgaatttggttcgctcttgcatgaattcggccttttagaaagcccgttactggccgaagaagcaccttggccaccgcccgagggcgcgtttttaggttaccgtttgagtcgcccggaaccgatgtgggccgaattactggctcttgcagcgtctgcccagggacgtgtgtatcgcgcggaagaccctcatggtgcgctccgcggcctcttcgaagtccgtggactccttgccaaagacttagctgttgttgcattgcgcgaaggtcttgatttacctccgactgatgatccaatgcttctttcgtacctcttggacccgtcaaacacgacgcccgaaggcgtagcccgtcgttacggcggcgagtggaccgaagatgcagcgaaacgcgcgttattggccgaacgtttgcacgaaaatttattaggacgtttgcaaggcgaggaacgtctcctctggctttacgaagaagtggagaaaccattgagtcgcgtgctcgcgcatatggaagctaccggtgtcaaattagacgtggcgtatttggagaatctcagccttgaagttgctgcccacatgcgccgcttggaggaagaagtattccgtttagcaggccgttcctttcgccttaactctcgcgatcagttagaacgtgtgttgttcgatgaacttggtctccctcctatcggcaagacagagaagaccggtaaacgtagcacttcagcggcggttttagaagctcttcgcgaagtccatcccattgtggacaagatcttgcagtaccgcgaaatggcgaaattgaaaggcacctatattgaccgtcttccggcattagtccacccgaaaacgggacgcctccatacccgcttcaaccaaacagccacggcgaccggtcgtttgtcctcctctgatccaaaccttcagaatattccagtacgtaccccattgggccagaagatccgccgtgcgtttgtagctgaggagggttggcgtttagtggccctcgattatcgtcaaattgaattacgtgtccttgcccatctttctggcgatgagaacctcatccgcgtgtttcaggaaggcaaagacattcacactcaaacggcaagctggatgtttggattatcagctgaagcgatcgatcctttgatgcgtcgtgcagcgaagaccatcaatttcggtgttctctacggtatgagtgcctttcgtttgtcgcaggaattaggcattccctatgaagaagctcaggcgttcattcagaaatactttcaaagctatcccaaagttaaagcatggatcgagaagactctccgtgaaggccgcacacgtggttacgtagagaccttatttggacgtcgccgctatgttcccgatttaaacgctcgcgtgaaaggcaagcgtgaagccgccgaacgcatggcgttcaacatgcctgtacagggcacggcagctgacctcatgaaacttgcaatggtgcgcctttttccacaattgcgtgaagttggtgcccgcatgctcttgcaggtccacgatgaactcttgttagaagcgccaaaagagcgtgcggaagaggtggcagccctcgcgaaagaagttatggaaggcgtgtggcccttagcggtgcctcttgaagtcgaagttggtattggcgaggattggctggctgccaaagga

SEQ ID NO: 5214 - protein, 841 aa, synthetic construct
  REGION 1..841: note = Variant of DNA polymerase I from Thermus sp. strain 2.9
MHHHHHHGGSGVLPVFEPKGRVLLVDGHHLAYRNFFALKGLTTSLGEPVQGVYGFAKSLLKALKEDGDVVIVVFDAKAPSFRHEAYEAYKAGRAPTPEDFPRQLALMKELVDLLGLERLEVPGFEADDVLATLAKKAEREGYEVQILTADRDLFQLLSPRISVLHPEGHRITPEWLWEKYGLRPEQWVDFRALAGDPSDNIPGVKGIGEKTALKLLKEWGSLENLLKNLDQVKPESVREKILAHLEDLKLSRELSRVRTDLPLEVDFGRRREPDWEGLKAFLERLEFGSLLHEFGLLESPLLAEEAPWPPPEGAFLGYRLSRPEPMWAELLALAASAQGRVYRAEDPHGALRGLFEVRGLLAKDLAVVALREGLDLPPTDDPMLLSYLLDPSNTTPEGVARRYGGEWTEDAAKRALLAERLHENLLGRLQGEERLLWLYEEVEKPLSRVLAHMEATGVKLDVAYLENLSLEVAAHMRRLEEEVFRLAGRSFRLNSRDQLERVLFDELGLPPIGKTEKTGKRSTSAAVLEALREVHPIVDKILQYREMAKLKGTYIDRLPALVHPKTGRLHTRFNQTATATGRLSSSDPNLQNIPVRTPLGQKIRRAFVAEEGWRLVALDYRQIELRVLAHLSGDENLIRVFQEGKDIHTQTASWMFGLSAEAIDPLMRRAAKTINFGVLYGMSAFRLSQELGIPYEEAQAFIQKYFQSYPKVKAWIEKTLREGRTRGYVETLFGRRRYVPDLNARVKGKREAAERMAFNMPVQGTAADLMKLAMVRLFPQLREVGARMLLQVHDELLLEAPKERAEEVAALAKEVMEGVWPLAVPLEVEVGIGEDWLAAKG

SEQ ID NO: 5215 - DNA, 2523 bp, synthetic construct
  misc_feature 1..2523: note = Variant of DNA polymerase I from Thermus sp. strain 2.9
  source 1..2523: mol_type = other DNA
atgcaccatcatcatcatcatggcggtagcggcgtgttaccggtgttcgagcctaaaggtcgcgtgcttctggttgatggccatcatctcgcgtatcgtaacttctttgccctgaaaggattaaccaccagcctgggcgagccggtacagggtgtctacggctttgcaaagtcgctcctgaaagctctgaaagaagacggtgatgtggtgattgttgtctttgatgcgaaagcgccaagttttcgccacgaagcgtacgaagcttacaaagccgggcgtgctccaacgccggaagactttcctcgccaattggcgcttatgaaggaattagtggatttgcttggcctcgaacgcttggaagttcccggtttcgaggcagacgacgtattagcgactctcgcaaagaaagccgaacgtgagggctatgaagtccagatcttgacagcagatcgcgatcttttccagcttttatctccgcgcatctcggtgttacacccggaagggcatcgtatcaccccggaatggctctgggagaaatatggtttgcgtcccgaacaatgggtggattttcgcgccttagcaggcgatccgagcgacaatattccgggagttaaaggtatcggcgagaagacggcgctcaagctccttaaagaatgggggtcgttggagaacttgcttaagaatttagatcaggtcaaaccagagtcagtgcgtgagaagattcttgctcacctcgaagacctcaaattaagccgcgaattgtcccgtgtacgcaccgatttgccgctcgaagttgatttcggtcgccgccgcgaacctgactgggagggtcttaaagcgtttttagagcgtcttgaatttggttcgctcttgcatgaattcggccttttagaaagcccgttactggccgaagaagcaccttggccaccgcccgagggcgcgtttttaggttaccgtttgagtcgcccggaaccgatgtgggccgaattactggctcttgcagcgtctgcccagggacgtgtgtatcgcgcggaagaccctcatggtgcgctccgcggcctcttcgaagtccgtggactccttgccaaagacttagctgttgttgcattgcgcgaaggtcttgatttacctccgactgatgatccaatgcttcttgcgtacctcttggacccgtcaaacacgacgcccgaaggcgtagcccgtcgttacggcggcgagtggaccgaagatgcagcgaaacgcgcgttattggccgaacgtttgcacgaaaatttattaggacgtttgcaaggcgaggaacgtctcctctggctttacgaagaagtggagaaaccattgagtcgcgtgctcgcgcatatggaagctaccggtgtcaaattagacgtggcgtatttggagaatcttcaccttgaagttgctgcccacatgcgccgcttggaggaagaagtattccgtttagcaggccgttcctttcgccttaactctcgcgatcagttagaacgtgtgttgttcgatgaacttggtctccctcctatcggcaagacagagaagaccggtaaacgtagcacttcagcggcggttttagaagctcttcgcgaagtccatcccattgtggacaagatcttgcagtaccgcgaaatggcgaaattgaaaggcacctatattgaccgtcttccggcattagtccacccgaaaacgggacgcctccatacccgcttcaaccaaacagccacggcgaccggtcgtttgtcctcctctgatccaaaccttcagaatattccagtacgtaccccattgggccagaagatccgccgtgcgtttgtagctgaggagggttggcgtttagtggccctcgattatagtcaaattgaattacgtgtccttgcccatctttctggcgatgagaacctcatccgcgtgtttcaggaaggcaaagacattcacactcaaacggcaagctggatgtttggattatcagctgaagcgatcgatcctttgatgcgtcgtgcagcgaagaccatcaatttcggtgttctctacggtatgagtgcctttcgtttgtcgcaggaattaggcattccctatgaagaagctcaggcgttcattcagaaatactttcaaagctatcccaaagttaaagcatggatcgagaagactctccgtgaaggccgcacacgtggttacgtagagaccttatttggacgtcgccgctatgttcccgatttaaacgctcgcgtgaaaagcaaacgtgaagccgccgaacgcatggcgttcaacatgcctgtacagggcacggcagctgacctcatgaaacttgcaatggtgcgcctttttccacaattgcgtgaagttggtgcccgcatgctcttgcaggtccacgatgaactcttgttagaagcgccaaaagagcgtgcggaagaggtggcagccctcgcgaaagaagttatggaaggcgtgtggcccttagcggtgcctcttgaagtcgaagttggtattggcgaggattggctggctgccaaagga

SEQ ID NO: 5216 - protein, 841 aa, synthetic construct
  REGION 1..841: note = Variant of DNA polymerase I from Thermus sp. strain 2.9
MHHHHHHGGSGVLPVFEPKGRVLLVDGHHLAYRNFFALKGLTTSLGEPVQGVYGFAKSLLKALKEDGDVVIVVFDAKAPSFRHEAYEAYKAGRAPTPEDFPRQLALMKELVDLLGLERLEVPGFEADDVLATLAKKAEREGYEVQILTADRDLFQLLSPRISVLHPEGHRITPEWLWEKYGLRPEQWVDFRALAGDPSDNIPGVKGIGEKTALKLLKEWGSLENLLKNLDQVKPESVREKILAHLEDLKLSRELSRVRTDLPLEVDFGRRREPDWEGLKAFLERLEFGSLLHEFGLLESPLLAEEAPWPPPEGAFLGYRLSRPEPMWAELLALAASAQGRVYRAEDPHGALRGLFEVRGLLAKDLAVVALREGLDLPPTDDPMLLAYLLDPSNTTPEGVARRYGGEWTEDAAKRALLAERLHENLLGRLQGEERLLWLYEEVEKPLSRVLAHMEATGVKLDVAYLENLHLEVAAHMRRLEEEVFRLAGRSFRLNSRDQLERVLFDELGLPPIGKTEKTGKRSTSAAVLEALREVHPIVDKILQYREMAKLKGTYIDRLPALVHPKTGRLHTRFNQTATATGRLSSSDPNLQNIPVRTPLGQKIRRAFVAEEGWRLVALDYSQIELRVLAHLSGDENLIRVFQEGKDIHTQTASWMFGLSAEAIDPLMRRAAKTINFGVLYGMSAFRLSQELGIPYEEAQAFIQKYFQSYPKVKAWIEKTLREGRTRGYVETLFGRRRYVPDLNARVKSKREAAERMAFNMPVQGTAADLMKLAMVRLFPQLREVGARMLLQVHDELLLEAPKERAEEVAALAKEVMEGVWPLAVPLEVEVGIGEDWLAAKG

SEQ ID NO: 5217 - DNA, 2523 bp, synthetic construct
  misc_feature 1..2523: note = Variant of DNA polymerase I from Thermus sp. strain 2.9
  source 1..2523: mol_type = other DNA
atgcaccatcatcatcatcatggcggtagcggcgtgttaccggtgttcgagcctaaaggtcgcgtgcttctggttgatggccatcatctcgcgtatcgtaacttctttgccctgaaaggattaaccaccagcctgggcgagccggtacagggtgtctacggctttgcaaagtcgctcctgaaagctctgaaagaagacggtgatgtggtgattgttgtctttgatgcgaaagcgccaagttttcgccacgaagcgtacgaagcttacaaagccgggcgtgctccaacgccggaagactttcctcgccaattggcgcttatgaaggaattagtggatttgcttggcctcgaacgcttggaagttcccggtttcgaggcagacgacgtattagcgactctcgcaaagaaagccgaacgtgagggctatgaagtccagatcttgacagcagatcgcgatcttttccagcttttatctccgcgcatctcggtgttacacccggaagggcatcgtatcaccccggaatggctctgggagaaatatggtttgcgtcccgaacaatgggtggattttcgcgccttagcaggcgatccgagcgacaatattccgggagttaaaggtatcggcgagaagacggcgctcaagctccttaaagaatgggggtcgttggagaacttgcttaagaatttagatcaggtcaaaccagagtcagtgcgtgagaagattcttgctcacctcgaagacctcaaattaagccgcgaattgtcccgtgtacgcaccgatttgccgctcgaagttgatttcggtcgccgccgcgaacctgactgggagggtcttaaagcgtttttagagcgtcttgaatttggttcgctcttgcatgaattcggccttttagaaagcccgttactggccgaagaagcaccttggccaccgcccgagggcgcgtttttaggttaccgtttgagtcgcccggaaccgatgtgggccgaattactggctcttgcagcgtctgcccagggacgtgtgtatcgcgcggaagaccctcatggtgcgctccgcggcctcttcgaagtccgtaccctccttgccaaagacttagctgttgttgcattgcgcgaaggtcttgatttacctccgactgatgatccaatgcttcttgcgtacctcttggacccgtcaaacacgacgcccgaaggcgtagcccgtcgttacggcggcgagtggaccgaagatgcaggcaaacgcgcgttattggccgaacgtttgcacgaaaatttattaggacgtttgcaaggcgaggcgcgtctcctgtggctttacgaagaagtggagaaaccattgagtcgcgtgctcgcgcatatggaagctaccggtgtcaaattagacgtggcgtatttggagaatctcagccttgaagttgctgcccacatgcgccgcttggaggaagaagtattccgtttagcaggccgttcctttcgccttaactctcgcgatcagttagaacgtgtgttgttcgatgaacttggtctccctcctatcggcaagacagagaagaccggtaaacgtagcacttcagcggcggttttagaagctcttcgcgaagtccatcccattgtggacaagatcttgcagtaccgcgaaatggcgaaattgaaaggcacctatattgaccgtcttccggcattagtccacccgaaaacgggacgcctccatacccgcttcaaccaaacagccacggcgaccggtcgtttgtcctcctctgatccaaaccttcagaatattccagtacgtaccccattgggccagaagatccgccgtgcgtttgtagctgagccgggttgggcgttagtggccctcgattatcgtcaaattgaattacgtgtccttgcccatctttctggcgatgagaacctcatccgcgtgtttcaggaaggcaaagacattcacactcaaacggcaagctggatgtttggattatcagctgaagcgatcgatcctttgatgcgtcgtgcagcgaagaccatcaatttcggtgttctctacggtatgagtgcctttcgtttgtcgcaggaattaggcattccctatgaagaagctcaggcgttcattcagaaatactttcaaagctatcccaaagttaaagcatggatcgagaagactctccgtgaaggccgcacacgtggttacgtagagaccttatttggacgtcgccgctatgttcccgatttaaactcgcgcgtgaaaggcaagcgtgaagccgccgaacgcatggcgttcaacatgcctgtacagggcacggcagctgacctcatgaaacttgcaatggtgcgcctttttccacaattgcgtgaagttggtgcccgcatggatttgcaggtccacgatgaactcttgttagaagcgccaaaagagcgtgcggaagaggtggcagccctcgcgaaagaagttatggaaggcgtgtggcccttagcggtgcctcttgaagtcgaagttggtattggcgaggattggctggctgccaaagga

SEQ ID NO: 5218 - protein, 841 aa, synthetic construct
  REGION 1..841: note = Variant of DNA polymerase I from Thermus sp. strain 2.9
MHHHHHHGGSGVLPVFEPKGRVLLVDGHHLAYRNFFALKGLTTSLGEPVQGVYGFAKSLLKALKEDGDVVIVVFDAKAPSFRHEAYEAYKAGRAPTPEDFPRQLALMKELVDLLGLERLEVPGFEADDVLATLAKKAEREGYEVQILTADRDLFQLLSPRISVLHPEGHRITPEWLWEKYGLRPEQWVDFRALAGDPSDNIPGVKGIGEKTALKLLKEWGSLENLLKNLDQVKPESVREKILAHLEDLKLSRELSRVRTDLPLEVDFGRRREPDWEGLKAFLERLEFGSLLHEFGLLESPLLAEEAPWPPPEGAFLGYRLSRPEPMWAELLALAASAQGRVYRAEDPHGALRGLFEVRTLLAKDLAVVALREGLDLPPTDDPMLLAYLLDPSNTTPEGVARRYGGEWTEDAGKRALLAERLHENLLGRLQGEARLLWLYEEVEKPLSRVLAHMEATGVKLDVAYLENLSLEVAAHMRRLEEEVFRLAGRSFRLNSRDQLERVLFDELGLPPIGKTEKTGKRSTSAAVLEALREVHPIVDKILQYREMAKLKGTYIDRLPALVHPKTGRLHTRFNQTATATGRLSSSDPNLQNIPVRTPLGQKIRRAFVAEPGWALVALDYRQIELRVLAHLSGDENLIRVFQEGKDIHTQTASWMFGLSAEAIDPLMRRAAKTINFGVLYGMSAFRLSQELGIPYEEAQAFIQKYFQSYPKVKAWIEKTLREGRTRGYVETLFGRRRYVPDLNSRVKGKREAAERMAFNMPVQGTAADLMKLAMVRLFPQLREVGARMDLQVHDELLLEAPKERAEEVAALAKEVMEGVWPLAVPLEVEVGIGEDWLAAKG

SEQ ID NO: 5219 - DNA, 2523 bp, synthetic construct
  misc_feature 1..2523: note = Variant of DNA polymerase I from Thermus sp. strain 2.9
  source 1..2523: mol_type = other DNA
atgcaccatcatcatcatcatggcggtagcggcgtgttaccggtgttcgagcctaaaggtcgcgtgcttctggttgatggccatcatctcgcgtatcgtaacttctttgccctgaaaggattaaccaccagcctgggcgagccggtacagggtgtctacggctttgcaaagtcgctcctgaaagctctgaaagaagacggtgatgtggtgattgttgtctttgatgcgaaagcgccaagttttcgccacgaagcgtacgaagcttacaaagccgggcgtgctccaacgccggaagactttcctcgccaattggcgcttatgaaggaattagtggatttgcttggcctcgaacgcttggaagttcccggtttcgaggcagacgacgtattagcgactctcgcaaagaaagccgaacgtgagggctatgaagtccagatcttgacagcagatcgcgatcttttccagcttttatctccgcgcatctcggtgttacacccggaagggcatcgtatcaccccggaatggctctgggagaaatatggtttgcgtcccgaacaatgggtggattttcgcgccttagcaggcgatccgagcgacaatattccgggagttaaaggtatcggcgagaagacggcgctcaagctccttaaagaatgggggtcgttggagaacttgcttaagaatttagatcaggtcaaaccagagtcagtgcgtgagaagattcttgctcacctcgaagacctcaaattaagccgcgaattgtcccgtgtacgcaccgatttgccgctcgaagttgatttcggtcgccgccgcgaacctgactgggagggtcttaaagcgtttttagagcgtcttgaatttggttcgctcttgcatgaattcggccttttagaaagcccgttactggccgaagaagcaccttggccaccgcccgagggcgcgtttttaggttaccgtttgagtcgcccggaaccgatgtgggccgaattactggctcttgcagcgtctgcccagggacgtgtgtatcgcgcggaagaccctcatggtgcgctccgcggcctcttcgaagtccgtggactccttgccaaagacttagctgttgttgcattgcgcgaaggtcttgatttacctccgactgatgatccaatgcttcttgcgtacctcttggacccgtcaaacacgacgcccgaaggcgtagcccgtcgttacggcggcgagtggaccgaagatgcagcgaaacgcgcgttattggccgaacgtttgcacgaaaatttattaggacgtttgcaaggcgaggaacgtctcctctggctttacgaagaagtggagaaaccattgagtcgcgtgctcgcgcatatggaagctaccggtgtcaaattagacgtggcgtatttggagaatctcagccttgaagttgctgcccacatgcgccgcttggaggaagaagtattccgtttagcaggccgttcctttcgccttaactctcgcgatcagttagaacgtgtgttgttcgatgaacttggtctccctcctatcggcaagacagagaagaccggtaaacgtagcacttcagcggcggttttagaagctctttgggaagtccatcccattgtggacaagatcttgcagtaccgcgaaatggcgaaattgaaaggcacctatattgaccgtcttccggcattagtccacccgaaaacgggacgcctccatacccgcttcaaccaaacagccacggcgaccggtcgtttgtcctcctctgatccaaaccttcagaatattccagtacgtaccccattgggccagaagatccgccgtgcgtttgtagctgaggagggttggcgtttagtggccctcgattatcgtcaaattgaattacgtgtccttgcccatctttctggcgatgagaacctcatccgcgtgtttcaggaaggcaaagacattcacactcaaacggcaagctggatgtttggattatcagctgaagcgatcgatcctttgatgcgtcgtgcagcgaagaccatcaatttcggtgttctctacggtatgagtgcctttcgtttgtcgcaggaattaggcattccctatgaagaagctcaggcgttcattcagaaatactttcaaagctatcccaaagttaaagcatggatcgagaagactctccgtgaaggccgcacacgtggttacgtagagaccttatttggacgtcgccgctatgttcccgatttaaacgctcgcgtgaaaggcaagcgtgaagccgccgaacgcatggcgttcaacatgcctgtacagggcacggcagctgacctcatgaaacttgcaatggtgcgcctttttccacaattgcgtgaagttggtgcccgcatgctcttgcaggtccacgatgaactcttgttagaagcgccaaaagagcgtgcggaagaggtggcagccctcgcgaaagaagttatggaaggcgtgtggcccttagcggtgcctcttgaagtcgaagttggtattggcgaggattggctggctgccaaagga

SEQ ID NO: 5220 - protein, 841 aa, synthetic construct
  REGION 1..841: note = Variant of DNA polymerase I from Thermus sp. strain 2.9
MHHHHHHGGSGVLPVFEPKGRVLLVDGHHLAYRNFFALKGLTTSLGEPVQGVYGFAKSLLKALKEDGDVVIVVFDAKAPSFRHEAYEAYKAGRAPTPEDFPRQLALMKELVDLLGLERLEVPGFEADDVLATLAKKAEREGYEVQILTADRDLFQLLSPRISVLHPEGHRITPEWLWEKYGLRPEQWVDFRALAGDPSDNIPGVKGIGEKTALKLLKEWGSLENLLKNLDQVKPESVREKILAHLEDLKLSRELSRVRTDLPLEVDFGRRREPDWEGLKAFLERLEFGSLLHEFGLLESPLLAEEAPWPPPEGAFLGYRLSRPEPMWAELLALAASAQGRVYRAEDPHGALRGLFEVRGLLAKDLAVVALREGLDLPPTDDPMLLAYLLDPSNTTPEGVARRYGGEWTEDAAKRALLAERLHENLLGRLQGEERLLWLYEEVEKPLSRVLAHMEATGVKLDVAYLENLSLEVAAHMRRLEEEVFRLAGRSFRLNSRDQLERVLFDELGLPPIGKTEKTGKRSTSAAVLEALWEVHPIVDKILQYREMAKLKGTYIDRLPALVHPKTGRLHTRFNQTATATGRLSSSDPNLQNIPVRTPLGQKIRRAFVAEEGWRLVALDYRQIELRVLAHLSGDENLIRVFQEGKDIHTQTASWMFGLSAEAIDPLMRRAAKTINFGVLYGMSAFRLSQELGIPYEEAQAFIQKYFQSYPKVKAWIEKTLREGRTRGYVETLFGRRRYVPDLNARVKGKREAAERMAFNMPVQGTAADLMKLAMVRLFPQLREVGARMLLQVHDELLLEAPKERAEEVAALAKEVMEGVWPLAVPLEVEVGIGEDWLAAKG

SEQ ID NO: 5221 - DNA, 2523 bp, synthetic construct
  misc_feature 1..2523: note = Variant of DNA polymerase I from Thermus sp. strain 2.9
  source 1..2523: mol_type = other DNA
atgcaccatcatcatcatcatggcggtagcggcgtgttaccggtgttcgagcctaaaggtcgcgtgcttctggttgatggccatcatctcgcgtatcgtaacttctttgccctgaaaggattaaccaccagcctgggcgagccggtacagggtgtctacggctttgcaaagtcgctcctgaaagctctgaaagaagacggtgatgtggtgattgttgtctttgatgcgaaagcgccaagttttcgccacgaagcgtacgaagcttacaaagccgggcgtgctccaacgccggaagactttcctcgccaattggcgcttatgaaggaattagtggatttgcttggcctcgaacgcttggaagttcccggtttcgaggcagacgacgtattagcgactctcgcaaagaaagccgaacgtgagggctatgaagtccagatcttgacagcagatcgcgatcttttccagcttttatctccgcgcatctcggtgttacacccggaagggcatcgtatcaccccggaatggctctgggagaaatatggtttgcgtcccgaacaatgggtggattttcgcgccttagcaggcgatccgagcgacaatattccgggagttaaaggtatcggcgagaagacggcgctcaagctccttaaagaatgggggtcgttggagaacttgcttaagaatttagatcaggtcaaaccagagtcagtgcgtgagaagattcttgctcacctcgaagacctcaaattaagccgcgaattgtcccgtgtacgcaccgatttgccgctcgaagttgatttcggtcgccgccgcgaacctgactgggagggtcttaaagcgtttttagagcgtcttgaatttggttcgctcttgcatgaattcggccttttagaaagcccgttactggccgaagaagcaccttggccaccgcccgagggcgcgtttttaggttaccgtttgagtcgcccggaaccgatgtgggccgaattactggctcttgcagcgtctgcccagggacgtgtgtatcgcgcggaagaccctcatggtgcgctccgcggcctcttcgaagtccgtggactccttgccaaagacttagctgttgttgcattgcgcgaaggtcttgatttacctccgactgatgatccaatgcttcttgcgtacctcttggacccgtcaaacacgacgcccgaaggcgtagcccgtcgttacggcggcgagtggaccgaagatgcagcgaaacgcgcgttattggccgaacgtttgcacgaaaatttattaggacgtttgcaaggcgaggaacgtctcctctggctttacgaagaagtggagaaaccattgagtcgcgtgctcgcgcatatggaagctaccggtgtcaaattagacgtggcgtatttggagaatctcagccttgaagttgctgcccacatgcgccgcttggaggaagaagtattccgtttagcaggccgttcctttcgccttaactctcgcgatcagttagaacgtgtgttgttcgatgaacttggtctccctcctatcggcaagacagagaagaccggtaaacgtagcacttcagcggcggttttagaagctcttcgcgaagtccatcccattgtggacaagatcttgcagtaccgcgaaatggcgaaattgaaaggcacctatattgaccgtcttccggcattagtccacccgaaaacgggacgcctccatacccgcttcaaccaaacagccacggcgaccggtcgtttgtcctcctctgatccaaaccttcagaatattccagtacgtaccccattgggccagaagatccgccgtgcgtttgtagctgaggagggttggcgtttagtggccctcgattatcgtcaaattgaattacgtgtccttgccgcgctttctggcgatgagaacctcatccgcgtgtttcaggaaggcaaagacattcacactcaaacggcaagctggatgtttggattatcagctgaagcgatcgatcctttgatgcgtcgtgcagcgaagaccatcaatttcggtgttctctacggtatgagtgcctttcgtttgtcgcaggaattaggcattccctatgaagaagctcaggcgttcattcagaaatactttcaaagctatcccaaagttaaagcatggatcgagaagactctccgtgaaggccgcacacgtggttacgtagagaccttatttggacgtcgccgctatgttcccgatttaaacgctcgcgtgaaaggcaagcgtgaagccgccgaacgcatggcgttcaacatgcctgtacagggcacggcagctgacctcatgaaacttgcaatggtgcgcctttttccacaattgcgtgaagttggtgcccgcatgctcttgcaggtccacgatgaactcttgttagaagcgccaaaagagcgtgcggaagaggtggcagccctcgcgaaagaagttatggaaggcgtgtggcccttagcggtgcctcttgaagtcgaagttggtattggcgaggattggctggctgccaaagga

SEQ ID NO: 5222 - protein, 841 aa, synthetic construct
  REGION 1..841: note = Variant of DNA polymerase I from Thermus sp. strain 2.9
MHHHHHHGGSGVLPVFEPKGRVLLVDGHHLAYRNFFALKGLTTSLGEPVQGVYGFAKSLLKALKEDGDVVIVVFDAKAPSFRHEAYEAYKAGRAPTPEDFPRQLALMKELVDLLGLERLEVPGFEADDVLATLAKKAEREGYEVQILTADRDLFQLLSPRISVLHPEGHRITPEWLWEKYGLRPEQWVDFRALAGDPSDNIPGVKGIGEKTALKLLKEWGSLENLLKNLDQVKPESVREKILAHLEDLKLSRELSRVRTDLPLEVDFGRRREPDWEGLKAFLERLEFGSLLHEFGLLESPLLAEEAPWPPPEGAFLGYRLSRPEPMWAELLALAASAQGRVYRAEDPHGALRGLFEVRGLLAKDLAVVALREGLDLPPTDDPMLLAYLLDPSNTTPEGVARRYGGEWTEDAAKRALLAERLHENLLGRLQGEERLLWLYEEVEKPLSRVLAHMEATGVKLDVAYLENLSLEVAAHMRRLEEEVFRLAGRSFRLNSRDQLERVLFDELGLPPIGKTEKTGKRSTSAAVLEALREVHPIVDKILQYREMAKLKGTYIDRLPALVHPKTGRLHTRFNQTATATGRLSSSDPNLQNIPVRTPLGQKIRRAFVAEEGWRLVALDYRQIELRVLAALSGDENLIRVFQEGKDIHTQTASWMFGLSAEAIDPLMRRAAKTINFGVLYGMSAFRLSQELGIPYEEAQAFIQKYFQSYPKVKAWIEKTLREGRTRGYVETLFGRRRYVPDLNARVKGKREAAERMAFNMPVQGTAADLMKLAMVRLFPQLREVGARMLLQVHDELLLEAPKERAEEVAALAKEVMEGVWPLAVPLEVEVGIGEDWLAAKG

SEQ ID NO: 5223 - DNA, 2523 bp, synthetic construct
  misc_feature 1..2523: note = Variant of DNA polymerase I from Thermus sp. strain 2.9
  source 1..2523: mol_type = other DNA
atgcaccatcatcatcatcatggcggtagcggcgtgttaccggtgttcgagcctaaaggtcgcgtgcttctggttgatggccatcatctcgcgtatcgtaacttctttgccctgaaaggattaaccaccagccgcggcgagccggtacagggtgtctacggctttgcaaagtcgctcctgaaagctctgaaagaagacggtgatgtggtgattgttgtctttgatgcgaaagcgccaagttttcgccacgaagcgtacgaagcttacaaagccgggcgtgctccaacgccggaagactttcctcgccaattggcgcttatgaaggaattagtggatttgcttggcctcgaacgcttggaagttcccggtttcgaggcagacgacgtattagcgactctcgcaaagaaagccgaacgtgagggctatgaagtccagatcttgacagcagatcgcgatcttttccagcttttatctccgcgcatctcggtgttacacccggaagggcatcgtatcaccccggaatggctctgggagaaatatggtttgcgtcccgaacaatgggtggattttcgcgccttagcaggcgatccgagcgacaatattccgggagttaaaggtatcggcgagaagacggcgctcaagctccttaaagaatgggggtcgttggagaacttgcttaagaatttagatcaggtcaaaccagagtcagtgcgtgagaagattcttgctcacctcgaagacctcaaattaagccgcgaattgtcccgtgtacgcaccgatttgccgctcgaagttgatttccgccgccgccgcgaacctgactgggagggtcttaaagcgtttttagagcgtcttgaatttggttcgctcttgcatgaattcggccttttagaaagcccgttaccggccgaagaagcaccttggccaccgcccgagggcgcgtttttaggttaccgtttgagtcgcccggaaccgatgtgggccgaattactggctcttgcagcgtctgcccagggacgtgtgtatcgcgcggaagaccctcatggtgcgctccgcggcctcttcgaagtccgtggactccttgccaaagacttagctgttgttgcattgcgcgaaggtcttgatttacctccgactgatgatccaatgcttcttgcgtacctcttggacccgtcaaacacgacgcccgaaggcgtagcccgtcgttacggcggcgagtggaccgaagatgcagcgaaacgcgcgttattggccgaacgtttgcacgaaaatttattaggacgtttgcaaggcgaggaacgtctcctctggctttacgaagaagtggagaaaccattgagtcgcgtgctcgcgcatatggaagctaccggtgtcaaattagacgtggcgtatttggagaatcttcaccttgaagttgctgcccacatgcgccgcttggaggaagaagtattccgtttagcaggccgttcctttcgccttaactctcgcgatcagttagaacgtgtgttgttcgatgaacttggtctccctcctatcggcaagacagagaagaccggtaaacgtagcacttcagcggcggttttagaagctcttcgcgaagtccatcccattgtggacaagatcttgcagtaccgcgaaatggcgaaattgaaaggcacctatattgaccgtcttccggcattagtccacccgaaaacgggacgcctccatacccgcttcaaccaaacagccacggcgaccggtcgtttgtcctcctctgatccaaaccttcagaatattccagtacgtaccccattgggccagaagatccgccgtgcgtttgtagctgaggagggttggcgtttagtggccctcgattatcgtcaaattgaattacgtgtccttgcccatctttctggcgatgagaacctcatccgcgtgtttcaggaaggcaaagacattcacactcaaacggcaagctggatgtttggattatcagctgaagcgatcgatcctttgatgcgtcgtgcagcgaagaccatcaatttcggtgttctctacggtatgagtgcctttcgtttgtcgcaggaattaggcattccctatgaagaagctcaggcgttcattcagaaatactttcaaagctatcccaaagttaaagcatggatcgagaagactctccgcgaaggccgcacacgtggttacgtagagaccttatttggacgtcgccgctatgttcccgatttaaacgctcgcgtgaaaggcaaacgtgaagccgccgaacgcatggcgttcaacatgcctgtacagggcacggcagctgacctcatgaaacttgcaatggtgcgcctttttccacaattgcgtgaagttggtgcccgcatgctcttgcaggtccacgatgaactcttgttagaagcgccaaaagagcgtgcggaagaggtggcagccctcgcgaaagaagttatggaaggcgtgtggcccttagcggtgcctcttgaagtcgaagttggtattggcgaggattggctggctgccaaagga

SEQ ID NO: 5224 - protein, 841 aa, synthetic construct
  REGION 1..841: note = Variant of DNA polymerase I from Thermus sp. strain 2.9
MHHHHHHGGSGVLPVFEPKGRVLLVDGHHLAYRNFFALKGLTTSRGEPVQGVYGFAKSLLKALKEDGDVVIVVFDAKAPSFRHEAYEAYKAGRAPTPEDFPRQLALMKELVDLLGLERLEVPGFEADDVLATLAKKAEREGYEVQILTADRDLFQLLSPRISVLHPEGHRITPEWLWEKYGLRPEQWVDFRALAGDPSDNIPGVKGIGEKTALKLLKEWGSLENLLKNLDQVKPESVREKILAHLEDLKLSRELSRVRTDLPLEVDFRRRREPDWEGLKAFLERLEFGSLLHEFGLLESPLPAEEAPWPPPEGAFLGYRLSRPEPMWAELLALAASAQGRVYRAEDPHGALRGLFEVRGLLAKDLAVVALREGLDLPPTDDPMLLAYLLDPSNTTPEGVARRYGGEWTEDAAKRALLAERLHENLLGRLQGEERLLWLYEEVEKPLSRVLAHMEATGVKLDVAYLENLHLEVAAHMRRLEEEVFRLAGRSFRLNSRDQLERVLFDELGLPPIGKTEKTGKRSTSAAVLEALREVHPIVDKILQYREMAKLKGTYIDRLPALVHPKTGRLHTRFNQTATATGRLSSSDPNLQNIPVRTPLGQKIRRAFVAEEGWRLVALDYRQIELRVLAHLSGDENLIRVFQEGKDIHTQTASWMFGLSAEAIDPLMRRAAKTINFGVLYGMSAFRLSQELGIPYEEAQAFIQKYFQSYPKVKAWIEKTLREGRTRGYVETLFGRRRYVPDLNARVKGKREAAERMAFNMPVQGTAADLMKLAMVRLFPQLREVGARMLLQVHDELLLEAPKERAEEVAALAKEVMEGVWPLAVPLEVEVGIGEDWLAAKG

SEQ ID NO: 5225 - DNA, 2523 bp, synthetic construct
  misc_feature 1..2523: note = Variant of DNA polymerase I from Thermus sp. strain 2.9
  source 1..2523: mol_type = other DNA
atgcaccatcatcatcatcatggcggtagcggcgtgttaccggtgttcgagcctaaaggtcgcgtgcttctggttgatggccatcatctcgcgtatcgtaacttctttgccctgaaaggattaaccaccagcctgggcgagccggtacagggtgtctacggctttgcaaagtcgctcctgaaagctctgaaagaagacggtgatgtggtgattgttgtctttgatgcgaaagcgccaagttttcgccacgaagcgtacgaagcttacaaagccgggcgtgctccaacgccggaagactttcctcgccaattggcgcttatgaaggaattagtggatttgcttggcctcgaacgcttggaagttcccggtttcgaggcagacgacgtattagcgactctcgcaaagaaagccgaacgtgagggctatgaagtccagatcttgacagcagatcgcgatcttttccagcttttatctccgcgcatctcggtgttacacccggaagggcatcgtatcaccccggaatggctctgggagaaatatggtttgcgtcccgaacaatgggtggattttcgcgccttagcaggcgatccgagcgacaatattccgggagttaaaggtatcggcgagaagacggcgctcaagctccttaaagaatgggggtcgttggagaacttgcttaagaatttagatcaggtcaaaccagagtcagtgcgtgagaagattcttgctcacctcgaagacctcaaattaagccgcgaattgtcccgtgtacgcaccgatttgccgctcgaagttgatttccgccgccgccgcgaacctgactgggagggtcttaaagcgtttttagagcgtcttgaatttggttcgctcttgcatgaattcggccttttagaaagcccgttactggccgaagaagcaccttggccaccgcccgagggcgcgtttttaggttaccgtttgagtcgcccggaaccgatgtgggccgaattactggctcttgcagcgtctgcccagggacgtgtgtatcgcgcggaagaccctcatggtgcgctccgcggcctcttcgaagtccgtggactccttgccaaagacttagctgttgttgcattgcgcgaaggtcttgatttacctccgactgatgatccaatgcttcttgcgtacctcttggacccgtcaaacacgacgcccgaaggcgtagcccgtcgttacggcggcgagtggaccgaagatgcagcgaaacgcgcgttattggccgaacgtttgcacgaaaatttattaggacgtttgcaaggcgaggaacgtctcctctggctttacgaagaagtggagaaaccattgagtcgcgtgctcgcgcatatggaagctaccggtgtcaaattagacgtggcgtatttggagaatctcagccttgaagttgctgcccacatgcgccgcttggaggaagaagtattccgtttagcaggccgttcctttcgccttaactctcgcgatcagttagaacgtgtgttgttcgatgaacttggtctccctcctatcggcaagacagagaagaccggtaaacgtagcacttcagcggcggttttagaagctcttcgcgaagtccatcccattgtggacaagatcttgcagtaccgcgaaatggcgaaattgaaaggcacctatattgaccgtcttccggcattagtccacccgaaaacgggacgcctccatacccgcttcaaccaaacagccacggcgaccggtcgtttgtcctcctctgatccaaaccttcagaatattccagtacgtaccccattgggccagaagatccgccgtgcgtttgtagctgaggagggttggcgtttagtggccctcgattatcgtcaaattgaattacgtgtccttgcccatctttctggcgatgagaacctcatccgcgtgtttcaggaaggcaaagacattcacactcaaacggcaagctggatgtttggattatcagctgaagcgatcgatcctttgatgcgtcgtgcagcgaagaccatcaatttcggtgttctctacggtatgagtgcctttcgtttgtcgcaggaattaggcattccctatgaagaagctcaggcgttcattcagaaatactttcaaagctatcccaaagttaaagcatggatcgagaagactctccgtgaaggccgcacacgtggttacgtagagaccttatttggacgtcgccgctatgttcccgatttaaacgctcgcgtgaaaggcaaacgtgaagccgccgaacgcatggcgttcaacatgcctgtacagggcacggcagctgacctcatgaaacttgcaatggtgcgcctttttccacaattgcgtgaagttggtgcccgcatgctcttgcaggtccacgatgaactcttgttagaagcgccaaaagagcgtgcggaagaggtggcagccctcgcgaaagaagttatggaaggcgtgtggcccttagcggtgcctcttgaagtcgaagttggtattggcgaggattggctggctgccaaagga

SEQ ID NO: 5226 - protein, 841 aa, synthetic construct
  REGION 1..841: note = Variant of DNA polymerase I from Thermus sp. strain 2.9
MHHHHHHGGSGVLPVFEPKGRVLLVDGHHLAYRNFFALKGLTTSLGEPVQGVYGFAKSLLKALKEDGDVVIVVFDAKAPSFRHEAYEAYKAGRAPTPEDFPRQLALMKELVDLLGLERLEVPGFEADDVLATLAKKAEREGYEVQILTADRDLFQLLSPRISVLHPEGHRITPEWLWEKYGLRPEQWVDFRALAGDPSDNIPGVKGIGEKTALKLLKEWGSLENLLKNLDQVKPESVREKILAHLEDLKLSRELSRVRTDLPLEVDFRRRREPDWEGLKAFLERLEFGSLLHEFGLLESPLLAEEAPWPPPEGAFLGYRLSRPEPMWAELLALAASAQGRVYRAEDPHGALRGLFEVRGLLAKDLAVVALREGLDLPPTDDPMLLAYLLDPSNTTPEGVARRYGGEWTEDAAKRALLAERLHENLLGRLQGEERLLWLYEEVEKPLSRVLAHMEATGVKLDVAYLENLSLEVAAHMRRLEEEVFRLAGRSFRLNSRDQLERVLFDELGLPPIGKTEKTGKRSTSAAVLEALREVHPIVDKILQYREMAKLKGTYIDRLPALVHPKTGRLHTRFNQTATATGRLSSSDPNLQNIPVRTPLGQKIRRAFVAEEGWRLVALDYRQIELRVLAHLSGDENLIRVFQEGKDIHTQTASWMFGLSAEAIDPLMRRAAKTINFGVLYGMSAFRLSQELGIPYEEAQAFIQKYFQSYPKVKAWIEKTLREGRTRGYVETLFGRRRYVPDLNARVKGKREAAERMAFNMPVQGTAADLMKLAMVRLFPQLREVGARMLLQVHDELLLEAPKERAEEVAALAKEVMEGVWPLAVPLEVEVGIGEDWLAAKG

SEQ ID NO: 5227 - DNA, 2523 bp, synthetic construct
  misc_feature 1..2523: note = Variant of DNA polymerase I from Thermus sp. strain 2.9
  source 1..2523: mol_type = other DNA
atgcaccatcatcatcatcatggcggtagcggcgtgttaccggtgttcgagcctaaaggtcgcgtgcttctggttgatggccatcatctcgcgtatcgtaacttctttgccctgaaaggattaaccaccagcctgggcgagccggtacagggtgtctacggctttgcaaagtcgctcctgaaagctctgaaagaagacggtgatgtggtgattgttgtctttgatgcgaaagcgccaagttttcgccacgaagcgtacgaagcttacaaagccgggcgtgctccaacgccggaagactttcctcgccaattggcgcttatgaaggaattagtggatttgcttggcctcgaacgcttggaagttcccggtttcgaggcagacgacgtattagcgactctcgcaaagaaagccgaacgtgagggctatgaagtccagatcttgacagcagatcgcgatcttttccagcttttatctccgcgcatctcggtgttacacccggaagggcatcgtatcaccccggaatggctctgggagaaatatggtttgcgtcccgaacaatgggtggattttcgcgccttagcaggcgatccgagcgacaatattccgggagttaaaggtatcggcgagaagacggcgctcaagctccttaaagaatgggggtcgttggagaacttgcttaagaatttagatcaggtcaaaccagagtcagtgcgtgagaagattcttgctcacctcgaagacctcaaattaagccgcgaattgtcccgtgtacgcaccgatttgccgctcgaagttgatttcggtcgccgccgcgaacctgactgggagggtcttaaagcgtttttagagcgtcttgaatttggttcgctcttgcatgaattcggccttttagaaagcccgttactggccgaagaagcaccttggccaccgcccgagggcgcgtttttaggttaccgtttgagtcgcccggaaccgatgtgggccgaattactggctcttgcagcgtctgcccagggacgtgtgtatcgcgcggaagaccctcatggtgcgctccgcggcctcttcgaagtccgtggactccttgccaaagacttagctgttgttgcattgcgcgaaggtcttgatttacctccgactgatgatccaatgcttcttgcgtacctcttggacccgtcaaacacgacgcccgaaggcgtagcccgtcgttacggcggcgagtggaccgaagatgcagcgaaacgcgcgttattggccgaacgtttgcacgaaaatttattaggacgtttgcaaggcgaggaacgtctcctctggctttacgaagaagtggagaaaccattgagtcgcgtgctcgcgcatatggaagctaccggtgtcaaattagacgtggcgtatttggagaatctcagccttgaagttgctgcccacatgcgccgcttggaggaagaagtattccgtttagcaggccgttcctttcgccttaactctcgcgatcagttagaacgtgtgttgttcgatgaacttggtctccctcctatcggcaagacagagaagaccggtaaacgtagcacttcagcggcggttttagaagctcttcgcgaagtccatcccattgtggacaagatcttgcagtaccgcgaaatggcgaaattgaaaggcacctatattgaccgtcttccggcattagtccacccgaaaacgggacgcctccatacccgcttcaaccaaacagccacggcgaccggtcgtttgtcctcctctgatccaaaccttcagaatattccagtacgtaccccattgggccagaagatccgccgtgcgtttgtagctgaggagggttggcgtttagtggccctcgattatcgtcaaattgaattacgtgtccttgcccatctttctggcgatgagaacctcatccgcgtgtttcaggaaggcaaagacattcacactcaaacggcaagctggatgtttggattatcagctgaagcgatcgatcctttgatgcgtcgtgcagcgaagaccatcaatttcggtgttctctacggtatgagtgcctttcgtttgtcgcaggaattaggcattccctatgaagaagctgccgcgttcattcagaaatactttcaaagctatcccaaagttaaagcatggatcgagaagactctccgtgaaggccgcacacgtggttacgtagagaccttatttggacgtcgccgctatgttcccgatttaaacgctcgcgtgaaaggcaagcgtgaagccgccgaacgcatggcgttcaacatgcctgtacagggcacggcagctgacctcatgaaacttgcaatggtgcgcctttttccacaattgcgtgaagttggtgcccgcatgctcttgcaggtccacgatgaactcttgttagaagcgccaaaagagcgtgcggaagaggtggcagccctcgcgaaagaagttatggaaggcgtgtggcccttagcggtgcctcttgaagtcgaagttggtattggcgaggattggctggctgccaaagga

SEQ ID NO: 5228 - protein, 841 aa, synthetic construct
  REGION 1..841: note = Variant of DNA polymerase I from Thermus sp. strain 2.9
MHHHHHHGGSGVLPVFEPKGRVLLVDGHHLAYRNFFALKGLTTSLGEPVQGVYGFAKSLLKALKEDGDVVIVVFDAKAPSFRHEAYEAYKAGRAPTPEDFPRQLALMKELVDLLGLERLEVPGFEADDVLATLAKKAEREGYEVQILTADRDLFQLLSPRISVLHPEGHRITPEWLWEKYGLRPEQWVDFRALAGDPSDNIPGVKGIGEKTALKLLKEWGSLENLLKNLDQVKPESVREKILAHLEDLKLSRELSRVRTDLPLEVDFGRRREPDWEGLKAFLERLEFGSLLHEFGLLESPLLAEEAPWPPPEGAFLGYRLSRPEPMWAELLALAASAQGRVYRAEDPHGALRGLFEVRGLLAKDLAVVALREGLDLPPTDDPMLLAYLLDPSNTTPEGVARRYGGEWTEDAAKRALLAERLHENLLGRLQGEERLLWLYEEVEKPLSRVLAHMEATGVKLDVAYLENLSLEVAAHMRRLEEEVFRLAGRSFRLNSRDQLERVLFDELGLPPIGKTEKTGKRSTSAAVLEALREVHPIVDKILQYREMAKLKGTYIDRLPALVHPKTGRLHTRFNQTATATGRLSSSDPNLQNIPVRTPLGQKIRRAFVAEEGWRLVALDYRQIELRVLAHLSGDENLIRVFQEGKDIHTQTASWMFGLSAEAIDPLMRRAAKTINFGVLYGMSAFRLSQELGIPYEEAAAFIQKYFQSYPKVKAWIEKTLREGRTRGYVETLFGRRRYVPDLNARVKGKREAAERMAFNMPVQGTAADLMKLAMVRLFPQLREVGARMLLQVHDELLLEAPKERAEEVAALAKEVMEGVWPLAVPLEVEVGIGEDWLAAKG

SEQ ID NO: 5229 - DNA, 2523 bp, synthetic construct
  misc_feature 1..2523: note = Variant of DNA polymerase I from Thermus sp. strain 2.9
  source 1..2523: mol_type = other DNA
atgcaccatcatcatcatcatggcggtagcggcgtgttaccggtgttcgagcctaaaggtcgcgtgcttctggttgatggccatcatctcgcgtatcgtaacttctttgccctgaaaggattaaccaccagcctgggcgagccggtacagggtgtctacggctttgcaaagtcgctcctgaaagctctgaaagaagacggtgatgtggtgattgttgtctttgatgcgaaagcgccaagttttcgccacgaagcgtacgaagcttacaaagccgggcgtgctccaacgccggaagactttcctcgccaattggcgcttatgaaggaattagtggatttgcttggcctcgaacgcttggaagttcccggtttcgaggcagacgacgtattagcgactctcgcaaagaaagccgaacgtgagggctatgaagtccagatcttgacagcagatcgcgatcttttccagcttttatctccgcgcatctcggtgttacacccggaagggcatcgtatcaccccggaatggctctgggagaaatatggtttgcgtcccgaacaatgggtggattttcgcgccttagcaggcgatccgagcgacaatattccgggagttaaaggtatcggcgagaagacggcgctcaagctccttaaagaatgggggtcgttggagaacttgcttaagaatttagatcaggtcaaaccagagtcagtgcgtgagaagattcttgctcacctcgaagacctcaaattaagccgcgaattgtcccgtgtacgcaccgatttgccgctcgaagttgatttcggtcgccgccgcgaacctgactgggagggtcttaaagcgtttttagagcgtcttgaatttggttcgctcttgcatgaattcggccttttagaaagcccgttactggccgaagaagcaccttggccaccgcccgagggcgcgtttttaggttaccgtttgagtcgcccggaaccgatgtgggccgaattactggctcttgcagcgtctgcccagggacgtgtgtatcgcgcggaagaccctcatggtgcgctccgcggcctcttcgaagtccgtggactccttgccaaagacttagctgttgttgcattgcgcgaaggtcttgatttacctccgactgatgatccaatgcttcttgcgtacctcttggacccgtcaaacacgacgcccgaaggcgtagcccgtcgttacggcggcgagtggaccgaagatgcagcgaaacgcgcgttattggccgaacgtttgcacgaaaatttattaggacgtttgcaaggcgaggaacgtctcctctggctttacgaagaagtggagaaaccattgagtcgcgtgctcgcgcatatggaagctaccggtgtcaaattagacgtggcgtatttggagaatctcagccttgaagttgctgcccacatgcgccgcttggaggaagaagtattccgtttagcaggccgttcctttcgccttaactctcgcgatcagttagaacgtgtgttgttcgatgaacttggtctccctcctatcggcaagacagagaagaccggtaaacgtagcacttcagcggcggttttagaagctcttcgcgaagtccatcccattgtggacaagatcttgcagtaccgcgaaatggcgaaattgaaaggcacctatattgaccgtcttccggcattagtccacccgaaaacgggacgcctccatacccgcttcaaccaaacagccacggcgaccggtcgtttgtcctcctctgatccaaaccttcagaatattccagtacgtaccccattgggccagaagatccgccgtgcgtttgtagctgaggagggttggcgtttagtgtgtctcgattatcgtcaaattgaattacgtgtccttgcccatctttctggcgatgagaacctcatccgcgtgtttcaggaaggcaaagacattcacactcaaacggcaagctggatgtttggattatcagctgaagcgatcgatcctttgatgcgtcgtgcagcgaagaccatcaatttcggtgttctctacggtatgagtgcctttcgtttgtcgcaggaattaggcattccctatgaagaagctcaggcgttcattcagaaatactttcaaagctatcccaaagttaaagcatggatcgagaagactctccgtgaaggccgcacacgtggttacgtagagaccttatttggacgtcgccgctatgttcccgatttaaacgctcgcgtgaaaggcaagcgtgaagccgccgaacgcatggcgttcaacatgcctgtacagggcacggcagctgacctcatgaaacttgcaatggtgcgcctttttccacaattgcgtgaagttggtgcccgcatgctcttgcaggtccacgatgaactcttgttagaagcgccaaaagagcgtgcggaagaggtggcagccctcgcgaaagaagttatggaaggcgtgtggcccttagcggtgcctcttgaagtcgaagttggtattggcgaggattggctggctgccaaagga

SEQ ID NO: 5230 - protein, 841 aa, synthetic construct
  REGION 1..841: note = Variant of DNA polymerase I from Thermus sp. strain 2.9
MHHHHHHGGSGVLPVFEPKGRVLLVDGHHLAYRNFFALKGLTTSLGEPVQGVYGFAKSLLKALKEDGDVVIVVFDAKAPSFRHEAYEAYKAGRAPTPEDFPRQLALMKELVDLLGLERLEVPGFEADDVLATLAKKAEREGYEVQILTADRDLFQLLSPRISVLHPEGHRITPEWLWEKYGLRPEQWVDFRALAGDPSDNIPGVKGIGEKTALKLLKEWGSLENLLKNLDQVKPESVREKILAHLEDLKLSRELSRVRTDLPLEVDFGRRREPDWEGLKAFLERLEFGSLLHEFGLLESPLLAEEAPWPPPEGAFLGYRLSRPEPMWAELLALAASAQGRVYRAEDPHGALRGLFEVRGLLAKDLAVVALREGLDLPPTDDPMLLAYLLDPSNTTPEGVARRYGGEWTEDAAKRALLAERLHENLLGRLQGEERLLWLYEEVEKPLSRVLAHMEATGVKLDVAYLENLSLEVAAHMRRLEEEVFRLAGRSFRLNSRDQLERVLFDELGLPPIGKTEKTGKRSTSAAVLEALREVHPIVDKILQYREMAKLKGTYIDRLPALVHPKTGRLHTRFNQTATATGRLSSSDPNLQNIPVRTPLGQKIRRAFVAEEGWRLVCLDYRQIELRVLAHLSGDENLIRVFQEGKDIHTQTASWMFGLSAEAIDPLMRRAAKTINFGVLYGMSAFRLSQELGIPYEEAQAFIQKYFQSYPKVKAWIEKTLREGRTRGYVETLFGRRRYVPDLNARVKGKREAAERMAFNMPVQGTAADLMKLAMVRLFPQLREVGARMLLQVHDELLLEAPKERAEEVAALAKEVMEGVWPLAVPLEVEVGIGEDWLAAKG

SEQ ID NO: 5231 - DNA, 2523 bp, synthetic construct
  misc_feature 1..2523: note = Variant of DNA polymerase I from Thermus sp. strain 2.9
  source 1..2523: mol_type = other DNA
atgcaccatcatcatcatcatggcggtagcggcgtgttaccggtgttcgagcctaaaggtcgcgtgcttctggttgatggccatcatctcgcgtatcgtaacttctttgccctgaaaggattaaccaccagcctgggcgagccggtacagggtgtctacggctttgcaaagtcgctcctgaaagctctgaaagaagacggtgatgtggtgattgttgtctttgatgcgaaagcgccaagttttcgccacgaagcgtacgaagcttacaaagccgggcgtgctccaacgccggaagactttcctcgccaattggcgcttatgaaggaattagtggatttgcttggcctcgaacgcttggaagttcccggtttcgaggcagacgacgtattagcgactctcgcaaagaaagccgaacgtgagggctatgaagtccagatcttgacagcagatcgcgatcttttccagcttttatctccgcgcatctcggtgttacacccggaagggcatcgtatcaccccggaatggctctgggagaaatatggtttgcgtcccgaacaatgggtggattttcgcgccttagcaggcgatccgagcgacaatattccgggagttaaaggtatcggcgagaagacggcgctcaagctccttaaagaatgggggtcgttggagaacttgcttaagaatttagatcaggtcaaaccagagtcagtgcgtgagaagattcttgctcacctcgaagacctcaaattaagccgcgaattgtcccgtgtacgcaccgatttgccgctcgaagttgatttcggtcgccgccgcgaacctgactgggagggtcttaaagcgtttttagagcgtcttgaatttggttcgctcttgcatgaattcggccttttagaaagcccgttactggccgaagaagcaccttggccaccgcccgagggcgcgtttttaggttaccgtttgagtcgcccggaaccgatgtgggccgaattactggctcttgcagcgtctgcccagggacgtgtgtatcgcgcggaagaccctcatggtgcgctccgcggcctcttcgaagtccgtggactccttgccaaagacttagctgttgttgcattgcgcgaaggtcttgatttacctccgactgatgatccaatgcttcttctgtacctcttggacccgtcaaacacgacgcccgaaggcgtagcccgtcgttacggcggcgagtggaccgaagatgcagcgaaacgcgcgttattggccgaacgtttgcacgaaaatttattaggacgtttgcaaggcgaggaacgtctcctctggctttacgaagaagtggagaaaccattgagtcgcgtgctcgcgcatatggaagctaccggtgtcaaattagacgtggcgtatttggagaatctcagccttgaagttgctgcccacatgcgccgcttggaggaagaagtattccgtttagcaggccgttcctttcgccttaactctcgcgatcagttagaacgtgtgttgttcgatgaacttggtctccctcctatcggcaagacagagaagaccggtaaacgtagcacttcagcggcggttttagaagctcttcgcgaagtccatcccattgtggacaagatcttgcagtaccgcgaaatggcgaaattgaaaggcacctatattgaccgtcttccggcattagtccacccgaaaacgggacgcctccatacccgcttcaaccaaacagccacggcgaccggtcgtttgtcctcctctgatccaaaccttcagaatattccagtacgtaccccattgggccagaagatccgccgtgcgtttgtagctgaggagggttggcgtttagtggccctcgattatcgtcaaattgaattacgtgtccttgcccatctttctggcgatgagaacctcatccgcgtgtttcaggaaggcaaagacattcacactcaaacggcaagctggatgtttggattatcagctgaagcgatcgatcctttgatgcgtcgtgcagcgaagaccatcaatttcggtgttctctacggtatgagtgcctttcgtttgtcgcaggaattaggcattccctatgaagaagctcaggcgttcattcagaaatactttcaaagctatcccaaagttaaagcatggatcgagaagactctccgtgaaggccgcacacgtggttacgtagagaccttatttggacgtcgccgctatgttcccgatttaaacgctcgcgtgaaaggcaagcgtgaagccgccgaacgcatggcgttcaacatgcctgtacagggcacggcagctgacctcatgaaacttgcaatggtgcgcctttttccacaattgcgtgaagttggtgcccgcatgctcttgcaggtccacgatgaactcttgttagaagcgccaaaagagcgtgcggaagaggtggcagccctcgcgaaagaagttatggaaggcgtgtggcccttagcggtgcctcttgaagtcgaagttggtattggcgaggattggctggctgccaaagga

SEQ ID NO: 5232 - protein, 841 aa, synthetic construct
  REGION 1..841: note = Variant of DNA polymerase I from Thermus sp. strain 2.9
MHHHHHHGGSGVLPVFEPKGRVLLVDGHHLAYRNFFALKGLTTSLGEPVQGVYGFAKSLLKALKEDGDVVIVVFDAKAPSFRHEAYEAYKAGRAPTPEDFPRQLALMKELVDLLGLERLEVPGFEADDVLATLAKKAEREGYEVQILTADRDLFQLLSPRISVLHPEGHRITPEWLWEKYGLRPEQWVDFRALAGDPSDNIPGVKGIGEKTALKLLKEWGSLENLLKNLDQVKPESVREKILAHLEDLKLSRELSRVRTDLPLEVDFGRRREPDWEGLKAFLERLEFGSLLHEFGLLESPLLAEEAPWPPPEGAFLGYRLSRPEPMWAELLALAASAQGRVYRAEDPHGALRGLFEVRGLLAKDLAVVALREGLDLPPTDDPMLLLYLLDPSNTTPEGVARRYGGEWTEDAAKRALLAERLHENLLGRLQGEERLLWLYEEVEKPLSRVLAHMEATGVKLDVAYLENLSLEVAAHMRRLEEEVFRLAGRSFRLNSRDQLERVLFDELGLPPIGKTEKTGKRSTSAAVLEALREVHPIVDKILQYREMAKLKGTYIDRLPALVHPKTGRLHTRFNQTATATGRLSSSDPNLQNIPVRTPLGQKIRRAFVAEEGWRLVALDYRQIELRVLAHLSGDENLIRVFQEGKDIHTQTASWMFGLSAEAIDPLMRRAAKTINFGVLYGMSAFRLSQELGIPYEEAQAFIQKYFQSYPKVKAWIEKTLREGRTRGYVETLFGRRRYVPDLNARVKGKREAAERMAFNMPVQGTAADLMKLAMVRLFPQLREVGARMLLQVHDELLLEAPKERAEEVAALAKEVMEGVWPLAVPLEVEVGIGEDWLAAKG

SEQ ID NO: 5233 - DNA, 2523 bp, synthetic construct
  misc_feature 1..2523: note = Variant of DNA polymerase I from Thermus sp. strain 2.9
  source 1..2523: mol_type = other DNA
atgcaccatcatcatcatcatggcggtagcggcgtgttaccggtgttcgagcctaaaggtcgcgtgcttctggttgatggccatcatctcgcgtatcgtaacttctttgccctgaaaggattaaccaccagcctgggcgagccggtacagggtgtctacggctttgcaaagtcgctcctgaaagctctgaaagaagacggtgatgtggtgattgttgtctttgatgcgaaagcgccaagttttcgccacgaagcgtacgaagcttacaaagccgggcgtgctccaacgccggaagactttcctcgccaattggcgcttatgaaggaattagtggatttgcttggcctcgaacgcttggaagttcccggtttcgaggcagacgacgtattagcgactctcgcaaagaaagccgaacgtgagggctatgaagtccagatcttgacagcagatcgcgatcttttccagcttttatctccgcgcatctcggtgttacacccggaagggcatcgtatcaccccggaatggctctgggagaaatatggtttgcgtcccgaacaatgggtggattttcgcgccttagcaggcgatccgagcgacaatattccgggagttaaaggtatcggcgagaagacggcgctcaagctccttaaagaatgggggtcgttggagaacttgcttaagaatttagatcaggtcaaaccagagtcagtgcgtgagaagattcttgctcacctcgaagacctcaaattaagccgcgaattgtcccgtgtacgcaccgatttgccgctcgaagttgatttcggtcgccgccgcgaacctgactgggagggtcttaaagcgtttttagagcgtcttgaatttggttcgctcttgcatgaattcggccttttagaaagcccgttactggccgaagaagcaccttggccaccgcccgagggcgcgtttttaggttaccgtttgagtcgcccggaaccgatgtgggccgaattactggctcttgcagcgtctgcccagggacgtgtgtatcgcgcggaagaccctcatggtgcgctccgcggcctcttcgaagtccgtggactccttgccaaagacttagctgttgttgcattgcgcgaaggtcttgatttacctccgactgatgatccaatgcttcttgcgtacctcttggacccgtcaaacacgacgcccgaaggcgtagcccgtcgttacggcggcgagtggaccgaagatgcagcgaaacgcgcgttattggccgaacgtttgcacgaaaatttattaggacgtttgcaaggcgaggaacgtctcctctggctttacgaagaagtggagaaaccattgagtcgcgtgctcgcgcatatggaagctaccggtgtcaaattagacgtggcgtatttggaggctcttcaccttgaagttgctgcccacatgcgccgcttggaggaagaagtattccgtttagcaggccgttcctttcgccttaactctcgcgatcagttagaacgtgtgttgttcgatgaacttggtctccctcctatcggcaagacagagaagaccggtaaacgtagcacttcagcggcggttttagaagctcttcgcgaagtccatcccattgtggacaagatcttgcagtaccgcgaaatggcgaaattgaaaggcacctatattgaccgtcttccggcattagtccacccgaaaacgggacgcctccatacccgcttcaaccaaacagccacggcgaccggtcgtttgtcctcctctgatccaaaccttcagaatattccagtacgtaccccattgggccagaagatccgccgtgcgtttgtagctgaggagggttggcgtttagtggccctcgattatcgtcaaattgaattacgtgtccttgcccatctttctggcgatgagaacctcatccgcgtgtttcaggaaggcaaagacattcacactcaaacggcaagctggatgtttggattatcagctgaagcgatcgatcctttgatgcgtcgtgcagcgaagaccatcaatttcggtgttctctacggtatgagtgcctttcgtttgtcgcaggaattaggcattccctatgaagaagctcaggcgttcattcagaaatactttcaaagctatcccaaagttaaagcatggatcgagaagactctccgtgaaggccgcacacgtggttacgtagagaccttatttggacgtcgccgctatgttcccgatttaaacgctcgcgtgaaaggcaagcgtgaagccgccgaacgcatggcgttcaacatgcctgtacagggcacggcagctgacctcatgaaacttgcaatggtgcgcctttttccacaattgcgtgaagttggtgcccgcatgctcttgcaggtccacgatgaactcttgttagaagcgccaaaagagcgtgcggaagaggtggcagccctcgcgaaagaagttatggaaggcgtgtggcccttagcggtgcctcttgaagtcgaagttggtattggcgaggattggctggctgccaaagga

SEQ ID NO: 5234 - protein, 841 aa, synthetic construct
  REGION 1..841: note = Variant of DNA polymerase I from Thermus sp. strain 2.9
MHHHHHHGGSGVLPVFEPKGRVLLVDGHHLAYRNFFALKGLTTSLGEPVQGVYGFAKSLLKALKEDGDVVIVVFDAKAPSFRHEAYEAYKAGRAPTPEDFPRQLALMKELVDLLGLERLEVPGFEADDVLATLAKKAEREGYEVQILTADRDLFQLLSPRISVLHPEGHRITPEWLWEKYGLRPEQWVDFRALAGDPSDNIPGVKGIGEKTALKLLKEWGSLENLLKNLDQVKPESVREKILAHLEDLKLSRELSRVRTDLPLEVDFGRRREPDWEGLKAFLERLEFGSLLHEFGLLESPLLAEEAPWPPPEGAFLGYRLSRPEPMWAELLALAASAQGRVYRAEDPHGALRGLFEVRGLLAKDLAVVALREGLDLPPTDDPMLLAYLLDPSNTTPEGVARRYGGEWTEDAAKRALLAERLHENLLGRLQGEERLLWLYEEVEKPLSRVLAHMEATGVKLDVAYLEALHLEVAAHMRRLEEEVFRLAGRSFRLNSRDQLERVLFDELGLPPIGKTEKTGKRSTSAAVLEALREVHPIVDKILQYREMAKLKGTYIDRLPALVHPKTGRLHTRFNQTATATGRLSSSDPNLQNIPVRTPLGQKIRRAFVAEEGWRLVALDYRQIELRVLAHLSGDENLIRVFQEGKDIHTQTASWMFGLSAEAIDPLMRRAAKTINFGVLYGMSAFRLSQELGIPYEEAQAFIQKYFQSYPKVKAWIEKTLREGRTRGYVETLFGRRRYVPDLNARVKGKREAAERMAFNMPVQGTAADLMKLAMVRLFPQLREVGARMLLQVHDELLLEAPKERAEEVAALAKEVMEGVWPLAVPLEVEVGIGEDWLAAKG

SEQ ID NO: 5235 - DNA, 2523 bp, synthetic construct
  misc_feature 1..2523: note = Variant of DNA polymerase I from Thermus sp. strain 2.9
  source 1..2523: mol_type = other DNA
atgcaccatcatcatcatcatggcggtagcggcgtgttaccggtgttcgagcctaaaggtcgcgtgcttctggttgatggccatcatctcgcgtatcgtaacttctttgccctgaaaggattaaccaccagcctgggcgagccggtacagggtgtctacggctttgcaaagtcgctcctgaaagctctgaaagaagacggtgatgtggtgattgttgtctttgatgcgaaagcgccaagttttcgccacgaagcgtacgaagcttacaaagccgggcgtgctccaacgccggaagactttcctcgccaattggcgcttatgaaggaattagtggatttgcttggcctcgaacgcttggaagttcccggtttcgaggcagacgacgtattagcgactctcgcaaagaaagccgaacgtgagggctatgaagtccagatcttgacagcagatcgcgatcttttccagcttttatctccgcgcatctcggtgttacacccggaagggcatcgtatcaccccggaatggctctgggagaaatatggtttgcgtcccgaacaatgggtggattttcgcgccttagcaggcgatccgagcgacaatattccgggagttaaaggtatcggcgagaagacggcgctcaagctccttaaagaatgggggtcgttggagaacttgcttaagaatttagatcaggtcaaaccagagtcagtgcgtgagaagattcttgctcacctcgaagacctcaaattaagccgcgaattgtcccgtgtacgcaccgatttgccgctcgaagttgatttcggtcgccgccgcgaacctgactgggagggtcttaaagcgtttttagagcgtcttgaatttggttcgctcttgcatgaattcggccttttagaaagcccgttactggccgaagaagcaccttggccaccgcccgagggcgcgtttttaggttaccgtttgagtcgcccggaaccgatgtgggccgaattactggctcttgcagcgtctgcccagggacgtgtgtatcgcgcggaagaccctcatggtgcgctccgcggcctcttcgaagtccgtggactccttgccaaagacttagctgttgttgcattgcgcgaaggtcttgatttacctccgactgatgatccaatgcttcttgcgtacctcttggacccgtcaaacacgacgcccgaaggcgtagcccgtcgttacggcggcgagtggaccgaagatgcagcgaaacgcgcgttattggccgaacgtttgcacgaaaatttattaggacgtttgcaaggcgaggaacgtctcctctggctttacgaagaagtggagaaaccattgagtcgcgtgctcgcgcatatggaagctaccggtgtcaaattagacgtggcgtatttggagaatctcagccttgaagttgctgcccacatgcgccgcttggaggaagaagtattccgtttacggggccgttcctttcgccttaactctcgcgatcagttagaacgtgtgttgttcgatgaacttggtctccctcctatcggcaagacagagaagaccggtaaacgtagcacttcagcggcggttttagaagctcttcgcgaagtccatcccattgtggacaagatcttgcagtaccgcgaaatggcgaaattgaaaggcacctatattgaccgtcttccggcattagtccacccgaaaacgggacgcctccatacccgcttcaaccaaacagccacggcgaccggtcgtttgtcctcctctgatccaaaccttcagaatattccagtacgtaccccattgggccagaagatccgccgtgcgtttgtagctgaggagggttggcgtttagtggccctcgattatcgtcaaattgaattacgtgtccttgcccatctttctggcgatgagaacctcatccgcgtgtttcaggaaggcaaagacattcacactcaaacggcaagctggatgtttggattatcagctgaagcgatcgatcctttgatgcgtcgtgcagcgaagaccatcaatttcggtgttctctacggtatgagtgcctttcgtttgtcgcaggaattaggcattccctatgaagaagctcaggcgttcattcagaaatactttcaaagctatcccaaagttaaagcatggatcgagaagactctccgtgaaggccgcacacgtggttacgtagagaccttatttggacgtcgccgctatgttcccgatttaaacgctcgcgtgaaaggcaagcgtgaagccgccgaacgcatggcgttcaacatgcctgtacagggcacggcagctgacctcatgaaacttgcaatggtgcgcctttttccacaattgcgtgaagttggtgcccgcatgctcttgcaggtccacgatgaactcttgttagaagcgccaaaagagcgtgcggaagaggtggcagccctcgcgaaagaagttatggaaggcgtgtggcccttagcggtgcctcttgaagtcgaagttggtattggcgaggattggctggctgccaaagga

SEQ ID NO: 5236 - protein, 841 aa, synthetic construct
  REGION 1..841: note = Variant of DNA polymerase I from Thermus sp. strain 2.9
MHHHHHHGGSGVLPVFEPKGRVLLVDGHHLAYRNFFALKGLTTSLGEPVQGVYGFAKSLLKALKEDGDVVIVVFDAKAPSFRHEAYEAYKAGRAPTPEDFPRQLALMKELVDLLGLERLEVPGFEADDVLATLAKKAEREGYEVQILTADRDLFQLLSPRISVLHPEGHRITPEWLWEKYGLRPEQWVDFRALAGDPSDNIPGVKGIGEKTALKLLKEWGSLENLLKNLDQVKPESVREKILAHLEDLKLSRELSRVRTDLPLEVDFGRRREPDWEGLKAFLERLEFGSLLHEFGLLESPLLAEEAPWPPPEGAFLGYRLSRPEPMWAELLALAASAQGRVYRAEDPHGALRGLFEVRGLLAKDLAVVALREGLDLPPTDDPMLLAYLLDPSNTTPEGVARRYGGEWTEDAAKRALLAERLHENLLGRLQGEERLLWLYEEVEKPLSRVLAHMEATGVKLDVAYLENLSLEVAAHMRRLEEEVFRLRGRSFRLNSRDQLERVLFDELGLPPIGKTEKTGKRSTSAAVLEALREVHPIVDKILQYREMAKLKGTYIDRLPALVHPKTGRLHTRFNQTATATGRLSSSDPNLQNIPVRTPLGQKIRRAFVAEEGWRLVALDYRQIELRVLAHLSGDENLIRVFQEGKDIHTQTASWMFGLSAEAIDPLMRRAAKTINFGVLYGMSAFRLSQELGIPYEEAQAFIQKYFQSYPKVKAWIEKTLREGRTRGYVETLFGRRRYVPDLNARVKGKREAAERMAFNMPVQGTAADLMKLAMVRLFPQLREVGARMLLQVHDELLLEAPKERAEEVAALAKEVMEGVWPLAVPLEVEVGIGEDWLAAKG

SEQ ID NO: 5237 - DNA, 2523 bp, synthetic construct
  misc_feature 1..2523: note = Variant of DNA polymerase I from Thermus sp. strain 2.9
  source 1..2523: mol_type = other DNA
atgcaccatcatcatcatcatggcggtagcggcgtgttaccggtgttcgagcctaaaggtcgcgtgcttctggttgatggccatcatctcgcgtatcgtaacttctttgccctgaaaggattaaccaccagcctgggcgagccggtacagggtgtctacggctttgcaaagtcgctcctgaaagctctgaaagaagacggtgatgtggtgattgttgtctttgatgcgaaagcgccaagttttcgccacgaagcgtacgaagcttacaaagccgggcgtgctccaacgccggaagactttcctcgccaattggcgcttatgaaggaattagtggatttgcttggcctcgaacgcttggaagttcccggtttcgaggcagacgacgtattagcgactctcgcaaagaaagccgaacgtgagggctatgaagtccagatcttgacagcagatcgcgatcttttccagcttttatctccgcgcatctcggtgttacacccggaagggcatcgtatcaccccggaatggctctgggagaaatatggtttgcgtcccgaacaatgggtggattttcgcgccttagcaggcgatccgagcgacaatattccgggagttaaaggtatcggcgagaagacggcgctcaagctccttaaagaatgggggtcgttggagaacttgcttaagaatttagatcaggtcaaaccagagtcagtgcgtgagaagattcttgctcacctcgaagacctcaaattaagccgcgaattgtcccgtgtacgcaccgatttgccgctcgaagttgatttcggtcgccgccgcgaacctgactgggagggtcttaaagcgtttttagagcgtcttgaatttggttcgctcttgcatgaattcggccttttagaaagcccgttactggccgaagaagcaccttggccaccgcccgagggcgcgtttttaggttaccgtttgagtcgcccggaaccgatgtgggccgaattactggctcttgcagcgtctgcccaggttcgtgtgtatcgcgcggaagaccctcatggtgcgctccgcggcctcttcgaagtccgtggactccttgccaaagacttagctgttgttgcattgcgcgaaggtcttgatttacctccgactgatgatccaatgcttcttgcgtacctcttggacccgtcaaacacgacgcccgaaggcgtagcccgtcgttacggcggcgagtggaccgaagatgcagcgaaacgcgcgttattggccgaacgtttgcacgaaaatttattaggacgtttgcaaggcgaggaacgtctcctctggctttacgaagaagtggagaaaccattgagtcgcgtgctcgcgcatatggaagctaccggtgtcaaattagacgtggcgtatttggagaatctcagccttgaagttgctgcccacatgcgccgcttggaggaagaagtattccgtttagcaggccgttcctttcgccttaactctcgcgatcagttagaacgtgtgttgttcgatgaacttggtctccctcctatcggcaagacagagaagaccggtaaacgtagcacttcagcggcggttttagaagctcttcgcgaagtccatcccattgtggacaagatcttgcagtaccgcgaaatggcgaaattgaaaggcacctatattgaccgtcttccggcattagtccacccgaaaacgggacgcctccatacccgcttcaaccaaacagccacggcgaccggtcgtttgtcctcctctgatccaaaccttcagaatattccagtacgtaccccattgggccagaagatccgccgtgcgtttgtagctgaggagggttggcgtttagtggccctcgattatcgtcaaattgaattacgtgtccttgcccatctttctggcgatgagaacctcatccgcgtgtttcaggaaggcaaagacattcacactcaaacggcaagctggatgtttggattatcagctgaagcgatcgatcctttgatgcgtcgtgcagcgaagaccatcaatttcggtgttctctacggtatgagtgcctttcgtttgtcgcaggaattaggcattccctatgaagaagctcaggcgttcattcagaaatactttcaaagctatcccaaagttaaagcatggatcgagaagactctccgtgaaggccgcacacgtggttacgtagagaccttatttggacgtcgccgctatgttcccgatttaaacgctcgcgtgaaaggcaagcgtgaagccgccgaacgcatggcgttcaacatgcctgtacagggcacggcagctgacctcatgaaacttgcaatggtgcgcctttttccacaattgcgtgaagttggtgcccgcatgctcttgcaggtccacgatgaactcttgttagaagcgccaaaagagcgtgcggaagaggtggcagccctcgcgaaagaagttatggaaggcgtgtggcccttagcggtgcctcttgaagtcgaagttggtattggcgaggattggctggctgccaaagga

SEQ ID NO: 5238 - protein, 841 aa, synthetic construct
  REGION 1..841: note = Variant of DNA polymerase I from Thermus sp. strain 2.9
MHHHHHHGGSGVLPVFEPKGRVLLVDGHHLAYRNFFALKGLTTSLGEPVQGVYGFAKSLLKALKEDGDVVIVVFDAKAPSFRHEAYEAYKAGRAPTPEDFPRQLALMKELVDLLGLERLEVPGFEADDVLATLAKKAEREGYEVQILTADRDLFQLLSPRISVLHPEGHRITPEWLWEKYGLRPEQWVDFRALAGDPSDNIPGVKGIGEKTALKLLKEWGSLENLLKNLDQVKPESVREKILAHLEDLKLSRELSRVRTDLPLEVDFGRRREPDWEGLKAFLERLEFGSLLHEFGLLESPLLAEEAPWPPPEGAFLGYRLSRPEPMWAELLALAASAQVRVYRAEDPHGALRGLFEVRGLLAKDLAVVALREGLDLPPTDDPMLLAYLLDPSNTTPEGVARRYGGEWTEDAAKRALLAERLHENLLGRLQGEERLLWLYEEVEKPLSRVLAHMEATGVKLDVAYLENLSLEVAAHMRRLEEEVFRLAGRSFRLNSRDQLERVLFDELGLPPIGKTEKTGKRSTSAAVLEALREVHPIVDKILQYREMAKLKGTYIDRLPALVHPKTGRLHTRFNQTATATGRLSSSDPNLQNIPVRTPLGQKIRRAFVAEEGWRLVALDYRQIELRVLAHLSGDENLIRVFQEGKDIHTQTASWMFGLSAEAIDPLMRRAAKTINFGVLYGMSAFRLSQELGIPYEEAQAFIQKYFQSYPKVKAWIEKTLREGRTRGYVETLFGRRRYVPDLNARVKGKREAAERMAFNMPVQGTAADLMKLAMVRLFPQLREVGARMLLQVHDELLLEAPKERAEEVAALAKEVMEGVWPLAVPLEVEVGIGEDWLAAKG

SEQ ID NO: 5239 - DNA, 2523 bp, synthetic construct
  misc_feature 1..2523: note = Variant of DNA polymerase I from Thermus sp. strain 2.9
  source 1..2523: mol_type = other DNA
atgcaccatcatcatcatcatggcggtagcggcgtgttaccggtgttcgagcctaaaggtcgcgtgcttctggttgatggccatcatctcgcgtatcgtaacttctttgccctgaaaggattaaccaccagcctgggcgagccggtacagggtgtctacggctttgcaaagtcgctcctgaaagctctgaaagaagacggtgatgtggtgattgttgtctttgatgcgaaagcgccaagttttcgccacgaagcgtacgaagcttacaaagccgggcgtgctccaacgccggaagactttcctcgccaattggcgcttatgaaggaattagtggatttgcttggcctcgaacgcttggaagttcccggtttcgaggcagacgacgtattagcgactctcgcaaagaaagccgaacgtgagggctatgaagtccagatcttgacagcagatcgcgatcttttccagcttttatctccgcgcatctcggtgttacacccggaagggcatcgtatcaccccggaatggctctgggagaaatatggtttgcgtcccgaacaatgggtggattttcgcgccttagcaggcgatccgagcgacaatattccgggagttaaaggtatcggcgagaagacggcgctcaagctccttaaagaatgggggtcgttggagaacttgcttaagaatttagatcaggtcaaaccagagtcagtgcgtgagaagattcttgctcacctcgaagacctcaaattaagccgcgaattgtcccgtgtacgcaccgatttgccgctcgaagttgatttcggtcgccgccgcgaacctgactgggagggtcttaaagcgtttttagagcgtcttgaatttggttcgctcttgcatgaattcggccttttagaaagcccgttactggccgaagaagcaccttggccaccgcccgagggcgcgtttttaggttaccgtttgagtcgcccggaaccgatgtgggccgaattactggctcttgcagcgtctgcccagggacgtgtgtatcgcgcggaagaccctcatggtgcgctccgcggcctcttcgaagtccgtggactccttgccaaagacttagctgttgttgcattgcgcgaaggtcttgatttacctccgactgatgatccaatgcttcttgcgtacctcttggacccgtcaaacacgacgcccgaaggcgtagcccgtcgttacggcggcgagtggaccgaagatgcagcgaaacgcgcgttattggccgaacgtttgcacgaaaatttattaggacgtttgcaaggcgaggaacgtctcctctggctttacgaagaagtggagaaaccattgagtcgcgtgctcgcgcatatggaagctaccggtgtcaaattagacgtggcgtatttggagaatctcagccttgaagttgctgcccacatgcgccgcttggaggaagaagtattccgtttagcaggccgttcctttcgccttaactctcgcgatcagttagaacgtgtgttgttcgatgaacttggtctccctcctatcggcaagacagagaagaccggtaaacgtagcacttcagcggcggttttagaagctcttcgcgaagtccatcccattgtggacaagatcttgcagtaccgcgaaatggcgaaattgaaaggcacctatattgaccgtcttccggcattagtccacccgaaaacgggacgcctccatacccgcttcaaccaaacagccacggcgaccggtcgtttgtcctcctctgatccaaaccttcagaatattccagtacgtaccccattgggccagaagatccgccgtgcgtttgtagctgaggagggttggcgtttagtggccctcgattatcgtcaaattgaattacgtgtccttgcccatctttctggcgatgagaacctcatccgcgtgtttcaggaaggcaaagacattcacactcaaacggcaagctggatgtttggattatcagctgaagcgatcgatcctttgatgcgtcgtgcagcgaagaccatcaatttcggtgttctctacggtatgagtgcctttcgtttgtcgcaggaattaggcattccctatgaagaagctcaggcgttcattcagaaatactttcaaagctatcccaaagttaaagcatggatcgagaagactctccgtgaaggccgcacacgtggttacgtagagaccttatttggacgtcgccgctatgttcccgatttaaacgctcgcgtgaaaggcaagcgtgaagccgccgaacgcatggcgttcaacatgcctgtacagggcacggcagctgacctcatgaaacttgcaatggtgcgcctttttccacaattgcgtgaagttggtgcccgcatgctcttgcaggtccacgatgaactcttgttagaagcgccaaaagagcgtgcggaagaggtggcagccctcgcgaaagaagttatggaaggcgtgtggcccttagcggtgcctcttgaagtcgaagttggtattggcgaggattggctggtggccaaagga

SEQ ID NO: 5240 - protein, 841 aa, synthetic construct
  REGION 1..841: note = Variant of DNA polymerase I from Thermus sp. strain 2.9
MHHHHHHGGSGVLPVFEPKGRVLLVDGHHLAYRNFFALKGLTTSLGEPVQGVYGFAKSLLKALKEDGDVVIVVFDAKAPSFRHEAYEAYKAGRAPTPEDFPRQLALMKELVDLLGLERLEVPGFEADDVLATLAKKAEREGYEVQILTADRDLFQLLSPRISVLHPEGHRITPEWLWEKYGLRPEQWVDFRALAGDPSDNIPGVKGIGEKTALKLLKEWGSLENLLKNLDQVKPESVREKILAHLEDLKLSRELSRVRTDLPLEVDFGRRREPDWEGLKAFLERLEFGSLLHEFGLLESPLLAEEAPWPPPEGAFLGYRLSRPEPMWAELLALAASAQGRVYRAEDPHGALRGLFEVRGLLAKDLAVVALREGLDLPPTDDPMLLAYLLDPSNTTPEGVARRYGGEWTEDAAKRALLAERLHENLLGRLQGEERLLWLYEEVEKPLSRVLAHMEATGVKLDVAYLENLSLEVAAHMRRLEEEVFRLAGRSFRLNSRDQLERVLFDELGLPPIGKTEKTGKRSTSAAVLEALREVHPIVDKILQYREMAKLKGTYIDRLPALVHPKTGRLHTRFNQTATATGRLSSSDPNLQNIPVRTPLGQKIRRAFVAEEGWRLVALDYRQIELRVLAHLSGDENLIRVFQEGKDIHTQTASWMFGLSAEAIDPLMRRAAKTINFGVLYGMSAFRLSQELGIPYEEAQAFIQKYFQSYPKVKAWIEKTLREGRTRGYVETLFGRRRYVPDLNARVKGKREAAERMAFNMPVQGTAADLMKLAMVRLFPQLREVGARMLLQVHDELLLEAPKERAEEVAALAKEVMEGVWPLAVPLEVEVGIGEDWLVAKG

SEQ ID NO: 5241 - DNA, 2523 bp, synthetic construct
  misc_feature 1..2523: note = Variant of DNA polymerase I from Thermus sp. strain 2.9
  source 1..2523: mol_type = other DNA
atgcaccatcatcatcatcatggcggtagcggcgtgttaccggtgttcgagcctaaaggtcgcgtgcttctggttgatggccatcatctcgcgtatcgtaacttctttgccctgaaaggattaaccaccagcctgggcgagccggtacagggtgtctacggctttgcaaagtcgctcctgaaagctctgaaagaagacggtgatgtggtgattgttgtctttgatgcgaaagcgccaagttttcgccacgaagcgtacgaagcttacaaagccgggcgtgctccaacgccggaagactttcctcgccaattggcgcttatgaaggaattagtggatttgcttggcctcgaacgcttggaagttcccggtttcgaggcagacgacgtattagcgactctcgcaaagaaagccgaacgtgagggctatgaagtccagatcttgacagcagatcgcgatcttttccagcttttatctccgcgcatctcggtgttacacccggaagggcatcgtatcaccccggaatggctctgggagaaatatggtttgcgtcccgaacaatgggtggattttcgcgccttagcaggcgatccgagcgacaatattccgggagttaaaggtatcggcgagaagacggcgctcaagctccttaaagaatgggggtcgttggagaacttgcttaagaatttagatcaggtcaaaccagagtcagtgcgtgagaagattcttgctcacctcgaagacctcaaattaagccgcgaattgtcccgtgtacgcaccgatttgccgctcgaagttgatttcggtcgccgccgcgaacctgactgggagggtcttaaagcgtttttagagcgtcttgaatttggttcgctcttgcatgaattcggccttttagaaagcccgttactggccgaagaagcaccttggccaccgcccgagggcgcgtttttaggttaccgtttgagtcgcccggaaccgatgtgggccgaattactggctcttgcagcgtctgcccagggacgtgtgtatcgcgcggaagaccctcatggtgcgctccgcggcctcttcgaagtccgtggactccttgccaaagacttagctgttgttgcattgcgcgaaggtcttgatttacctccgactgatgatccaatgcttcttgcgtacctcttggacccgtcaaacacgacgcccgaaggcgtagcccgtcgttacggcggcgagtggaccgaagatgcagcgaaacgcgcgttattggccgaacgtttgcacgaaaatttattaggacgtttgcaaggcgaggaacgtctcctctggctttacgaagaagtggagaaaccattgagtcgcgtgctcgcgcatatggaagctaccggtgtcaaattagacgtggcgtatttggagaatctcagccttgaagttgctgcccacatgcgccgcttggaggaagaagtattccgtttagcaggccgttcctttcgccttaactctcgcgatcagttagaacgtgtgttgttcgatgaacttggtctccctcctatcggcaagacagagaagaccggtaaacgtagcacttcagcggcggttttagaagctcttcgcgaagtccatcccattgtggacaagatcttgcagtaccgcgaaatggcgaaattgaaaggcacctatattgaccgtcttccggcattagtccacccgaaaacgggacgcctccatacccgcttcaaccaaacagccacggcgaccggtcgtttgtcctcctctgatccaaaccttcagaatattccagtacgtaccccattgggccagaagatccgccgtgcgtttgtagctgaggagggttggcgtttagtggccctcgattatcgtcaaattgaattacgtgtccttgcccatctttctggcgatgagaacctcatccgcgtgtttcaggaaggcaaagacattcacactcaaacggcaagctggatgtttggattatcagctgaagcgatcgatcctttgatgcgtcgtgcagcgaagaccatcaatttcggtgttctctacggtatgagtgcctttcgtttgtcgcaggaattaggcattccctatgaagaagctcaggcgttcattcagaaatactttcaaagctatcccaaagttaaagcatggatcgagaagactctccgtgaaggccgcacacgtggttacgtagagaccttatttggacgtcgccgctatgttcccgatttaaacgctcgcgtgaaaggcaagcgtgaagccgccgaacgcatggcgttcaacatgcctgtacagggcacggcagctgacctcatgaaacttgcaatggtgcgcctttttccacaattgcgtgaagttggtgccgggatgctcttgcaggtccacgatgaactcttgttagaagcgccaaaagagcgtgcggaagaggtggcagccctcgcgaaagaagttatggaaggcgtgtggcccttagcggtgcctcttgaagtcgaagttggtattggcgaggattggctggctgccaaagga

SEQ ID NO: 5242 - protein, 841 aa, synthetic construct
  REGION 1..841: note = Variant of DNA polymerase I from Thermus sp. strain 2.9
MHHHHHHGGSGVLPVFEPKGRVLLVDGHHLAYRNFFALKGLTTSLGEPVQGVYGFAKSLLKALKEDGDVVIVVFDAKAPSFRHEAYEAYKAGRAPTPEDFPRQLALMKELVDLLGLERLEVPGFEADDVLATLAKKAEREGYEVQILTADRDLFQLLSPRISVLHPEGHRITPEWLWEKYGLRPEQWVDFRALAGDPSDNIPGVKGIGEKTALKLLKEWGSLENLLKNLDQVKPESVREKILAHLEDLKLSRELSRVRTDLPLEVDFGRRREPDWEGLKAFLERLEFGSLLHEFGLLESPLLAEEAPWPPPEGAFLGYRLSRPEPMWAELLALAASAQGRVYRAEDPHGALRGLFEVRGLLAKDLAVVALREGLDLPPTDDPMLLAYLLDPSNTTPEGVARRYGGEWTEDAAKRALLAERLHENLLGRLQGEERLLWLYEEVEKPLSRVLAHMEATGVKLDVAYLENLSLEVAAHMRRLEEEVFRLAGRSFRLNSRDQLERVLFDELGLPPIGKTEKTGKRSTSAAVLEALREVHPIVDKILQYREMAKLKGTYIDRLPALVHPKTGRLHTRFNQTATATGRLSSSDPNLQNIPVRTPLGQKIRRAFVAEEGWRLVALDYRQIELRVLAHLSGDENLIRVFQEGKDIHTQTASWMFGLSAEAIDPLMRRAAKTINFGVLYGMSAFRLSQELGIPYEEAQAFIQKYFQSYPKVKAWIEKTLREGRTRGYVETLFGRRRYVPDLNARVKGKREAAERMAFNMPVQGTAADLMKLAMVRLFPQLREVGAGMLLQVHDELLLEAPKERAEEVAALAKEVMEGVWPLAVPLEVEVGIGEDWLAAKG

SEQ ID NO: 5243 - DNA, 2523 bp, synthetic construct
  misc_feature 1..2523: note = Variant of DNA polymerase I from Thermus sp. strain 2.9
  source 1..2523: mol_type = other DNA
atgcaccatcatcatcatcatggcggtagcggcgtgttaccggtgttcgagcctaaaggtcgcgtgcttctggttgatggccatcatctcgcgtatcgtaacttctttgccctgaaaggattaaccaccagcctgggcgagccggtacagggtgtctacggctttgcaaagtcgctcctgaaagctctgaaagaagacggtgatgtggtgattgttgtctttgatgcgaaagcgccaagttttcgccacgaagcgtacgaagcttacaaagccgggcgtgctccaacgccggaagactttcctcgccaattggcgcttatgaaggaattagtggatttgcttggcctcgaacgcttggaagttcccggtttcgaggcagacgacgtattagcgactctcgcaaagaaagccgaacgtgagggctatgaagtccagatcttgacagcagatcgcgatcttttccagcttttatctccgcgcatctcggtgttacacccggaagggcatcgtatcaccccggaatggctctgggagaaatatggtttgcgtcccgaacaatgggtggattttcgcgccttagcaggcgatccgagcgacaatattccgggagttaaaggtatcggcgagaagacggcgctcaagctccttaaagaatgggggtcgttggagaacttgcttaagaatttagatcaggtcaaaccagagtcagtgcgtgagaagattcttgctcacctcgaagacctcaaattaagccgcgaattgtcccgtgtacgcaccgatttgccgctcgaagttgatttcggtcgccgccgcgaacctgactgggagggtcttaaagcgtttttagagcgtcttgaatttggttcgctcttgcatgaattcggccttttagaaagcccgttactggccgaagaagcaccttggccaccgcccgagggcgcgtttttaggttaccgtttgagtcgcccggaaccgatgtgggccgaattactggctcttgcagcgtctgcccagggacgtgtgtatcgcgcggaagaccctcatggtgcgctccgcggcctcttcgaagtccgtggactccttgccaaagacttagctgttgttgcattgcgcgaaggtcttgatttacctccgactgatgatccaatgcttcttgcgtacctcttggacccgtcaaacacgacgcccgaaggcgtagcccgtcgttacggcggcgagtggaccgaagatgcagcgaaacgcgcgttattggccgaacgtttgcacgaaaatttattaggacgtttgcaaggcgaggaacgtctcctctggctttacgaagaagtggagaaaccattgagtcgcgtgctcgcgcatatggaagctaccggtgtcaaattagacgtggcgtatttggagaatctcagccttgaagttgctgcccacatgcgccgcttggaggaagaagtattccgtttagcaggccgttcctttcgccttaactctcgcgatcagttagaacgtgtgttgttcgatgaacttggtctccctcctatcggcaagacagagaagaccggtaaacgtagcacttcagcggcggttttagaagctcttcgcgaagtccatcccattgtggacaagatcttgcagtaccgcgaaatggcgaaattgaaaggcacctatattgaccgtcttccggcattagtccacccgaaaacgggacgcctccatacccgcttcaaccaaacagccacggcgaccggtcgtttgtcctcctctgatccaaaccttcagaatattccagtacgtaccccattgggccagaagatccgccgtgcgtttgtagctgaggagggttggcgtttagtggccctcgattatcgtcaaattgaattacgtgtccttgcccatctttctggcgatgagaacctcatccgcgtgtttcaggaaggcaaagacattcacactcaaacggcaagctggatgtttggattatcagctgaagcgatcgatcctttgatgcgtcgtgcagcgaagaccatcaatttcggtgttctctacggtatgagtgcctttcgtttgtcgcaggaattaggcattccctatgaagaagctcaggcgttcattcagaaatactttcaaagctatcccaaagttaaagcatggatcgagaagactctccgtgaaggccgcacacgtggttacgtagagaccttatttggacgtcgccgctatgttcccgatttaaacgctcgcgtgaaaggcaagcgtgaagccgccgaacgcatggcgttcaacatgcctgtacagggcacggcagctgacctcatgaaacttgcaatggtgcgcctttttccacaattgcgtgaagttggtgcccgcatgctcttgcaggtccacgatgaactcttgttagaagcgccaaaagagcgtgcggaagaggtggcagccctcgcgaaagaagttatgcagggcgtgtggcccttagcggtgcctcttgaagtcgaagttggtattggcgaggattggctggctgccaaagga

SEQ ID NO: 5244 - protein, 841 aa, synthetic construct
  REGION 1..841: note = Variant of DNA polymerase I from Thermus sp. strain 2.9
MHHHHHHGGSGVLPVFEPKGRVLLVDGHHLAYRNFFALKGLTTSLGEPVQGVYGFAKSLLKALKEDGDVVIVVFDAKAPSFRHEAYEAYKAGRAPTPEDFPRQLALMKELVDLLGLERLEVPGFEADDVLATLAKKAEREGYEVQILTADRDLFQLLSPRISVLHPEGHRITPEWLWEKYGLRPEQWVDFRALAGDPSDNIPGVKGIGEKTALKLLKEWGSLENLLKNLDQVKPESVREKILAHLEDLKLSRELSRVRTDLPLEVDFGRRREPDWEGLKAFLERLEFGSLLHEFGLLESPLLAEEAPWPPPEGAFLGYRLSRPEPMWAELLALAASAQGRVYRAEDPHGALRGLFEVRGLLAKDLAVVALREGLDLPPTDDPMLLAYLLDPSNTTPEGVARRYGGEWTEDAAKRALLAERLHENLLGRLQGEERLLWLYEEVEKPLSRVLAHMEATGVKLDVAYLENLSLEVAAHMRRLEEEVFRLAGRSFRLNSRDQLERVLFDELGLPPIGKTEKTGKRSTSAAVLEALREVHPIVDKILQYREMAKLKGTYIDRLPALVHPKTGRLHTRFNQTATATGRLSSSDPNLQNIPVRTPLGQKIRRAFVAEEGWRLVALDYRQIELRVLAHLSGDENLIRVFQEGKDIHTQTASWMFGLSAEAIDPLMRRAAKTINFGVLYGMSAFRLSQELGIPYEEAQAFIQKYFQSYPKVKAWIEKTLREGRTRGYVETLFGRRRYVPDLNARVKGKREAAERMAFNMPVQGTAADLMKLAMVRLFPQLREVGARMLLQVHDELLLEAPKERAEEVAALAKEVMQGVWPLAVPLEVEVGIGEDWLAAKG

SEQ ID NO: 5245 - DNA, 2523 bp, synthetic construct
  misc_feature 1..2523: note = Variant of DNA polymerase I from Thermus sp. strain 2.9
  source 1..2523: mol_type = other DNA
atgcaccatcatcatcatcatggcggtagcggcgtgttaccggtgttcgagcctaaaggtcgcgtgcttctggttgatggccatcatctcgcgtatcgtaacttctttgccctgaaaggattaaccaccagcctgggcgagccggtacagggtgtctacggctttgcaaagtcgctcctgaaagctctgaaagaagacggtgatgtggtgattgttgtctttgatgcgaaagcgccaagttttcgccacgaagcgtacgaagcttacaaagccgggcgtgctccaacgccggaagactttcctcgccaattggcgcttatgaaggaattagtggatttgcttggcctcgaacgcttggaagttcccggtttcgaggcagacgacgtattagcgactctcgcaaagaaagccgaacgtgagggctatgaagtccagatcttgacagcagatcgcgatcttttccagcttttatctccgcgcatctcggtgttacacccggaagggcatcgtatcaccccggaatggctctgggagaaatatggtttgcgtcccgaacaatgggtggattttcgcgccttagcaggcgatccgagcgacaatattccgggagttaaaggtatcggcgagaagacggcgctcaagctccttaaagaatgggggtcgttggagaacttgcttaagaatttagatcaggtcaaaccagagtcagtgcgtgagaagattcttgctcacctcgaagacctcaaattaagccgcgaattgtcccgtgtacgcaccgatttgccgctcgaagttgatttcggtcgccgccgcgaacctgactgggagggtcttaaagcgtttttagagcgtcttgaatttggttcgctcttgcatgaattcggccttttagaaagcccgttactggccgaagaagcaccttggccaccgcccgagggcgcgtttttaggttaccgtttgagtcgcccggaaccgatgtgggccgaattactggctcttgcagcgtctgcccagggacgtgtgtatcgcgcggaagaccctcatggtgcgctccgcggcctcttcgaagtccgtggactccttgccaaagacttagctgttgttgcattgcgcgaaggtcttgatttacctccgactgatgatccaatgcttcttgcgtacctcttggacccgtcaaacacgacgcccgaaggcgtagcccgtcgttacggcggcgagtggaccgaagatgcagcgaaacgcgcgttattggccgaacgtttgcacgaaaatttattaggacgtttgcaaggcgaggaacgtctcctctggctttacgaagaagtggagaaaccattgagtcgcgtgctcgcgcatatggaagctaccggtgtcaaattagacgtggcgtatttggagaatctcagccttgaagttgctgcccacatgcgccgcttggaggaagaagtattccgtttagcaggccgttcctttcgccttaactctcgcgatcagttagaacgtgtgttgttcgatgaacttggtctccctcctatcggcaagacagagaagaccggtaaacgtagcacttcagcggcggttttagaagctcttcgcgaagtccatcccattgtggacaagatcttgcagtaccgcgaaatggcgaaattgaaaggcacctatattgaccgtcttccggcattagtccacccgaaaacgggacgcctccatacccgcttcaaccaaacagccacggcgaccggtcgtttgtcctcctctgatccaaaccttcagaatattccagtacgtaccccattgggccagaagatccgccgtgcgtttgtagctgaggagggttggcgtttagtggccctcgattatcgtcaaattgaattacgtgtccttgcccatctttctggcgatgagaacctcatccgcgtgtttcaggaaggcaaagacattcacactcaaacggcaagctggatgtttggattatcagctgaagcgatcgatcctttgatgcgtcgtgcagcgaagaccatcaatttcggtgttctctacggtatgagtgcctttcgtttgtcgcaggaattaggcattccctatgaagaagctcaggcgttcattcagaaatactttcaaagctatcccaaagttaaagcatggatcgagaagactctccgtgaaggccgcacacgtggttacgtagagaccttatttggacgtcgccgctatgttcccgatttaaacgctcgcgtgaaaggcaagcgtgaagccgccgaacgcatggcgttcaacatgcctgtacagggcacggcagctgacctcatgaaacttgcaatggtgcgcctttttccacaattgcgtgaagttggtgcccgcatgtatttgcaggtccacgatgaactcttgttagaagcgccaaaagagcgtgcggaagaggtggcagccctcgcgaaagaagttatggaaggcgtgtggcccttagcggtgcctcttgaagtcgaagttggtattggcgaggattggctggctgccaaagga

SEQ ID NO: 5246 - protein, 841 aa, synthetic construct
  REGION 1..841: note = Variant of DNA polymerase I from Thermus sp. strain 2.9
MHHHHHHGGSGVLPVFEPKGRVLLVDGHHLAYRNFFALKGLTTSLGEPVQGVYGFAKSLLKALKEDGDVVIVVFDAKAPSFRHEAYEAYKAGRAPTPEDFPRQLALMKELVDLLGLERLEVPGFEADDVLATLAKKAEREGYEVQILTADRDLFQLLSPRISVLHPEGHRITPEWLWEKYGLRPEQWVDFRALAGDPSDNIPGVKGIGEKTALKLLKEWGSLENLLKNLDQVKPESVREKILAHLEDLKLSRELSRVRTDLPLEVDFGRRREPDWEGLKAFLERLEFGSLLHEFGLLESPLLAEEAPWPPPEGAFLGYRLSRPEPMWAELLALAASAQGRVYRAEDPHGALRGLFEVRGLLAKDLAVVALREGLDLPPTDDPMLLAYLLDPSNTTPEGVARRYGGEWTEDAAKRALLAERLHENLLGRLQGEERLLWLYEEVEKPLSRVLAHMEATGVKLDVAYLENLSLEVAAHMRRLEEEVFRLAGRSFRLNSRDQLERVLFDELGLPPIGKTEKTGKRSTSAAVLEALREVHPIVDKILQYREMAKLKGTYIDRLPALVHPKTGRLHTRFNQTATATGRLSSSDPNLQNIPVRTPLGQKIRRAFVAEEGWRLVALDYRQIELRVLAHLSGDENLIRVFQEGKDIHTQTASWMFGLSAEAIDPLMRRAAKTINFGVLYGMSAFRLSQELGIPYEEAQAFIQKYFQSYPKVKAWIEKTLREGRTRGYVETLFGRRRYVPDLNARVKGKREAAERMAFNMPVQGTAADLMKLAMVRLFPQLREVGARMYLQVHDELLLEAPKERAEEVAALAKEVMEGVWPLAVPLEVEVGIGEDWLAAKG

SEQ ID NO: 5247 - DNA, 2523 bp, synthetic construct
  misc_feature 1..2523: note = Variant of DNA polymerase I from Thermus sp. strain 2.9
  source 1..2523: mol_type = other DNA
atgcaccatcatcatcatcatggcggtagcggcgtgttaccggtgttcgagcctaaaggtcgcgtgcttctggttgatggccatcatctcgcgtatcgtaacttctttgccctgaaaggattaaccaccagcctgggcgagccggtacagggtgtctacggctttgcaaagtcgctcctgaaagctctgaaagaagacggtgatgtggtgattgttgtctttgatgcgaaagcgccaagttttcgccacgaagcgtacgaagcttacaaagccgggcgtgctccaacgccggaagactttcctcgccaattggcgcttatgaaggaattagtggatttgcttggcctcgaacgcttggaagttcccggtttcgaggcagacgacgtattagcgactctcgcaaagaaagccgaacgtgagggctatgaagtccagatcttgacagcagatcgcgatcttttccagcttttatctccgcgcatctcggtgttacacccggaagggcatcgtatcaccccggaatggctctgggagaaatatggtttgcgtcccgaacaatgggtggattttcgcgccttagcaggcgatccgagcgacaatattccgggagttaaaggtatcggcgagaagacggcgctcaagctccttaaagaatgggggtcgttggagaacttgcttaagaatttagatcaggtcaaaccagagtcagtgcgtgagaagattcttgctcacctcgaagacctcaaattaagccgcgaattgtcccgtgtacgcaccgatttgccgctcgaagttgatttcggtcgccgccgcgaacctgactgggagggtcttaaagcgtttttagagcgtcttgaatttggttcgctcttgcatgaattcggccttttagaaagcccgttactggccgaagaagcaccttggccaccgcccgagggcgcgtttttaggttaccgtttgagtcgcccggaaccgatgtgggccgaattactggctcttgcagcgtctgcccagggacgtgtgtatcgcgcggaagaccctcatggtgcgctccgcggcctcttcgaagtccgtggactccttgccaaagacttagctgttgttgcattgcgcgaaggtcttgatttacctccgactgatgatccaatgcttcttgcgtacctcttggacccgtcaaacacgacgcccgaaggcgtagcccgtcgttacggcggcgagtggaccgaagatgcagcgaaacgcgcgttattggccgaacgtttgcacgaaaatttattaggacgtttgcaaggcgaggaacgtctcctctggctttacgaagaagtggagaaaccattgagtcgcgtgctcgcgcatatggaagctaccggtgtcaaattagacgtggcgtatttggagaatctcagccttgaagttgctgcccacatgcgccgcttggaggaagaagtattccgtttatatggccgttcctttcgccttaactctcgcgatcagttagaacgtgtgttgttcgatgaacttggtctccctcctatcggcaagacagagaagaccggtaaacgtagcacttcagcggcggttttagaagctcttcgcgaagtccatcccattgtggacaagatcttgcagtaccgcgaaatggcgaaattgaaaggcacctatattgaccgtcttccggcattagtccacccgaaaacgggacgcctccatacccgcttcaaccaaacagccacggcgaccggtcgtttgtcctcctctgatccaaaccttcagaatattccagtacgtaccccattgggccagaagatccgccgtgcgtttgtagctgaggagggttggcgtttagtggccctcgattatcgtcaaattgaattacgtgtccttgcccatctttctggcgatgagaacctcatccgcgtgtttcaggaaggcaaagacattcacactcaaacggcaagctggatgtttggattatcagctgaagcgatcgatcctttgatgcgtcgtgcagcgaagaccatcaatttcggtgttctctacggtatgagtgcctttcgtttgtcgcaggaattaggcattccctatgaagaagctcaggcgttcattcagaaatactttcaaagctatcccaaagttaaagcatggatcgagaagactctccgtgaaggccgcacacgtggttacgtagagaccttatttggacgtcgccgctatgttcccgatttaaacgctcgcgtgaaaggcaagcgtgaagccgccgaacgcatggcgttcaacatgcctgtacagggcacggcagctgacctcatgaaacttgcaatggtgcgcctttttccacaattgcgtgaagttggtgcccgcatgctcttgcaggtccacgatgaactcttgttagaagcgccaaaagagcgtgcggaagaggtggcagccctcgcgaaagaagttatggaaggcgtgtggcccttagcggtgcctcttgaagtcgaagttggtattggcgaggattggctggctgccaaagga

SEQ ID NO: 5248 - protein, 841 aa, synthetic construct
  REGION 1..841: note = Variant of DNA polymerase I from Thermus sp. strain 2.9
MHHHHHHGGSGVLPVFEPKGRVLLVDGHHLAYRNFFALKGLTTSLGEPVQGVYGFAKSLLKALKEDGDVVIVVFDAKAPSFRHEAYEAYKAGRAPTPEDFPRQLALMKELVDLLGLERLEVPGFEADDVLATLAKKAEREGYEVQILTADRDLFQLLSPRISVLHPEGHRITPEWLWEKYGLRPEQWVDFRALAGDPSDNIPGVKGIGEKTALKLLKEWGSLENLLKNLDQVKPESVREKILAHLEDLKLSRELSRVRTDLPLEVDFGRRREPDWEGLKAFLERLEFGSLLHEFGLLESPLLAEEAPWPPPEGAFLGYRLSRPEPMWAELLALAASAQGRVYRAEDPHGALRGLFEVRGLLAKDLAVVALREGLDLPPTDDPMLLAYLLDPSNTTPEGVARRYGGEWTEDAAKRALLAERLHENLLGRLQGEERLLWLYEEVEKPLSRVLAHMEATGVKLDVAYLENLSLEVAAHMRRLEEEVFRLYGRSFRLNSRDQLERVLFDELGLPPIGKTEKTGKRSTSAAVLEALREVHPIVDKILQYREMAKLKGTYIDRLPALVHPKTGRLHTRFNQTATATGRLSSSDPNLQNIPVRTPLGQKIRRAFVAEEGWRLVALDYRQIELRVLAHLSGDENLIRVFQEGKDIHTQTASWMFGLSAEAIDPLMRRAAKTINFGVLYGMSAFRLSQELGIPYEEAQAFIQKYFQSYPKVKAWIEKTLREGRTRGYVETLFGRRRYVPDLNARVKGKREAAERMAFNMPVQGTAADLMKLAMVRLFPQLREVGARMLLQVHDELLLEAPKERAEEVAALAKEVMEGVWPLAVPLEVEVGIGEDWLAAKG

SEQ ID NO: 5249 - DNA, 2523 bp, synthetic construct
  misc_feature 1..2523: note = Variant of DNA polymerase I from Thermus sp. strain 2.9
  source 1..2523: mol_type = other DNA
atgcaccatcatcatcatcatggcggtagcggcgtgttaccggtgttcgagcctaaaggtcgcgtgcttctggttgatggccatcatctcgcgtatcgtaacttctttgccctgaaaggattaaccaccagcctgggcgagccggtacagggtgtctacggctttgcaaagtcgctcctgaaagctctgaaagaagacggtgatgtggtgattgttgtctttgatgcgaaagcgccaagttttcgccacgaagcgtacgaagcttacaaagccgggcgtgctccaacgccggaagactttcctcgccaattggcgcttatgaaggaattagtggatttgcttggcctcgaacgcttggaagttcccggtttcgaggcagacgacgtattagcgactctcgcaaagaaagccgaacgtgagggctatgaagtccagatcttgacagcagatcgcgatcttttccagcttttatctccgcgcatctcggtgttacacccggaagggcatcgtatcaccccggaatggctctgggagaaatatggtttgcgtcccgaacaatgggtggattttcgcgccttagcaggcgatccgagcgacaatattccgggagttaaaggtatcggcgagaagacggcgctcaagctccttaaagaatgggggtcgttggagaacttgcttaagaatttagatcaggtcaaaccagagtcagtgcgtgagaagattcttgctcacctcgaagacctcaaattaagccgcgaattgtcccgtgtacgcaccgatttgccgctcgaagttgatttcggtcgccgccgcgaacctgactgggagggtcttaaagcgtttttagagcgtcttgaatttggttcgctcttgcatgaattcggccttttagaaagcccgttactggccgaagaagcaccttggccaccgcccgagggcgcgtttttaggttaccgtttgagtcgcccggaaccgatgtgggccgaattactggctcttgcagcgtctgcccagggacgtatgtatcgcgcggaagaccctcatggtgcgctccgcggcctcttcgaagtccgtggactccttgccaaagacttagctgttgttgcattgcgcgaaggtcttgatttacctccgactgatgatccaatgcttcttgcgtacctcttggacccgtcaaacacgacgcccgaaggcgtagcccgtcgttacggcggcgagtggaccgaagatgcagcgaaacgcgcgttattggccgaacgtttgcacgaaaatttattaggacgtttgcaaggcgaggaacgtctcctctggctttacgaagaagtggagaaaccattgagtcgcgtgctcgcgcatatggaagctaccggtgtcaaattagacgtggcgtatttggagaatctcagccttgaagttgctgcccacatgcgccgcttggaggaagaagtattccgtttagcaggccgttcctttcgccttaactctcgcgatcagttagaacgtgtgttgttcgatgaacttggtctccctcctatcggcaagacagagaagaccggtaaacgtagcacttcagcggcggttttagaagctcttctggaagtccatcccattgtggacaagatcttgcagtaccgcgaaatggcgaaattgaaaggcacctatattgaccgtcttccggcattagtccacccgaaaacgggacgcctccatacccgcttcaaccaaacagccacggcgaccggtcgtttgtcctcctctgatccaaaccttcagaatattccagtacgtaccccattgggccagaagatccgccgtgcgtttgtagctgaggagggttggcgtttagtggccctcgattatcgtcaaattgaattacgtgtccttgcccatctttctggcgatgagaacctcatccgcgtgtttcaggaaggcaaagacattcacactcaaacggcaagctggatgtttggattatcagctgaagcgatcgatcctttgatgcgtcgtgcagcgaagaccatcaatttcggtgttctctacggtatgagtgcctttcgtttgtcgcaggaattaggcattccctatgaagaagctcaggcgttcattcagaaatactttcaaagctatcccaaagttaaagcatggatcgagaagactctccgtgaaggccgcacacgtggttacgtagagaccttatttggacgtcgccgctatgttcccgatttaaacgctcgcgtgaaaggcaagcgtgaagccgccgaacgcatggcgttcaacatgcctgtacagggcacggcagctgacctcatgaaacttgcaatggtgcgcctttttccacaattgcgtgaagttggtgcccgcatgctcttgcaggtccacgatgaactcttgttagaagcgccaaaagagcgtgcggaagaggtggcagccctcgcgaaagaagttatggaaggcgtgtggcccttagcggtgcctcttgaagtcgaagttggtattggcgaggattggctggctgccaaagga

SEQ ID NO: 5250 - protein, 841 aa, synthetic construct
  REGION 1..841: note = Variant of DNA polymerase I from Thermus sp. strain 2.9
MHHHHHHGGSGVLPVFEPKGRVLLVDGHHLAYRNFFALKGLTTSLGEPVQGVYGFAKSLLKALKEDGDVVIVVFDAKAPSFRHEAYEAYKAGRAPTPEDFPRQLALMKELVDLLGLERLEVPGFEADDVLATLAKKAEREGYEVQILTADRDLFQLLSPRISVLHPEGHRITPEWLWEKYGLRPEQWVDFRALAGDPSDNIPGVKGIGEKTALKLLKEWGSLENLLKNLDQVKPESVREKILAHLEDLKLSRELSRVRTDLPLEVDFGRRREPDWEGLKAFLERLEFGSLLHEFGLLESPLLAEEAPWPPPEGAFLGYRLSRPEPMWAELLALAASAQGRMYRAEDPHGALRGLFEVRGLLAKDLAVVALREGLDLPPTDDPMLLAYLLDPSNTTPEGVARRYGGEWTEDAAKRALLAERLHENLLGRLQGEERLLWLYEEVEKPLSRVLAHMEATGVKLDVAYLENLSLEVAAHMRRLEEEVFRLAGRSFRLNSRDQLERVLFDELGLPPIGKTEKTGKRSTSAAVLEALLEVHPIVDKILQYREMAKLKGTYIDRLPALVHPKTGRLHTRFNQTATATGRLSSSDPNLQNIPVRTPLGQKIRRAFVAEEGWRLVALDYRQIELRVLAHLSGDENLIRVFQEGKDIHTQTASWMFGLSAEAIDPLMRRAAKTINFGVLYGMSAFRLSQELGIPYEEAQAFIQKYFQSYPKVKAWIEKTLREGRTRGYVETLFGRRRYVPDLNARVKGKREAAERMAFNMPVQGTAADLMKLAMVRLFPQLREVGARMLLQVHDELLLEAPKERAEEVAALAKEVMEGVWPLAVPLEVEVGIGEDWLAAKG

SEQ ID NO: 5251 - DNA, 2523 bp, synthetic construct
  misc_feature 1..2523: note = Variant of DNA polymerase I from Thermus sp. strain 2.9
  source 1..2523: mol_type = other DNA
atgcaccatcatcatcatcatggcggtagcggcgtgttaccggtgttcgagcctaaaggtcgcgtgcttctggttgatggccatcatctcgcgtatcgtaacttctttgccctgaaaggattaaccaccagcctgggcgagccggtacagggtgtctacggctttgcaaagtcgctcctgaaagctctgaaagaagacggtgatgtggtgattgttgtctttgatgcgaaagcgccaagttttcgccacgaagcgtacgaagcttacaaagccgggcgtgctccaacgccggaagactttcctcgccaattggcgcttatgaaggaattagtggatttgcttggcctcgaacgcttggaagttcccggtttcgaggcagacgacgtattagcgactctcgcaaagaaagccgaacgtgagggctatgaagtccagatcttgacagcagatcgcgatcttttccagcttttatctccgcgcatctcggtgttacacccggaagggcatcgtatcaccccggaatggctctgggagaaatatggtttgcgtcccgaacaatgggtggattttcgcgccttagcaggcgatccgagcgacaatattccgggagttaaaggtatcggcgagaagacggcgctcaagctccttaaagaatgggggtcgttggagaacttgcttaagaatttagatcaggtcaaaccagagtcagtgcgtgagaagattcttgctcacctcgaagacctcaaattaagccgcgaattgtcccgtgtacgcaccgatttgccgctcgaagttgatttcggccgccgccgcgaacctgactgggagggtcttaaagcgtttttagagcgtcttgaatttggttcgctcttgcatgaattcggccttttagaaagcccgttactggccgaagaagcaccttggccaccgcccgagggcgcgtttttaggttaccgtttgagtcgcccggaaccgatgtgggccgaattactggctcttgcagcgtctgcccagggacgtgtgtatcgcgcggaagaccctcatggtgcgctccgcggcctcttcgaagtccgtggactccttgccaaagacttagctgttgttgcattgcgcgaaggtcttgatttacctccgactgatgatccaatgcttcttgcgtacctcttggacccgtcaaacacgacgcccgaaggcgtagcccgtcgttacggcggcgagtggaccgaagatgcagcgaaacgcgcgttattggccgaacgtttgcacgcaaatttattaggacgtttgcaaggcgaggaacgtctcctctggctttacgaagaagtggagaaaccattgagtcgcgtgctcgcgcatatggaagctaccggtgtcaaattagacgtggcgtatttggaggcccttagccttgaagttgctgcccatatgcgccgcttggaggaagaagtattccgtttagcaggccgctcctttcgccttaactctcgcgatcagttagaacgtgtgttgttcgatgaacttggtctccctcctatcggcaagacagagaagaccggtaaacgtagcacttcagcggcggttttagaagctcttcgcgaagtccatcccattgtggacaagatcttgcagtaccgcgaaatggcgaaattgaaaggcacctatattgaccgtcttccggcattagtccacccgaaaacgggacgcctccatacccgcttcaaccaaacagccacggcgaccggtcgtttgtcctcctctgatccaaaccttcagaatattccagtacgtaccccattgggccagaagatccgccgtgcgtttgtagctgaggagggttggcgtttagtggccctcgattatcgtcaaattgaattacgtgtccttgcccatctttctggcgatgagaacctcatccgcgtgtttcaggaaggcaaagacattcacactcaaacggcaagctggatgtttggattatcagctgaagcgatcgatcctttgatgcgtcgtgcagcgaagaccatcaatttcggtgttctctacggtatgagtgcctttcgtttgtcgcaggaattaggcattccctatgaagaagctcaggcgttcattcagaaatactttcaaagctatcccaaagttaaagcatggatcgagaagactctcgaggaaggccgcacacgtggttacgtagagaccttatttggacgtcgccgctatgttcccgatttaaacgctcgcgtgaaaggcaagcgtgaagccgccgaacgcatggcgttcaacatgcctgtacagggcacggcagctgacctcatgaaacttgcaatggtgcgcctttttccacaattgcgtgaagttggtgcccgcatgctcttgcaggtccacgatgaactcttgttagaagcgccaaaagagcgtgcggaagaggtggcagccctcgcgaaagaagttatggaaggcgtgtggcccttagcggtgcctcttgaagtcgaagttggtattggcgaggattggctggctgccaaagga

SEQ ID NO: 5252 - protein, 841 aa, synthetic construct
  REGION 1..841: note = Variant of DNA polymerase I from Thermus sp. strain 2.9
MHHHHHHGGSGVLPVFEPKGRVLLVDGHHLAYRNFFALKGLTTSLGEPVQGVYGFAKSLLKALKEDGDVVIVVFDAKAPSFRHEAYEAYKAGRAPTPEDFPRQLALMKELVDLLGLERLEVPGFEADDVLATLAKKAEREGYEVQILTADRDLFQLLSPRISVLHPEGHRITPEWLWEKYGLRPEQWVDFRALAGDPSDNIPGVKGIGEKTALKLLKEWGSLENLLKNLDQVKPESVREKILAHLEDLKLSRELSRVRTDLPLEVDFGRRREPDWEGLKAFLERLEFGSLLHEFGLLESPLLAEEAPWPPPEGAFLGYRLSRPEPMWAELLALAASAQGRVYRAEDPHGALRGLFEVRGLLAKDLAVVALREGLDLPPTDDPMLLAYLLDPSNTTPEGVARRYGGEWTEDAAKRALLAERLHANLLGRLQGEERLLWLYEEVEKPLSRVLAHMEATGVKLDVAYLEALSLEVAAHMRRLEEEVFRLAGRSFRLNSRDQLERVLFDELGLPPIGKTEKTGKRSTSAAVLEALREVHPIVDKILQYREMAKLKGTYIDRLPALVHPKTGRLHTRFNQTATATGRLSSSDPNLQNIPVRTPLGQKIRRAFVAEEGWRLVALDYRQIELRVLAHLSGDENLIRVFQEGKDIHTQTASWMFGLSAEAIDPLMRRAAKTINFGVLYGMSAFRLSQELGIPYEEAQAFIQKYFQSYPKVKAWIEKTLEEGRTRGYVETLFGRRRYVPDLNARVKGKREAAERMAFNMPVQGTAADLMKLAMVRLFPQLREVGARMLLQVHDELLLEAPKERAEEVAALAKEVMEGVWPLAVPLEVEVGIGEDWLAAKG

SEQ ID NO: 5253 - DNA, 2523 bp, synthetic construct
  misc_feature 1..2523: note = Variant of DNA polymerase I from Thermus sp. strain 2.9
  source 1..2523: mol_type = other DNA
atgcaccatcatcatcatcatggcggtagcggcgtgttaccggtgttcgagcctaaaggtcgcgtgcttctggttgatggccatcatctcgcgtatcgtaacttctttgccctgaaaggattaaccaccagcctgggcgagccggtacagggtgtctacggctttgcaaagtcgctcctgaaagctctgaaagaagacggtgatgtggtgattgttgtctttgatgcgaaagcgccaagttttcgccacgaagcgtacgaagcttacaaagccgggcgtgctccaacgccggaagactttcctcgccaattggcgcttatgaaggaattagtggatttgcttggcctcgaacgcttggaagttcccggtttcgaggcagacgacgtattagcgactctcgcaaagaaagccgaacgtgagggctatgaagtccagatcttgacagcagatcgcgatcttttccagcttttatctccgcgcatctcggtgttacacccggaagggcatcgtatcaccccggaatggctctgggagaaatatggtttgcgtcccgaacaatgggtggattttcgcgccttagcaggcgatccgagcgacaatattccgggagttaaaggtatcggcgagaagacggcgctcaagctccttaaagaatgggggtcgttggagaacttgcttaagaatttagatcaggtcaaaccagagtcagtgcgtgagaagattcttgctcacctcgaagacctcaaattaagccgcgaattgtcccgtgtacgcaccgatttgccgctcgaagttgatttcggtcgccgccgcgaacctgactgggagggtcttaaagcgtttttagagcgtcttgaatttggttcgctcttgcatgaattcggccttttagaaagcccgttactggccgaagaagcaccttggccaccgcccgagggcgcgtttttaggttaccgtttgagtcgcccggaaccgatgtgggccgaattactggctcttgcagcgtctgcccagggacgtgtgtatcgcgcggaagaccctcatggtgcgctccgcggcctcttcgaagtccgtggactccttgccaaagacttagctgttgttgcattgcgcgaaggtcttgatttacctccgactgatgatccaatgcttccggcgtacctcttggacccgtcaaacacgacgcccgaaggcgtagcccgtcgttacggcggcgagtggaccgaagatgcagcgaaacgcgcgttattggccgaacgtttgcacgaaaatttattaggacgtttgcaaggcgaggaacgtctcctctggctttacgaagaagtggagaaaccattgagtcgcgtgctcgcgcatatggaagctaccggtgtcaaattagacgtggcgtatttggagaatctcagccttgaagttgctgcccacatgcgccgcttggaggaagaagtattccgtttagcaggccgttcctttcgccttaactctcgcgatcagttagaacgtgtgttgttcgatgaacttggtctccctcctatcggcaagacagagaagaccggtaaacgtagcacttcagcggcggttttagaagctcttcgcgaagtccatcccattgtggacaagatcttgcagtaccgcgaaatggcgaaattgaaaggcacctatattgaccgtcttccggcattagtccacccgaaaacgggacgcctccatacccgcttcaaccaaacagccacggcgaccggtcgtttgtcctcctctgatccaaaccttcagaatattccagtacgtaccccattgggccagaagatccgccgtgcgtttgtagctgaggagggttggcgtttagtggccctcgattatcgtcaaattgaattacgtgtccttgcccatctttctggcgatgagaacctcatccgcgtgtttcaggaaggcaaagacattcacactcaaacggcaagctggatgtttggattatcagctgaagcgatcgatcctttgatgcgtcgtgcagcgaagaccatcaatttcggtgttctctacggtatgagtgcctttcgtttgtcgcaggaattaggcattccctatgaagaagctcaggcgttcattcagaaatactttcaaagctatcccaaagttaaagcatggatcgagaagactctccgtgaaggccgcacacgtggttacgtagagaccttatttggacgtcgccgctatgttcccgatttaaacgctcgcgtgaaaggcaagcgtgaagccgccgaacgcatggcgttcaacatgcctgtacagggcacggcagctgacctcatgaaacttgcaatggtgcgcctttttccacaattgcgtgaagttggtgcccgcatgctcttgcaggtccacgatgaactcttgttagaagcgccaaaagagcgtgcggaagaggtggcagccctcgcgaaagaagttatggaaggcgtgtggcccttagcggtgcctcttgaagtcgaagttggtattggcgaggattggctggctgccaaagga

SEQ ID NO: 5254 - protein, 841 aa, synthetic construct
  REGION 1..841: note = Variant of DNA polymerase I from Thermus sp. strain 2.9
MHHHHHHGGSGVLPVFEPKGRVLLVDGHHLAYRNFFALKGLTTSLGEPVQGVYGFAKSLLKALKEDGDVVIVVFDAKAPSFRHEAYEAYKAGRAPTPEDFPRQLALMKELVDLLGLERLEVPGFEADDVLATLAKKAEREGYEVQILTADRDLFQLLSPRISVLHPEGHRITPEWLWEKYGLRPEQWVDFRALAGDPSDNIPGVKGIGEKTALKLLKEWGSLENLLKNLDQVKPESVREKILAHLEDLKLSRELSRVRTDLPLEVDFGRRREPDWEGLKAFLERLEFGSLLHEFGLLESPLLAEEAPWPPPEGAFLGYRLSRPEPMWAELLALAASAQGRVYRAEDPHGALRGLFEVRGLLAKDLAVVALREGLDLPPTDDPMLPAYLLDPSNTTPEGVARRYGGEWTEDAAKRALLAERLHENLLGRLQGEERLLWLYEEVEKPLSRVLAHMEATGVKLDVAYLENLSLEVAAHMRRLEEEVFRLAGRSFRLNSRDQLERVLFDELGLPPIGKTEKTGKRSTSAAVLEALREVHPIVDKILQYREMAKLKGTYIDRLPALVHPKTGRLHTRFNQTATATGRLSSSDPNLQNIPVRTPLGQKIRRAFVAEEGWRLVALDYRQIELRVLAHLSGDENLIRVFQEGKDIHTQTASWMFGLSAEAIDPLMRRAAKTINFGVLYGMSAFRLSQELGIPYEEAQAFIQKYFQSYPKVKAWIEKTLREGRTRGYVETLFGRRRYVPDLNARVKGKREAAERMAFNMPVQGTAADLMKLAMVRLFPQLREVGARMLLQVHDELLLEAPKERAEEVAALAKEVMEGVWPLAVPLEVEVGIGEDWLAAKG

SEQ ID NO: 5255 - DNA, 2523 bp, synthetic construct
  misc_feature 1..2523: note = Variant of DNA polymerase I from Thermus sp. strain 2.9
  source 1..2523: mol_type = other DNA
atgcaccatcatcatcatcatggcggtagcggcgtgttaccggtgttcgagcctaaaggtcgcgtgcttctggttgatggccatcatctcgcgtatcgtaacttctttgccctgaaaggattaaccaccagcctgggcgagccggtacagggtgtctacggctttgcaaagtcgctcctgaaagctctgaaagaagacggtgatgtggtgattgttgtctttgatgcgaaagcgccaagttttcgccacgaagcgtacgaagcttacaaagccgggcgtgctccaacgccggaagactttcctcgccaattggcgcttatgaaggaattagtggatttgcttggcctcgaacgcttggaagttcccggtttcgaggcagacgacgtattagcgactctcgcaaagaaagccgaacgtgagggctatgaagtccagatcttgacagcagatcgcgatcttttccagcttttatctccgcgcatctcggtgttacacccggaagggcatcgtatcaccccggaatggctctgggagaaatatggtttgcgtcccgaacaatgggtggattttcgcgccttagcaggcgatccgagcgacaatattccgggagttaaaggtatcggcgagaagacggcgctcaagctccttaaagaatgggggtcgttggagaacttgcttaagaatttagatcaggtcaaaccagagtcagtgcgtgagaagattcttgctcacctcgaagacctcaaattaagccgcgaattgtcccgtgtacgcaccgatttgccgctcgaagttgatttcggtcgccgccgcgaacctgactgggagggtcttaaagcgtttttagagcgtcttgaatttggttcgctcttgcatgaattcggccttttagaaagcccgttactggccgaagaagcaccttggccaccgcccgagggcgcgtttttaggttaccgtttgagtcgcccggaaccgatgtgggccgaattactggctcttgcagcgtctgcccagggacgtgtgtatcgcgcggaagaccctcatggtgcgctccgcggcctcttcgaagtccgtggactccttgccaaagacttagctgttgttgcattgcgcgaaggtcttgatttacctccgactgatgatccaatgcttcttgcgtacctcttggacccgtcaaacacgacgcccgaaggcgtagcccgtcgttacggcggcgagtggaccgaagatgcagcgaaacgcgcgttattggccgaacgtttgcacgaaaatttattaggacgtttgcaaggcgaggaacgtctcctctggctttacgaagaagtggagaaaccattgagtcgcgtgctcgcgcatatggaagctaccggtgtcaaattagacgtggcgtatttggagaatctcagccttgaagttgctgcccacatgcgccgcttggaggaagaagctttccgtttagcaggccgttcctttcgccttaactctcgcgatcagttagaacgtgtgttgttcgatgaacttggtctccctcctatcggcaagacagagaagaccggtaaacgtagcacttcagcggcggttttagaagctcttcgcgaagtccatcccattgtggacaagatcttgcagtaccgcgaaatggcgaaattgaaaggcacctatattgaccgtcttccggcattagtccacccgaaaacgggacgcctccatacccgcttcaaccaaacagccacggcgaccggtcgtttgtcctcctctgatccaaaccttcagaatattccagtacgtaccccattgggccagaagatccgccgtgcgtttgtagctgaggagggttggcgtttagtggccctcgattatcgtcaaattgaattacgtgtccttgcccatctttctggcgatgagaacctcatccgcgtgtttcaggaaggcaaagacattcacactcaaacggcaagctggatgtttggattatcagctgaagcgatcgatcctttgatgcgtcgtgcagcgaagaccatcaatttcggtgttctctacggtatgagtgcctttcgtttgtcgcaggaattaggcattccctatgaagaagctcaggcgttcattcagaaatactttcaaagctatcccaaagttaaagcatggatcgagaagactctccgtgaaggccgcacacgtggttacgtagagaccttatttggacgtcgccgctatgttcccgatttaaacgctcgcgtgaaaggcaagcgtgaagccgccgaacgcatggcgttcaacatgcctgtacagggcacggcagctgacctcatgaaacttgcaatggtgcgcctttttccacaattgcgtgaagttggtgcccgcatgctcttgcaggtccacgatgaactcttgttagaagcgccaaaagagcgtgcggaagaggtggcagccctcgcgaaagaagttatggaaggcgtgtggcccttagcggtgcctcttgaagtcgaagttggtattggcgaggattggctggctgccaaagga

SEQ ID NO: 5256 - protein, 841 aa, synthetic construct
  REGION 1..841: note = Variant of DNA polymerase I from Thermus sp. strain 2.9
MHHHHHHGGSGVLPVFEPKGRVLLVDGHHLAYRNFFALKGLTTSLGEPVQGVYGFAKSLLKALKEDGDVVIVVFDAKAPSFRHEAYEAYKAGRAPTPEDFPRQLALMKELVDLLGLERLEVPGFEADDVLATLAKKAEREGYEVQILTADRDLFQLLSPRISVLHPEGHRITPEWLWEKYGLRPEQWVDFRALAGDPSDNIPGVKGIGEKTALKLLKEWGSLENLLKNLDQVKPESVREKILAHLEDLKLSRELSRVRTDLPLEVDFGRRREPDWEGLKAFLERLEFGSLLHEFGLLESPLLAEEAPWPPPEGAFLGYRLSRPEPMWAELLALAASAQGRVYRAEDPHGALRGLFEVRGLLAKDLAVVALREGLDLPPTDDPMLLAYLLDPSNTTPEGVARRYGGEWTEDAAKRALLAERLHENLLGRLQGEERLLWLYEEVEKPLSRVLAHMEATGVKLDVAYLENLSLEVAAHMRRLEEEAFRLAGRSFRLNSRDQLERVLFDELGLPPIGKTEKTGKRSTSAAVLEALREVHPIVDKILQYREMAKLKGTYIDRLPALVHPKTGRLHTRFNQTATATGRLSSSDPNLQNIPVRTPLGQKIRRAFVAEEGWRLVALDYRQIELRVLAHLSGDENLIRVFQEGKDIHTQTASWMFGLSAEAIDPLMRRAAKTINFGVLYGMSAFRLSQELGIPYEEAQAFIQKYFQSYPKVKAWIEKTLREGRTRGYVETLFGRRRYVPDLNARVKGKREAAERMAFNMPVQGTAADLMKLAMVRLFPQLREVGARMLLQVHDELLLEAPKERAEEVAALAKEVMEGVWPLAVPLEVEVGIGEDWLAAKG

SEQ ID NO: 5257 - DNA, 2523 bp, synthetic construct
  misc_feature 1..2523: note = Variant of DNA polymerase I from Thermus sp. strain 2.9
  source 1..2523: mol_type = other DNA
atgcaccatcatcatcatcatggcggtagcggcgtgttaccggtgttcgagcctaaaggtcgcgtgcttctggttgatggccatcatctcgcgtatcgtaacttctttgccctgaaaggattaaccaccagcctgggcgagccggtacagggtgtctacggctttgcaaagtcgctcctgaaagctctgaaagaagacggtgatgtggtgattgttgtctttgatgcgaaagcgccaagttttcgccacgaagcgtacgaagcttacaaagccgggcgtgctccaacgccggaagactttcctcgccaattggcgcttatgaaggaattagtggatttgcttggcctcgaacgcttggaagttcccggtttcgaggcagacgacgtattagcgactctcgcaaagaaagccgaacgtgagggctatgaagtccagatcttgacagcagatcgcgatcttttccagcttttatctccgcgcatctcggtgttacacccggaagggcatcgtatcaccccggaatggctctgggagaaatatggtttgcgtcccgaacaatgggtggattttcgcgccttagcaggcgatccgagcgacaatattccgggagttaaaggtatcggcgagaagacggcgctcaagctccttaaagaatgggggtcgttggagaacttgcttaagaatttagatcaggtcaaaccagagtcagtgcgtgagaagattcttgctcacctcgaagacctcaaattaagccgcgaattgtcccgtgtacgcaccgatttgccgctcgaagttgatttcggtcgccgccgcgaacctgactgggagggtcttaaagcgtttttagagcgtcttgaatttggttcgctcttgcatgaattcggccttttagaaagcccgttactggccgaagaagcaccttggccaccgcccgagggcgcgtttttaggttaccgtttgagtcgcccggaaccgatgtgggccgaattactggctcttgcagcgtctgcccagggacgtgtgtatcgcgcggaagaccctcatggtgcgctccgcggcctcttcgaagtccgtggactccttgccaaagacttagctgttgttgcattgcgcgaaggtcttgatttacctccgactgatgatccaatgcttcttgcgtacctcttggacccgtcaaacacgacgcccgaaggcgtagcccgtcgttacccgggcgagtggaccgaagatgcagcgaaacgcgcgttattggccgaacgtttgcacgaaaatttattaggacgtttgcaaggcgaggaacgtctcctctggctttacgaagaagtggagaaaccattgagtcgcgtgctcgcgcatatggaagctaccggtgtcaaattagacgtggcgtatttggagaatctcagccttgaagttgctgcccacatgcgccgcttggaggaagaagtattccgtttagcaggccgttcctttcgccttaactctcgcgatcagttagaacgtgtgttgttcgatgaacttggtctccctcctatcggcaagacagagaagaccggtaaacgtagcacttcagcggcggttttagaagctcttcgcgaagtccatcccattgtggacaagatcttgcagtaccgcgaaatggcgaaattgaaaggcacctatattgaccgtcttccggcattagtccacccgaaaacgggacgcctccatacccgcttcaaccaaacagccacggcgaccggtcgtttgtcctcctctgatccaaaccttcagaatattccagtacgtaccccattgggccagaagatccgccgtgcgtttgtagctgaggagggttggcgtttagtggccctcgattatcgtcaaattgaattacgtgtccttgcccatctttctggcgatgagaacctcatccgcgtgtttcaggaaggcaaagacattcacactcaaacggcaagctggatgtttggattatcagctgaagcgatcgatcctttgatgcgtcgtgcagcgaagaccatcaatttcggtgttctctacggtatgagtgcctttcgtttgtcgcaggaattaggcattccctatgaagaagctcaggcgttcattcagaaatactttcaaagctatcccaaagttaaagcatggatcgagaagactctccgtgaaggccgcacacgtggttacgtagagaccttatttggacgtcgccgctatgttcccgatttaaacgctcgcgtgaaaggcaagcgtgaagccgccgaacgcatggcgttcaacatgcctgtacagggcacggcagctgacctcatgaaacttgcaatggtgcgcctttttccacaattgcgtgaagttggtgcccgcatgctcttgcaggtccacgatgaactcttgttagaagcgccaaaagagcgtgcggaagaggtggcagccctcgcgaaagaagttatggaaggcgtgtggcccttagcggtgcctcttgaagtcgaagttggtattggcgaggattggctggctgccaaagga

SEQ ID NO: 5258 - protein, 841 aa, synthetic construct
  REGION 1..841: note = Variant of DNA polymerase I from Thermus sp. strain 2.9
MHHHHHHGGSGVLPVFEPKGRVLLVDGHHLAYRNFFALKGLTTSLGEPVQGVYGFAKSLLKALKEDGDVVIVVFDAKAPSFRHEAYEAYKAGRAPTPEDFPRQLALMKELVDLLGLERLEVPGFEADDVLATLAKKAEREGYEVQILTADRDLFQLLSPRISVLHPEGHRITPEWLWEKYGLRPEQWVDFRALAGDPSDNIPGVKGIGEKTALKLLKEWGSLENLLKNLDQVKPESVREKILAHLEDLKLSRELSRVRTDLPLEVDFGRRREPDWEGLKAFLERLEFGSLLHEFGLLESPLLAEEAPWPPPEGAFLGYRLSRPEPMWAELLALAASAQGRVYRAEDPHGALRGLFEVRGLLAKDLAVVALREGLDLPPTDDPMLLAYLLDPSNTTPEGVARRYPGEWTEDAAKRALLAERLHENLLGRLQGEERLLWLYEEVEKPLSRVLAHMEATGVKLDVAYLENLSLEVAAHMRRLEEEVFRLAGRSFRLNSRDQLERVLFDELGLPPIGKTEKTGKRSTSAAVLEALREVHPIVDKILQYREMAKLKGTYIDRLPALVHPKTGRLHTRFNQTATATGRLSSSDPNLQNIPVRTPLGQKIRRAFVAEEGWRLVALDYRQIELRVLAHLSGDENLIRVFQEGKDIHTQTASWMFGLSAEAIDPLMRRAAKTINFGVLYGMSAFRLSQELGIPYEEAQAFIQKYFQSYPKVKAWIEKTLREGRTRGYVETLFGRRRYVPDLNARVKGKREAAERMAFNMPVQGTAADLMKLAMVRLFPQLREVGARMLLQVHDELLLEAPKERAEEVAALAKEVMEGVWPLAVPLEVEVGIGEDWLAAKG

SEQ ID NO: 5259 - DNA, 2523 bp, synthetic construct
  misc_feature 1..2523: note = Variant of DNA polymerase I from Thermus sp. strain 2.9
  source 1..2523: mol_type = other DNA
atgcaccatcatcatcatcatggcggtagcggcgtgttaccggtgttcgagcctaaaggtcgcgtgcttctggttgatggccatcatctcgcgtatcgtaacttctttgccctgaaaggattaaccaccagcctgggcgagccggtacagggtgtctacggctttgcaaagtcgctcctgaaagctctgaaagaagacggtgatgtggtgattgttgtctttgatgcgaaagcgccaagttttcgccacgaagcgtacgaagcttacaaagccgggcgtgctccaacgccggaagactttcctcgccaattggcgcttatgaaggaattagtggatttgcttggcctcgaacgcttggaagttcccggtttcgaggcagacgacgtattagcgactctcgcaaagaaagccgaacgtgagggctatgaagtccagatcttgacagcagatcgcgatcttttccagcttttatctccgcgcatctcggtgttacacccggaagggcatcgtatcaccccggaatggctctgggagaaatatggtttgcgtcccgaacaatgggtggattttcgcgccttagcaggcgatccgagcgacaatattccgggagttaaaggtatcggcgagaagacggcgctcaagctccttaaagaatgggggtcgttggagaacttgcttaagaatttagatcaggtcaaaccagagtcagtgcgtgagaagattcttgctcacctcgaagacctcaaattaagccgcgaattgtcccgtgtacgcaccgatttgccgctcgaagttgatttcggtcgccgccgcgaacctgactgggagggtcttaaagcgtttttagagcgtcttgaatttggttcgctcttgcatgaattcggccttttagaaagcccgttactggccgaagaagcaccttggccaccgcccgagggcgcgtttttaggttaccgtttgagtcgcccggaaccgatgtgggccgaattactggctcttgcagcgtctgcccagggacgtgtgtatcgcgcggaagaccctcatggtgcgctccgcggcctcttcgaagtccgtggactccttgccaaagacttagctgttgttgcattgcgcgaaggtcttgatttacctccgactgatgatccaatgcttcttgcgtacctcttggacccgtcaaacacgacgcccgaaggcgtagcccgtcgttacggcggcgagtggaccgaagatgcagcgaaacgcgcgttattggccgaacgtttgcacgaaaatttattaggacgtttgcaaggcgaggaacgtctcctctggctttacgaagaagtggagaaaccattgagtcgcgtgctcgcgcatatggaagctaccggtgtcaaattagacgtggcgtatttggagaggcttcaccttgaagttgctgcccacatgcgccgcttggaggaagaagtattccgtttagcaggccgttcctttcgccttaactctcgcgatcagttagaacgtgtgttgttcgatgaacttggtctccctcctatcggcaagacagagaagaccggtaaacgtagcacttcagcggcggttttagaagctcttcgcgaagtccatcccattgtggacaagatcttgcagtaccgcgaaatggcgaaattgaaaggcacctatattgaccgtcttccggcattagtccacccgaaaacgggacgcctccatacccgcttcaaccaaacagccacggcgaccggtcgtttgtcctcctctgatccaaaccttcagaatattccagtacgtaccccattgggccagaagatccgccgtgcgtttgtagctgaggagggttggcgtttagtggccctcgattatcgtcaaattgaattacgtgtccttgcccatctttctggcgatgagaacctcatccgcgtgtttcaggaaggcaaagacattcacactcaaacggcaagctggatgtttggattatcagctgaagcgatcgatcctttgatgcgtcgtgcagcgaagaccatcaatttcggtgttctctacggtatgagtgcctttcgtttgtcgcaggaattaggcattccctatgaagaagctcaggcgttcattcagaaatactttcaaagctatcccaaagttaaagcatggatcgagaagactctccgtgaaggccgcacacgtggttacgtagagaccttatttggacgtcgccgctatgttcccgatttaaacgctcgcgtgaaaggcaagcgtgaagccgccgaacgcatggcgttcaacatgcctgtacagggcacggcagctgacctcatgaaacttgcaatggtgcgcctttttccacaattgcgtgaagttggtgcccgcatgctcttgcaggtccacgatgaactcttgttagaagcgccaaaagagcgtgcggaagaggtggcagccctcgcgaaagaagttatggaaggcgtgtggcccttagcggtgcctcttgaagtcgaagttggtattggcgaggattggctggctgccaaagga

SEQ ID NO: 5260 - protein, 841 aa, synthetic construct
  REGION 1..841: note = Variant of DNA polymerase I from Thermus sp. strain 2.9
MHHHHHHGGSGVLPVFEPKGRVLLVDGHHLAYRNFFALKGLTTSLGEPVQGVYGFAKSLLKALKEDGDVVIVVFDAKAPSFRHEAYEAYKAGRAPTPEDFPRQLALMKELVDLLGLERLEVPGFEADDVLATLAKKAEREGYEVQILTADRDLFQLLSPRISVLHPEGHRITPEWLWEKYGLRPEQWVDFRALAGDPSDNIPGVKGIGEKTALKLLKEWGSLENLLKNLDQVKPESVREKILAHLEDLKLSRELSRVRTDLPLEVDFGRRREPDWEGLKAFLERLEFGSLLHEFGLLESPLLAEEAPWPPPEGAFLGYRLSRPEPMWAELLALAASAQGRVYRAEDPHGALRGLFEVRGLLAKDLAVVALREGLDLPPTDDPMLLAYLLDPSNTTPEGVARRYGGEWTEDAAKRALLAERLHENLLGRLQGEERLLWLYEEVEKPLSRVLAHMEATGVKLDVAYLERLHLEVAAHMRRLEEEVFRLAGRSFRLNSRDQLERVLFDELGLPPIGKTEKTGKRSTSAAVLEALREVHPIVDKILQYREMAKLKGTYIDRLPALVHPKTGRLHTRFNQTATATGRLSSSDPNLQNIPVRTPLGQKIRRAFVAEEGWRLVALDYRQIELRVLAHLSGDENLIRVFQEGKDIHTQTASWMFGLSAEAIDPLMRRAAKTINFGVLYGMSAFRLSQELGIPYEEAQAFIQKYFQSYPKVKAWIEKTLREGRTRGYVETLFGRRRYVPDLNARVKGKREAAERMAFNMPVQGTAADLMKLAMVRLFPQLREVGARMLLQVHDELLLEAPKERAEEVAALAKEVMEGVWPLAVPLEVEVGIGEDWLAAKG

SEQ ID NO: 5261 - DNA, 2523 bp, synthetic construct
  misc_feature 1..2523: note = Variant of DNA polymerase I from Thermus sp. strain 2.9
  source 1..2523: mol_type = other DNA
atgcaccatcatcatcatcatggcggtagcggcgtgttaccggtgttcgagcctaaaggtcgcgtgcttctggttgatggccatcatctcgcgtatcgtaacttctttgccctgaaaggattaaccaccagcctgggcgagccggtacagggtgtctacggctttgcaaagtcgctcctgaaagctctgaaagaagacggtgatgtggtgattgttgtctttgatgcgaaagcgccaagttttcgccacgaagcgtacgaagcttacaaagccgggcgtgctccaacgccggaagactttcctcgccaattggcgcttatgaaggaattagtggatttgcttggcctcgaacgcttggaagttcccggtttcgaggcagacgacgtattagcgactctcgcaaagaaagccgaacgtgagggctatgaagtccagatcttgacagcagatcgcgatcttttccagcttttatctccgcgcatctcggtgttacacccggaagggcatcgtatcaccccggaatggctctgggagaaatatggtttgcgtcccgaacaatgggtggattttcgcgccttagcaggcgatccgagcgacaatattccgggagttaaaggtatcggcgagaagacggcgctcaagctccttaaagaatgggggtcgttggagaacttgcttaagaatttagatcaggtcaaaccagagtcagtgcgtgagaagattcttgctcacctcgaagacctcaaattaagccgcgaattgtcccgtgtacgcaccgatttgccgctcgaagttgatttcggccgccgccgcgaacctgactgggagggtcttaaagcgtttttagagcgtcttgaatttggttcgctcttgcatgaattcggccttttagaaagcccgttaccggccgaagaagcaccttggccaccgcccgagggcgcgtttttaggttaccgtttgagtcgcccggaaccgatgtgggccgaattactggctcttgcagcgtctgcccagggacgtgtgtatcgcgcggaagaccctcatggtgcgctccgcggcctcttcgaagtccgtggactccttgccaaagacttagctgttgttgcattgcgcgaaggtcttgatttacctccgactgatgatccaatgcttcttgcgtacctcttggacccgtcaaacacgacgcccgaaggcgtagcccgtcgttacggcggcgagtggaccgaagatgcagcgaaacgcgcgttattggccgaacgtttgcacgaaaatttattaggacgtttgcaaggcgaggaacgtctcctctggctttacgaagaagtggagaaaccattgagtcgcgtgctcgcgcatatggaagctaccggtgtcaaattagacgtggcgtatttggagaatctcagccttgaagttgctgcccatatgcgccgcttggaggaagaagtattccgtttagcaggccactcctttcgccttaactctcgcgatcagttagaacgtgtgttgttcgatgaacttggtctccctcctatcggcaagacagagaagaccggtaaacgtagcacttcagcggcggttttagaagctcttcgcgaagtccatcccattgtggacaagatcttgcagtaccgcgaactggcgaaattgaaaggcacctatattgaccgtcttccggcattagtccacccgaaaacgggacgcctccatacccgcttcaaccaaacagccacggcgaccggtcgtttgtccagttctgatccaaaccttcagaatattccagtacgtaccccattgggccagaagatccgccgtgcgtttgtagctgaggagggttggcgtttagtggccctcgattatagtcaaattgaattacgtgtccttgcccatctttctggcgatgagaacctcatccgcgtgtttcaggaaggcaaagacattcacactcaaacggcaagctggatgtttggattatcagctgaagcgatcgatcctttgatgcgtcgtgcagcgaagaccatcaatttcggtgttctctacggtatgagtgcctttcgtttgtcgcaggaattaggcattccctatgaagaagctgcagcgttcattcagaaatactttcaaagctatcccaaagttaaagcatggatcgagaagactctccgcgaaggccgcacacgtggttacgtagagaccttatttggacgtcgccgctatgttcccgatttaaacgctcgcgtgaaaggcgtacgtgaagccgccgaacgcatggcgttcaacatgcctgtacagggcacggcagctgacctcatgaaacttgcaatggtgcgcctttttccacaattgcgtgaagttggtgcccgcatgctcttgcaggtccacgatgaactcttgttagaagcgccaaaagagcgtgcggaagaggtggcagccctcgcgaaagaagttatggaaggcgtgtggcccttagcggtgcctcttgaagtcgaagttggtattggcgaggattggctggctgccaaagga

SEQ ID NO: 5262 - protein, 841 aa, synthetic construct
  REGION 1..841: note = Variant of DNA polymerase I from Thermus sp. strain 2.9
MHHHHHHGGSGVLPVFEPKGRVLLVDGHHLAYRNFFALKGLTTSLGEPVQGVYGFAKSLLKALKEDGDVVIVVFDAKAPSFRHEAYEAYKAGRAPTPEDFPRQLALMKELVDLLGLERLEVPGFEADDVLATLAKKAEREGYEVQILTADRDLFQLLSPRISVLHPEGHRITPEWLWEKYGLRPEQWVDFRALAGDPSDNIPGVKGIGEKTALKLLKEWGSLENLLKNLDQVKPESVREKILAHLEDLKLSRELSRVRTDLPLEVDFGRRREPDWEGLKAFLERLEFGSLLHEFGLLESPLPAEEAPWPPPEGAFLGYRLSRPEPMWAELLALAASAQGRVYRAEDPHGALRGLFEVRGLLAKDLAVVALREGLDLPPTDDPMLLAYLLDPSNTTPEGVARRYGGEWTEDAAKRALLAERLHENLLGRLQGEERLLWLYEEVEKPLSRVLAHMEATGVKLDVAYLENLSLEVAAHMRRLEEEVFRLAGHSFRLNSRDQLERVLFDELGLPPIGKTEKTGKRSTSAAVLEALREVHPIVDKILQYRELAKLKGTYIDRLPALVHPKTGRLHTRFNQTATATGRLSSSDPNLQNIPVRTPLGQKIRRAFVAEEGWRLVALDYSQIELRVLAHLSGDENLIRVFQEGKDIHTQTASWMFGLSAEAIDPLMRRAAKTINFGVLYGMSAFRLSQELGIPYEEAAAFIQKYFQSYPKVKAWIEKTLREGRTRGYVETLFGRRRYVPDLNARVKGVREAAERMAFNMPVQGTAADLMKLAMVRLFPQLREVGARMLLQVHDELLLEAPKERAEEVAALAKEVMEGVWPLAVPLEVEVGIGEDWLAAKG

SEQ ID NO: 5263 - DNA, 2523 bp, synthetic construct
  misc_feature 1..2523: note = Variant of DNA polymerase I from Thermus sp. strain 2.9
  source 1..2523: mol_type = other DNA
atgcaccatcatcatcatcatggcggtagcggcgtgttaccggtgttcgagcctaaaggtcgcgtgcttctggttgatggccatcatctcgcgtatcgtaacttctttgccctgaaaggattaaccaccagcctgggcgagccggtacagggtgtctacggctttgcaaagtcgctcctgaaagctctgaaagaagacggtgatgtggtgattgttgtctttgatgcgaaagcgccaagttttcgccacgaagcgtacgaagcttacaaagccgggcgtgctccaacgccggaagactttcctcgccaattggcgcttatgaaggaattagtggatttgcttggcctcgaacgcttggaagttcccggtttcgaggcagacgacgtattagcgactctcgcaaagaaagccgaacgtgagggctatgaagtccagatcttgacagcagatcgcgatcttttccagcttttatctccgcgcatctcggtgttacacccggaagggcatcgtatcaccccggaatggctctgggagaaatatggtttgcgtcccgaacaatgggtggattttcgcgccttagcaggcgatccgagcgacaatattccgggagttaaaggtatcggcgagaagacggcgctcaagctccttaaagaatgggggtcgttggagaacttgcttaagaatttagatcaggtcaaaccagagtcagtgcgtgagaagattcttgctcacctcgaagacctcaaattaagccgcgaattgtcccgtgtacgcaccgatttgccgctcgaagttgatttcggtcgccgccgcgaacctgactgggagggtcttaaagcgtttttagagcgtcttgaatttggttcgctcttgcatgaattcggccttttagaaagcccgttactggccgaagaagcaccttggccaccgcccgagggcgcgtttttaggttaccgtttgagtcgcccggaaccgatgtgggccgaattactggctcttgcagcgtctgcccagggacgtgtgtatcgcgcggaagaccctcatggtgcgctccgcggcctcttcgaagtccgtggactccttgccaaagacttagctgttgttgcattgcgcgaaggtcttgatttacctccgactgatgatccaatgcttcttgcgtacctcttggacccgtcaaacacgacgcccgatggcgtagcccgtcgttacggcggcgagtggaccgaagatgcagcgaaacgcgcgttattggccgaacgtttgcacgaaaatttattaggacgtttgcaaggcgaggaacgtctcctctggctttacgaagaagtggagaaaccattgagtcgcgtgctcgcgcatatggaagctaccggtgtcaaattagacgtggcgtatttggagaatctcagccttgaagttgctgcccacatgcgccgcttggaggaagaagtattccgtttagcaggccgttcctttcgccttaactctcgcgatcagttagaacgtgtgttgttcgatgaacttggtctccctcctatcggcaagacagagaagaccggtaaacgtagcacttcagcggcggttttagaagctcttcgcgaagtccatcccattgtggacaagatcttgcagtaccgcgaaatggcgaaattgaaaggcacctatattgaccgtcttccggcattagtccacccgaaaacgggacgcctccatacccgcttcaaccaaacagccacggcgaccggtcgtttgtcctcctctgatccaaaccttcagaatattccagtacgtaccccattgggccagaagatccgccgtgcgtttgtagctgaggagggttggcgtttagtggccctcgattatcgtcaaattgaattacgtgtccttgcccatctttctggcgatgagaacctcatccgcgtgtttcaggaaggcaaagacattcacactcaaacggcaagctggatgtttggattatcagctgaagcgatcgatcctttgatgcgtcgtgcagcgaagaccatcaatttcggtgttctctacggtatgagtgcctttcgtttgtcgcaggaattaggcattccctatgaagaagctcaggcgttcattcagaaatactttcaaagctatcccaaagttaaagcatggatcgagaagactctccgtgaaggccgcacacgtggttacgtagagaccttatttggacgtcgccgctatgttcccgatttaaacgctcgcgtgaaaggcaagcgtgaagccgccgaacgcatggcgttcaacatgcctgtacagggcacggcagctgacctcatgaaacttgcaatggtgcgcctttttccacaattgcgtgaagttggtgcccgcatgctcttgcaggtccacgatgaactcttgttagaagcgccaaaagagcgtgcggaagaggtggcagccctcgcgaaagaagttatggaaggcgtgtggcccttagcggtgcctcttgaagtcgaagttggtattggcgaggattggctggctgccaaagga

SEQ ID NO: 5264 - protein, 841 aa, synthetic construct
  REGION 1..841: note = Variant of DNA polymerase I from Thermus sp. strain 2.9
MHHHHHHGGSGVLPVFEPKGRVLLVDGHHLAYRNFFALKGLTTSLGEPVQGVYGFAKSLLKALKEDGDVVIVVFDAKAPSFRHEAYEAYKAGRAPTPEDFPRQLALMKELVDLLGLERLEVPGFEADDVLATLAKKAEREGYEVQILTADRDLFQLLSPRISVLHPEGHRITPEWLWEKYGLRPEQWVDFRALAGDPSDNIPGVKGIGEKTALKLLKEWGSLENLLKNLDQVKPESVREKILAHLEDLKLSRELSRVRTDLPLEVDFGRRREPDWEGLKAFLERLEFGSLLHEFGLLESPLLAEEAPWPPPEGAFLGYRLSRPEPMWAELLALAASAQGRVYRAEDPHGALRGLFEVRGLLAKDLAVVALREGLDLPPTDDPMLLAYLLDPSNTTPDGVARRYGGEWTEDAAKRALLAERLHENLLGRLQGEERLLWLYEEVEKPLSRVLAHMEATGVKLDVAYLENLSLEVAAHMRRLEEEVFRLAGRSFRLNSRDQLERVLFDELGLPPIGKTEKTGKRSTSAAVLEALREVHPIVDKILQYREMAKLKGTYIDRLPALVHPKTGRLHTRFNQTATATGRLSSSDPNLQNIPVRTPLGQKIRRAFVAEEGWRLVALDYRQIELRVLAHLSGDENLIRVFQEGKDIHTQTASWMFGLSAEAIDPLMRRAAKTINFGVLYGMSAFRLSQELGIPYEEAQAFIQKYFQSYPKVKAWIEKTLREGRTRGYVETLFGRRRYVPDLNARVKGKREAAERMAFNMPVQGTAADLMKLAMVRLFPQLREVGARMLLQVHDELLLEAPKERAEEVAALAKEVMEGVWPLAVPLEVEVGIGEDWLAAKG

SEQ ID NO: 5265 - DNA, 2523 bp, synthetic construct
  misc_feature 1..2523: note = Variant of DNA polymerase I from Thermus sp. strain 2.9
  source 1..2523: mol_type = other DNA
atgcaccatcatcatcatcatggcggtagcggcgtgttaccggtgttcgagcctaaaggtcgcgtgcttctggttgatggccatcatctcgcgtatcgtaacttctttgccctgaaaggattaaccaccagccgcggcgagccggtacagggtgtctacggctttgcaaagtcgctcctgaaagctctgaaagaagacggtgatgtggtgattgttgtctttgatgcgaaagcgccaagttttcgccacgaagcgtacgaagcttacaaagccgggcgtgctccaacgccggaagactttcctcgccaattggcgcttatgaaggaattagtggatttgcttggcctcgaacgcttggaagttcccggtttcgaggcagacgacgtattagcgactctcgcaaagaaagccgaacgtgagggctatgaagtccagatcttgacagcagatcgcgatcttttccagcttttatctccgcgcatctcggtgttacacccggaagggcatcgtatcaccccggaatggctctgggagaaatatggtttgcgtcccgaacaatgggtggattttcgcgccttagcaggcgatccgagcgacaatattccgggagttaaaggtatcggcgagaagacggcgctcaagctccttaaagaatgggggtcgttggagaacttgcttaagaatttagatcaggtcaaaccagagtcagtgcgtgagaagattcttgctcacctcgaagacctcaaattaagccgcgaattgtcccgtgtacgcaccgatttgccgctcgaagttgatttcggccgccgccgcgaacctgactgggagggtcttaaagcgtttttagagcgtcttgaatttggttcgctcttgcatgaattcggccttttagaaagcccgttactggccgaagaagcaccttggccaccgcccgagggcgcgtttttaggttaccgtttgagtcgcccggaaccgatgtgggccgaattactggctcttgcagcgtctgcccagggacgtgtgtatcgcgcggaagaccctcatggtgcgctccgcggcctcttcgaagtccgtggactccttgccaaagacttagctgttgttgcattgcgcgaaggtcttgatttacctccgactgatgatccaatgcttcttgcgtacctcttggacccgtcaaacacgacgcccgaaggcgtagcccgtcgttacggcggcgagtggaccgaagatgcagcgaaacgcgcgttattggccgaacgtttgcacgcaaatttattaggacgtttgcaaggcgaggaacgtctcctctggctttacgaagaagtggagaaaccattgagtcgcgtgctcgcgcatatggaagctaccggtgtcaaattagacgtggcgtatttggaggcccttcaccttgaagttgctgcccacatgcgccgcttggaggaagaagtattccgtttagcaggccgctcctttcgccttaactctcgcgatcagttagaacgtgtgttgttcgatgaacttggtctccctcctatcggcaagacagagaagaccggtaaacgtagcacttcagcggcggttttagaagctcttcgcgaagtccatcccattgtggacaagatcttgcagtaccgcgaaatggcgaaattgaaaggcacctatattgaccgtcttccggcattagtccacccgaaaacgggacgcctccatacccgcttcaaccaaacagccacggcgaccggtcgtttgtcctcctctgatccaaaccttcagaatattccagtacgtaccccattgggccagaagatccgccgtgcgtttgtagctgaggagggttggcgtttagtggccctcgattatcgtcaaattgaattacgtgtccttgcccatctttctggcgatgagaacctcatccgcgtgtttcaggaaggcaaagacattcacactcaaacggcaagctggatgtttggattatcagctgaagcgatcgatcctttgatgcgtcgtgcagcgaagaccatcaatttcggtgttctctacggtatgagtgcctttcgtttgtcgcaggaattaggcattccctatgaagaagctcaggcgttcattcagaaatactttcaaagctatcccaaagttaaagcatggatcgagaagactctccgcgaaggccgcacacgtggttacgtagagaccttatttggacgtcgccgctatgttcccgatttaaacgctcgcgtgaaaggcgtacgtgaagccgccgaacgcatggcgttcaacatgcctgtacagggcacggcagctgacctcatgaaacttgcaatggtgcgcctttttccacaattgcgtgaagttggtgcccgcatgctcttgcaggtccacgatgaactcttgttagaagcgccaaaagagcgtgcggaagaggtggcagccctcgcgaaagaagttatggaaggcgtgtggcccttagcggtgcctcttgaagtcgaagttggtattggcgaggattggctggctgccaaagga

SEQ ID NO: 5266 - protein, 841 aa, synthetic construct
  REGION 1..841: note = Variant of DNA polymerase I from Thermus sp. strain 2.9
MHHHHHHGGSGVLPVFEPKGRVLLVDGHHLAYRNFFALKGLTTSRGEPVQGVYGFAKSLLKALKEDGDVVIVVFDAKAPSFRHEAYEAYKAGRAPTPEDFPRQLALMKELVDLLGLERLEVPGFEADDVLATLAKKAEREGYEVQILTADRDLFQLLSPRISVLHPEGHRITPEWLWEKYGLRPEQWVDFRALAGDPSDNIPGVKGIGEKTALKLLKEWGSLENLLKNLDQVKPESVREKILAHLEDLKLSRELSRVRTDLPLEVDFGRRREPDWEGLKAFLERLEFGSLLHEFGLLESPLLAEEAPWPPPEGAFLGYRLSRPEPMWAELLALAASAQGRVYRAEDPHGALRGLFEVRGLLAKDLAVVALREGLDLPPTDDPMLLAYLLDPSNTTPEGVARRYGGEWTEDAAKRALLAERLHANLLGRLQGEERLLWLYEEVEKPLSRVLAHMEATGVKLDVAYLEALHLEVAAHMRRLEEEVFRLAGRSFRLNSRDQLERVLFDELGLPPIGKTEKTGKRSTSAAVLEALREVHPIVDKILQYREMAKLKGTYIDRLPALVHPKTGRLHTRFNQTATATGRLSSSDPNLQNIPVRTPLGQKIRRAFVAEEGWRLVALDYRQIELRVLAHLSGDENLIRVFQEGKDIHTQTASWMFGLSAEAIDPLMRRAAKTINFGVLYGMSAFRLSQELGIPYEEAQAFIQKYFQSYPKVKAWIEKTLREGRTRGYVETLFGRRRYVPDLNARVKGVREAAERMAFNMPVQGTAADLMKLAMVRLFPQLREVGARMLLQVHDELLLEAPKERAEEVAALAKEVMEGVWPLAVPLEVEVGIGEDWLAAKG

SEQ ID NO: 5267 - DNA, 2523 bp, synthetic construct
  misc_feature 1..2523: note = Variant of DNA polymerase I from Thermus sp. strain 2.9
  source 1..2523: mol_type = other DNA
atgcaccatcatcatcatcatggcggtagcggcgtgttaccggtgttcgagcctaaaggtcgcgtgcttctggttgatggccatcatctcgcgtatcgtaacttctttgccctgaaaggattaaccaccagccgcggcgagccggtacagggtgtctacggctttgcaaagtcgctcctgaaagctctgaaagaagacggtgatgtggtgattgttgtctttgatgcgaaagcgccaagttttcgccacgaagcgtacgaagcttacaaagccgggcgtgctccaacgccggaagactttcctcgccaattggcgcttatgaaggaattagtggatttgcttggcctcgaacgcttggaagttcccggtttcgaggcagacgacgtattagcgactctcgcaaagaaagccgaacgtgagggctatgaagtccagatcttgacagcagatcgcgatcttttccagcttttatctccgcgcatctcggtgttacacccggaagggcatcgtatcaccccggaatggctctgggagaaatatggtttgcgtcccgaacaatgggtggattttcgcgccttagcaggcgatccgagcgacaatattccgggagttaaaggtatcggcgagaagacggcgctcaagctccttaaagaatgggggtcgttggagaacttgcttaagaatttagatcaggtcaaaccagagtcagtgcgtgagaagattcttgctcacctcgaagacctcaaattaagccgcgaattgtcccgtgtacgcaccgatttgccgctcgaagttgatttcggtcgccgccgcgaacctgactgggagggtcttaaagcgtttttagagcgtcttgaatttggttcgctcttgcatgaattcggccttttagaaagcccgttactggccgaagaagcaccttggccaccgcccgagggcgcgtttttaggttaccgtttgagtcgcccggaaccgatgtgggccgaattactggctcttgcagcgtctgcccagggacgtgtgtatcgcgcggaagaccctcatggtgcgctccgcggcctcttcgaagtccgtggactccttgccaaagacttagctgttgttgcattgcgcgaaggtcttgatttacctccgactgatgatccaatgcttcttgcgtacctcttggacccgtcaaacacgacgcccgaaggcgtagcccgtcgttacggcggcgagtggaccgaagatgcagcgaaacgcgcgttattggccgaacgtttgcacgcaaatttattaggacgtttgcaaggcgaggaacgtctcctctggctttacgaagaagtggagaaaccattgagtcgcgtgctcgcgcatatggaagctaccggtgtcaaattagacgtggcgtatttggagaatctcagccttgaagttgctgccgaaatgcgccgcttggaggaagaagtattccgtttagcaggccgttcctttcgccttaactctcgcgatcagttagaacgtgtgttgttcgatgaacttggtctccctcctatcggcaagacagagaagaccggtaaacgtagcacttcagcggcggttttagaagctcttcgcgaagtccatcccattgtggacaagatcttgcagtaccgcgaaatggcgaaattgaaaggcacctatattgaccctcttccggcattagtccacccgaaaacgggacgcctccatacccgcttcaaccaaacagccacggcgaccggtcgtttgtccagttctgatccaaaccttcagaatattccagtacgtaccccattgggccagaagatccgccgtgcgtttgtagctgaggagggttggcgtttagtggccctcgattatagtcaaattgaattacgtgtccttgcccatctttctggcgatgagaacctcatccgcgtgtttcaggaaggcaaagacattcacactcaaacggcaagctggatgtttggattatcagctgaagcgatcgatcctttgatgcgtcgtgcagcgaagaccatcaatttcggtgttctctacggtatgagtgcctttcgtttgtcgcaggaattaggcattccctatgaagaagctcaggcgttcattcagaaatactttcaaagctatcccaaagttaaagcatggatcgagaagactctccgcgaaggccgcacacgtggttacgtagagaccttatttggacgtcgccgctatgttcccgatttaaacgctcgcgtgaaaggcgtacgtgaagccgccgaacgcatggcgttcaacatgcctgtacagggcacggcagctgacctcatgaaacttgcaatggtgcgcctttttccacaattgcgtgaagttggtgcccgcatgctcttgcaggtccacgatgaactcttgttagaagcgccaaaagagcgtgcggaagaggtggcagccctcgcgaaagaagttatggaaggcgtgtggcccttagcggtgcctcttgaagtcgaagttggtattggcgaggattggctggctgccaaagga

SEQ ID NO: 5268 - protein, 841 aa, synthetic construct
  REGION 1..841: note = Variant of DNA polymerase I from Thermus sp. strain 2.9
MHHHHHHGGSGVLPVFEPKGRVLLVDGHHLAYRNFFALKGLTTSRGEPVQGVYGFAKSLLKALKEDGDVVIVVFDAKAPSFRHEAYEAYKAGRAPTPEDFPRQLALMKELVDLLGLERLEVPGFEADDVLATLAKKAEREGYEVQILTADRDLFQLLSPRISVLHPEGHRITPEWLWEKYGLRPEQWVDFRALAGDPSDNIPGVKGIGEKTALKLLKEWGSLENLLKNLDQVKPESVREKILAHLEDLKLSRELSRVRTDLPLEVDFGRRREPDWEGLKAFLERLEFGSLLHEFGLLESPLLAEEAPWPPPEGAFLGYRLSRPEPMWAELLALAASAQGRVYRAEDPHGALRGLFEVRGLLAKDLAVVALREGLDLPPTDDPMLLAYLLDPSNTTPEGVARRYGGEWTEDAAKRALLAERLHANLLGRLQGEERLLWLYEEVEKPLSRVLAHMEATGVKLDVAYLENLSLEVAAEMRRLEEEVFRLAGRSFRLNSRDQLERVLFDELGLPPIGKTEKTGKRSTSAAVLEALREVHPIVDKILQYREMAKLKGTYIDPLPALVHPKTGRLHTRFNQTATATGRLSSSDPNLQNIPVRTPLGQKIRRAFVAEEGWRLVALDYSQIELRVLAHLSGDENLIRVFQEGKDIHTQTASWMFGLSAEAIDPLMRRAAKTINFGVLYGMSAFRLSQELGIPYEEAQAFIQKYFQSYPKVKAWIEKTLREGRTRGYVETLFGRRRYVPDLNARVKGVREAAERMAFNMPVQGTAADLMKLAMVRLFPQLREVGARMLLQVHDELLLEAPKERAEEVAALAKEVMEGVWPLAVPLEVEVGIGEDWLAAKG

SEQ ID NO: 5269 - DNA, 2523 bp, synthetic construct
  misc_feature 1..2523: note = Variant of DNA polymerase I from Thermus sp. strain 2.9
  source 1..2523: mol_type = other DNA
atgcaccatcatcatcatcatggcggtagcggcgtgttaccggtgttcgagcctaaaggtcgcgtgcttctggttgatggccatcatctcgcgtatcgtaacttctttgccctgaaaggattaaccaccagcctgggcgagccggtacagggtgtctacggctttgcaaagtcgctcctgaaagctctgaaagaagacggtgatgtggtgattgttgtctttgatgcgaaagcgccaagttttcgccacgaagcgtacgaagcttacaaagccgggcgtgctccaacgccggaagactttcctcgccaattggcgcttatgaaggaattagtggatttgcttggcctcgaacgcttggaagttcccggtttcgaggcagacgacgtattagcgactctcgcaaagaaagccgaacgtgagggctatgaagtccagatcttgacagcagatcgcgatcttttccagcttttatctccgcgcatctcggtgttacacccggaagggcatcgtatcaccccggaatggctctgggagaaatatggtttgcgtcccgaacaatgggtggattttcgcgccttagcaggcgatccgagcgacaatattccgggagttaaaggtatcggcgagaagacggcgctcaagctccttaaagaatgggggtcgttggagaacttgcttaagaatttagatcaggtcaaaccagagtcagtgcgtgagaagattcttgctcacctcgaagacctcaaattaagccgcgaattgtcccgtgtacgcaccgatttgccgctcgaagttgatttcggtcgccgccgcgaacctgactgggagggtcttaaagcgtttttagagcgtcttgaatttggttcgctcttgcatgaattcggccttttagaaagcccgttactggccgaagaagcaccttggccaccgcccgagggcgcgtttttaggttaccgtttgagtcgcccggaaccgatgtgggccgaattactggctcttgcagcgtctgcccagggacgtgtgtatcgcgcggaagaccctcatggtgcgctccgcggcctcttcgaagtccgtggactccttgccaaagacttagctgttgttgcattgcgcgaaggtcttgatttacctccgactgatgatccaatgcttcttgcgtacctcttggacccgtcaaacacgacgcccgaaggcgtagcccgtcgttacggcggcgagtggaccgaagatgcagcgaaacgcgcgttattggccgaacgtttgcacgaaaatttattaggacgtttgcaaggcgaggaacgtctcctctggctttacgaagaagtggagaaaccattgagtcgcgtgctcgcgcatatggaagctaccggtgtcaaattagacgtggcgtatttggagaatctcagccttgaagttgctgcccacatgcgccgcttggaggaagaagtattccgtttagcaggccactcctttcgccttaactctcgcgatcagttagaacgtgtgttgttcgatgaacttggtctccctcctatcggcaagacagagaagaccggtaaacgtagcacttcagcggcggttttagaagctcttcgcgaagtccatcccattgtggacaagatcttgcagtaccgcgaaatggcgaaattgaaaggcacctatattgaccgtcttccggcattagtccacccgaaaacgggacgcctccatacccgcttcaaccaaacagccacggcgaccggtcgtttgtcctcctctgatccaaaccttcagaatattccagtacgtaccccattgggccagaagatccgccgtgcgtttgtagctgaggagggttggcgtttagtggccctcgattatcgtcaaattgaattacgtgtccttgcccatctttctggcgatgagaacctcatccgcgtgtttcaggaaggcaaagacattcacactcaaacggcaagctggatgtttggattatcagctgaagcgatcgatcctttgatgcgtcgtgcagcgaagaccatcaatttcggtgttctctacggtatgagtgcctttcgtttgtcgcaggaattaggcattccctatgaagaagctcaggcgttcattcagaaatactttcaaagctatcccaaagttaaagcatggatcgagaagactctccgtgaaggccgcacacgtggttacgtagagaccttatttggacgtcgccgctatgttcccgatttaaacgctcgcgtgaaaggcaagcgtgaagccgccgaacgcatggcgttcaacatgcctgtacagggcacggcagctgacctcatgaaacttgcaatggtgcgcctttttccacaattgcgtgaagttggtgcccgcatgctcttgcaggtccacgatgaactcttgttagaagcgccaaaagagcgtgcggaagaggtggcagccctcgcgaaagaagttatggaaggcgtgtggcccttagcggtgcctcttgaagtcgaagttggtattggcgaggattggctggctgccaaagga

SEQ ID NO: 5270 - protein, 841 aa, synthetic construct
  REGION 1..841: note = Variant of DNA polymerase I from Thermus sp. strain 2.9
MHHHHHHGGSGVLPVFEPKGRVLLVDGHHLAYRNFFALKGLTTSLGEPVQGVYGFAKSLLKALKEDGDVVIVVFDAKAPSFRHEAYEAYKAGRAPTPEDFPRQLALMKELVDLLGLERLEVPGFEADDVLATLAKKAEREGYEVQILTADRDLFQLLSPRISVLHPEGHRITPEWLWEKYGLRPEQWVDFRALAGDPSDNIPGVKGIGEKTALKLLKEWGSLENLLKNLDQVKPESVREKILAHLEDLKLSRELSRVRTDLPLEVDFGRRREPDWEGLKAFLERLEFGSLLHEFGLLESPLLAEEAPWPPPEGAFLGYRLSRPEPMWAELLALAASAQGRVYRAEDPHGALRGLFEVRGLLAKDLAVVALREGLDLPPTDDPMLLAYLLDPSNTTPEGVARRYGGEWTEDAAKRALLAERLHENLLGRLQGEERLLWLYEEVEKPLSRVLAHMEATGVKLDVAYLENLSLEVAAHMRRLEEEVFRLAGHSFRLNSRDQLERVLFDELGLPPIGKTEKTGKRSTSAAVLEALREVHPIVDKILQYREMAKLKGTYIDRLPALVHPKTGRLHTRFNQTATATGRLSSSDPNLQNIPVRTPLGQKIRRAFVAEEGWRLVALDYRQIELRVLAHLSGDENLIRVFQEGKDIHTQTASWMFGLSAEAIDPLMRRAAKTINFGVLYGMSAFRLSQELGIPYEEAQAFIQKYFQSYPKVKAWIEKTLREGRTRGYVETLFGRRRYVPDLNARVKGKREAAERMAFNMPVQGTAADLMKLAMVRLFPQLREVGARMLLQVHDELLLEAPKERAEEVAALAKEVMEGVWPLAVPLEVEVGIGEDWLAAKG

SEQ ID NO: 5271 - DNA, 2523 bp, synthetic construct
  misc_feature 1..2523: note = Variant of DNA polymerase I from Thermus sp. strain 2.9
  source 1..2523: mol_type = other DNA
atgcaccatcatcatcatcatggcggtagcggcgtgttaccggtgttcgagcctaaaggtcgcgtgcttctggttgatggccatcatctcgcgtatcgtaacttctttgccctgaaaggattaaccaccagcctgggcgagccggtacagggtgtctacggctttgcaaagtcgctcctgaaagctctgaaagaagacggtgatgtggtgattgttgtctttgatgcgaaagcgccaagttttcgccacgaagcgtacgaagcttacaaagccgggcgtgctccaacgccggaagactttcctcgccaattggcgcttatgaaggaattagtggatttgcttggcctcgaacgcttggaagttcccggtttcgaggcagacgacgtattagcgactctcgcaaagaaagccgaacgtgagggctatgaagtccagatcttgacagcagatcgcgatcttttccagcttttatctccgcgcatctcggtgttacacccggaagggcatcgtatcaccccggaatggctctgggagaaatatggtttgcgtcccgaacaatgggtggattttcgcgccttagcaggcgatccgagcgacaatattccgggagttaaaggtatcggcgagaagacggcgctcaagctccttaaagaatgggggtcgttggagaacttgcttaagaatttagatcaggtcaaaccagagtcagtgcgtgagaagattcttgctcacctcgaagacctcaaattaagccgcgaattgtcccgtgtacgcaccgatttgccgctcgaagttgatttcggtcgccgccgcgaacctgactgggagggtcttaaagcgtttttagagcgtcttgaatttggttcgctcttgcatgaattcggccttttagaaagcccgttactggccgaagaagcaccttggccaccgcccgagggcgcgtttttaggttaccgtttgagtcgcccggaaccgatgtgggccgaattactggctcttgcagcgtctgcccagggacgtgtgtatcgcgcggaagaccctcatggtgcgctccgcggcctcttcgaagtccgtggactccttgccaaagacttagctgttgttgcattgcgcgaaggtcttgatttacctccgactgatgatccaatgcttcttgcgtacctcttggacccgtcaaacacgacgcccgaaggcgtagcccgtcgttacggcggcgagtggaatgaagatgcagcgaaacgcgcgttattggccgaacgtttgcacgaaaatttattaggacgtttgcaaggcgaggaacgtctcctctggctttacgaagaagtggagaaaccattgagtcgcgtgctcgcgcatatggaagctaccggtgtcaaattagacgtggcgtatttggagaatctcagccttgaagttgctgcccacatgcgccgcttggaggaagaagtattccgtttagcaggccgttcctttcgccttaactctcgcgatcagttagaacgtgtgttgttcgatgaacttggtctccctcctatcggcaagacagagaagaccggtaaacgtagcacttcagcggcggttttagaagctcttcgcgaagtccatcccattgtggacaagatcttgcagtaccgcgaaatggcgaaattgaaaggcacctatattgaccgtcttccggcattagtccacccgaaaacgggacgcctccatacccgcttcaaccaaacagccacggcgaccggtcgtttgtcctcctctgatccaaaccttcagaatattccagtacgtaccccattgggccagaagatccgccgtgcgtttgtagctgaggagggttggcgtttagtggccctcgattatcgtcaaattgaattacgtgtccttgcccatctttctggcgatgagaacctcatccgcgtgtttcaggaaggcaaagacattcacactcaaacggcaagctggatgtttggattatcagctgaagcgatcgatcctttgatgcgtcgtgcagcgaagaccatcaatttcggtgttctctacggtatgagtgcctttcgtttgtcgcaggaattaggcattccctatgaagaagctcaggcgttcattcagaaatactttcaaagctatcccaaagttaaagcatggatcgagaagactctccgtgaaggccgcacacgtggttacgtagagaccttatttggacgtcgccgctatgttcccgatttaaacgctcgcgtgaaaggcaagcgtgaagccgccgaacgcatggcgttcaacatgcctgtacagggcacggcagctgacctcatgaaacttgcaatggtgcgcctttttccacaattgcgtgaagttggtgcccgcatgctcttgcaggtccacgatgaactcttgttagaagcgccaaaagagcgtgcggaagaggtggcagccctcgcgaaagaagttatggaaggcgtgtggcccttagcggtgcctcttgaagtcgaagttggtattggcgaggattggctggctgccaaagga

SEQ ID NO: 5272 - protein, 841 aa, synthetic construct
  REGION 1..841: note = Variant of DNA polymerase I from Thermus sp. strain 2.9
MHHHHHHGGSGVLPVFEPKGRVLLVDGHHLAYRNFFALKGLTTSLGEPVQGVYGFAKSLLKALKEDGDVVIVVFDAKAPSFRHEAYEAYKAGRAPTPEDFPRQLALMKELVDLLGLERLEVPGFEADDVLATLAKKAEREGYEVQILTADRDLFQLLSPRISVLHPEGHRITPEWLWEKYGLRPEQWVDFRALAGDPSDNIPGVKGIGEKTALKLLKEWGSLENLLKNLDQVKPESVREKILAHLEDLKLSRELSRVRTDLPLEVDFGRRREPDWEGLKAFLERLEFGSLLHEFGLLESPLLAEEAPWPPPEGAFLGYRLSRPEPMWAELLALAASAQGRVYRAEDPHGALRGLFEVRGLLAKDLAVVALREGLDLPPTDDPMLLAYLLDPSNTTPEGVARRYGGEWNEDAAKRALLAERLHENLLGRLQGEERLLWLYEEVEKPLSRVLAHMEATGVKLDVAYLENLSLEVAAHMRRLEEEVFRLAGRSFRLNSRDQLERVLFDELGLPPIGKTEKTGKRSTSAAVLEALREVHPIVDKILQYREMAKLKGTYIDRLPALVHPKTGRLHTRFNQTATATGRLSSSDPNLQNIPVRTPLGQKIRRAFVAEEGWRLVALDYRQIELRVLAHLSGDENLIRVFQEGKDIHTQTASWMFGLSAEAIDPLMRRAAKTINFGVLYGMSAFRLSQELGIPYEEAQAFIQKYFQSYPKVKAWIEKTLREGRTRGYVETLFGRRRYVPDLNARVKGKREAAERMAFNMPVQGTAADLMKLAMVRLFPQLREVGARMLLQVHDELLLEAPKERAEEVAALAKEVMEGVWPLAVPLEVEVGIGEDWLAAKG

SEQ ID NO: 5273 - DNA, 2523 bp, synthetic construct
  misc_feature 1..2523: note = Variant of DNA polymerase I from Thermus sp. strain 2.9
  source 1..2523: mol_type = other DNA
atgcaccatcatcatcatcatggcggtagcggcgtgttaccggtgttcgagcctaaaggtcgcgtgcttctggttgatggccatcatctcgcgtatcgtaacttctttgccctgaaaggattaaccaccagcctgggcgagccggtacagggtgtctacggctttgcaaagtcgctcctgaaagctctgaaagaagacggtgatgtggtgattgttgtctttgatgcgaaagcgccaagttttcgccacgaagcgtacgaagcttacaaagccgggcgtgctccaacgccggaagactttcctcgccaattggcgcttatgaaggaattagtggatttgcttggcctcgaacgcttggaagttcccggtttcgaggcagacgacgtattagcgactctcgcaaagaaagccgaacgtgagggctatgaagtccagatcttgacagcagatcgcgatcttttccagcttttatctccgcgcatctcggtgttacacccggaagggcatcgtatcaccccggaatggctctgggagaaatatggtttgcgtcccgaacaatgggtggattttcgcgccttagcaggcgatccgagcgacaatattccgggagttaaaggtatcggcgagaagacggcgctcaagctccttaaagaatgggggtcgttggagaacttgcttaagaatttagatcaggtcaaaccagagtcagtgcgtgagaagattcttgctcacctcgaagacctcaaattaagccgcgaattgtcccgtgtacgcaccgatttgccgctcgaagttgatttcggtcgccgccgcgaacctgactgggagggtcttaaagcgtttttagagcgtcttgaatttggttcgctcttgcatgaattcggccttttagaaagcccgttactggccgaagaagcaccttggccaccgcccgagggcgcgtttttaggttaccgtttgagtcgcccggaaccgatgtgggccgaattactggctcttgcagcgtctgcccagggacgtgtgtatcgcgcggaagaccctcatggtgcgctccgcggcctcttcgaagtccgtggactccttgccaaagacttagctgttgttgcattgcgcgaaggtcttgatttacctccgactgatgatccaatgcttcttgcgtacctcttggacccgtcaaacacgacgcccgaaggcgtagcccgtcgttacggcggcgagtggaccgaagatgcagcgaaacgcgcgttattggccgaacgtttgcacgcaaatttattaggacgtttgcaaggcgaggaacgtctcctctggctttacgaagaagtggagaaaccattgagtcgcgtgctcgcgcatatggaagctaccggtgtcaaattagacgtggcgtatttggagaatcttcaccttgaagttgctgcccacatgcgccgcttggaggaagaagtattccgtttagcaggccgttcctttcgccttaactctcgcgatcagttagaacgtgtgttgttcgatgaacttggtctccctcctatcggcaagacagagaagaccggtaaacgtagcacttcagcggcggttttagaagctcttcgcgaagtccatcccattgtggacaagatcttgcagtaccgcgaaatggcgaaattgaaaggcacctatattgaccgtcttccggcattagtccacccgaaaacgggacgcctccatacccgcttcaaccaaacagccacggcgaccggtcgtttgtccagttctgatccaaaccttcagaatattccagtacgtaccccattgggccagaagatccgccgtgcgtttgtagctgaggagggttggcgtttagtggccctcgattatcgtcaaattgaattacgtgtccttgcccatctttctggcgatgagaacctcatccgcgtgtttcaggaaggcaaagacattcacactcaaacggcaagctggatgtttggattatcagctgaagcgatcgatcctttgatgcgtcgtgcagcgaagaccatcaatttcggtgttctctacggtatgagtgcctttcgtttgtcgcaggaattaggcattccctatgaagaagctcaggcgttcattcagaaatactttcaaagctatcccaaagttaaagcatggatcgagaagactctccgcgaaggccgcacacgtggttacgtagagaccttatttggacgtcgccgctatgttcccgatttaaacgctcgcgtgaaaggcaagcgtgaagccgccgaacgcatggcgttcaacatgcctgtacagggcacggcagctgacctcatgaaacttgcaatggtgcgcctttttccacaattgcgtgaagttggtgcccgcatgctcttgcaggtccacgatgaactcttgttagaagcgccaaaagagcgtgcggaagaggtggcagccctcgcgaaagaagttatggaaggcgtgtggcccttagcggtgcctcttgaagtcgaagttggtattggcgaggattggctggctgccaaagga

SEQ ID NO: 5274 - protein, 841 aa, synthetic construct
  REGION 1..841: note = Variant of DNA polymerase I from Thermus sp. strain 2.9
MHHHHHHGGSGVLPVFEPKGRVLLVDGHHLAYRNFFALKGLTTSLGEPVQGVYGFAKSLLKALKEDGDVVIVVFDAKAPSFRHEAYEAYKAGRAPTPEDFPRQLALMKELVDLLGLERLEVPGFEADDVLATLAKKAEREGYEVQILTADRDLFQLLSPRISVLHPEGHRITPEWLWEKYGLRPEQWVDFRALAGDPSDNIPGVKGIGEKTALKLLKEWGSLENLLKNLDQVKPESVREKILAHLEDLKLSRELSRVRTDLPLEVDFGRRREPDWEGLKAFLERLEFGSLLHEFGLLESPLLAEEAPWPPPEGAFLGYRLSRPEPMWAELLALAASAQGRVYRAEDPHGALRGLFEVRGLLAKDLAVVALREGLDLPPTDDPMLLAYLLDPSNTTPEGVARRYGGEWTEDAAKRALLAERLHANLLGRLQGEERLLWLYEEVEKPLSRVLAHMEATGVKLDVAYLENLHLEVAAHMRRLEEEVFRLAGRSFRLNSRDQLERVLFDELGLPPIGKTEKTGKRSTSAAVLEALREVHPIVDKILQYREMAKLKGTYIDRLPALVHPKTGRLHTRFNQTATATGRLSSSDPNLQNIPVRTPLGQKIRRAFVAEEGWRLVALDYRQIELRVLAHLSGDENLIRVFQEGKDIHTQTASWMFGLSAEAIDPLMRRAAKTINFGVLYGMSAFRLSQELGIPYEEAQAFIQKYFQSYPKVKAWIEKTLREGRTRGYVETLFGRRRYVPDLNARVKGKREAAERMAFNMPVQGTAADLMKLAMVRLFPQLREVGARMLLQVHDELLLEAPKERAEEVAALAKEVMEGVWPLAVPLEVEVGIGEDWLAAKG

SEQ ID NO: 5275 - DNA, 2523 bp, synthetic construct
  misc_feature 1..2523: note = Variant of DNA polymerase I from Thermus sp. strain 2.9
  source 1..2523: mol_type = other DNA
atgcaccatcatcatcatcatggcggtagcggcgtgttaccggtgttcgagcctaaaggtcgcgtgcttctggttgatggccatcatctcgcgtatcgtaacttctttgccctgaaaggattaaccaccagcctgggcgagccggtacagggtgtctacggctttgcaaagtcgctcctgaaagctctgaaagaagacggtgatgtggtgattgttgtctttgatgcgaaagcgccaagttttcgccacgaagcgtacgaagcttacaaagccgggcgtgctccaacgccggaagactttcctcgccaattggcgcttatgaaggaattagtggatttgcttggcctcgaacgcttggaagttcccggtttcgaggcagacgacgtattagcgactctcgcaaagaaagccgaacgtgagggctatgaagtccagatcttgacagcagatcgcgatcttttccagcttttatctccgcgcatctcggtgttacacccggaagggcatcgtatcaccccggaatggctctgggagaaatatggtttgcgtcccgaacaatgggtggattttcgcgccttagcaggcgatccgagcgacaatattccgggagttaaaggtatcggcgagaagacggcgctcaagctccttaaagaatgggggtcgttggagaacttgcttaagaatttagatcaggtcaaaccagagtcagtgcgtgagaagattcttgctcacctcgaagacctcaaattaagccgcgaattgtcccgtgtacgcaccgatttgccgctcgaagttgatttcggtcgccgccgcgaacctgactgggagggtcttaaagcgtttttagagcgtcttgaatttggttcgctcttgcatgaattcggccttttagaaagcccgttactggccgaagaagcaccttggccaccgcccgagggcgcgtttttaggttaccgtttgagtcgcccggaaccgatgtgggccgaattactggctcttgcagcgtctgcccagggacgtgtgtatcgcgcggaagaccctcatggtgcgctccgcggcctcttcgaagtccgtggactccttgccaaagacttagctgttgttgcattgcgcgaaggtcttgatttacctccgactgatgatccaatgcttcttgcgtacctcttggacccgtcaaacacgacgcccgaaggcgtagcccgtcgttacggcggcgagtggaccgaagatgcagcgaaacgcgcgttattggccgaacgtttgcacgaaaatttattaggacgtttgcaaggcgaggaacgtctcctctggctttacgaagaagtggagaaaccattgagtcgcgtgctcgcgcatatggaagctaccggtgtcaaattagacgtggcgtatttggagaatctcagccttgaagttgctgcccacatgcgccgcttggaggaagaagtattccgtttagcaggccgttcctttcgccttaactctcgcgatcagttagaacgtgtgttgttcgatgaacttggtctccctcctatcggcaagacagagaagaccggtaaacgtagcacttcagcggcggttttagaagctcttcgcgaagtccatcccattgtggacaagatcttgcagtaccgcgaaatggcgaaattgaaaggcacctatattgacccgcttccggcattagtccacccgaaaacgggacgcctccatacccgcttcaaccaaacagccacggcgaccggtcgtttgtcctcctctgatccaaaccttcagaatattccagtacgtaccccattgggccagaagatccgccgtgcgtttgtagctgaggagggttggcgtttagtggccctcgattatcgtcaaattgaattacgtgtccttgcccatctttctggcgatgagaacctcatccgcgtgtttcaggaaggcaaagacattcacactcaaacggcaagctggatgtttggattatcagctgaagcgatcgatcctttgatgcgtcgtgcagcgaagaccatcaatttcggtgttctctacggtatgagtgcctttcgtttgtcgcaggaattaggcattccctatgaagaagctcaggcgttcattcagaaatactttcaaagctatcccaaagttaaagcatggatcgagaagactctccgtgaaggccgcacacgtggttacgtagagaccttatttggacgtcgccgctatgttcccgatttaaacgctcgcgtgaaaggcaagcgtgaagccgccgaacgcatggcgttcaacatgcctgtacagggcacggcagctgacctcatgaaacttgcaatggtgcgcctttttccacaattgcgtgaagttggtgcccgcatgctcttgcaggtccacgatgaactcttgttagaagcgccaaaagagcgtgcggaagaggtggcagccctcgcgaaagaagttatggaaggcgtgtggcccttagcggtgcctcttgaagtcgaagttggtattggcgaggattggctggctgccaaagga

SEQ ID NO: 5276 - protein, 841 aa, synthetic construct
  REGION 1..841: note = Variant of DNA polymerase I from Thermus sp. strain 2.9
MHHHHHHGGSGVLPVFEPKGRVLLVDGHHLAYRNFFALKGLTTSLGEPVQGVYGFAKSLLKALKEDGDVVIVVFDAKAPSFRHEAYEAYKAGRAPTPEDFPRQLALMKELVDLLGLERLEVPGFEADDVLATLAKKAEREGYEVQILTADRDLFQLLSPRISVLHPEGHRITPEWLWEKYGLRPEQWVDFRALAGDPSDNIPGVKGIGEKTALKLLKEWGSLENLLKNLDQVKPESVREKILAHLEDLKLSRELSRVRTDLPLEVDFGRRREPDWEGLKAFLERLEFGSLLHEFGLLESPLLAEEAPWPPPEGAFLGYRLSRPEPMWAELLALAASAQGRVYRAEDPHGALRGLFEVRGLLAKDLAVVALREGLDLPPTDDPMLLAYLLDPSNTTPEGVARRYGGEWTEDAAKRALLAERLHENLLGRLQGEERLLWLYEEVEKPLSRVLAHMEATGVKLDVAYLENLSLEVAAHMRRLEEEVFRLAGRSFRLNSRDQLERVLFDELGLPPIGKTEKTGKRSTSAAVLEALREVHPIVDKILQYREMAKLKGTYIDPLPALVHPKTGRLHTRFNQTATATGRLSSSDPNLQNIPVRTPLGQKIRRAFVAEEGWRLVALDYRQIELRVLAHLSGDENLIRVFQEGKDIHTQTASWMFGLSAEAIDPLMRRAAKTINFGVLYGMSAFRLSQELGIPYEEAQAFIQKYFQSYPKVKAWIEKTLREGRTRGYVETLFGRRRYVPDLNARVKGKREAAERMAFNMPVQGTAADLMKLAMVRLFPQLREVGARMLLQVHDELLLEAPKERAEEVAALAKEVMEGVWPLAVPLEVEVGIGEDWLAAKG

SEQ ID NO: 5277 - DNA, 2523 bp, synthetic construct
  misc_feature 1..2523: note = Variant of DNA polymerase I from Thermus sp. strain 2.9
  source 1..2523: mol_type = other DNA
atgcaccatcatcatcatcatggcggtagcggcgtgttaccggtgttcgagcctaaaggtcgcgtgcttctggttgatggccatcatctcgcgtatcgtaacttctttgccctgaaaggattaaccaccagcctgggcgagccggtacagggtgtctacggctttgcaaagtcgctcctgaaagctctgaaagaagacggtgatgtggtgattgttgtctttgatgcgaaagcgccaagttttcgccacgaagcgtacgaagcttacaaagccgggcgtgctccaacgccggaagactttcctcgccaattggcgcttatgaaggaattagtggatttgcttggcctcgaacgcttggaagttcccggtttcgaggcagacgacgtattagcgactctcgcaaagaaagccgaacgtgagggctatgaagtccagatcttgacagcagatcgcgatcttttccagcttttatctccgcgcatctcggtgttacacccggaagggcatcgtatcaccccggaatggctctgggagaaatatggtttgcgtcccgaacaatgggtggattttcgcgccttagcaggcgatccgagcgacaatattccgggagttaaaggtatcggcgagaagacggcgctcaagctccttaaagaatgggggtcgttggagaacttgcttaagaatttagatcaggtcaaaccagagtcagtgcgtgagaagattcttgctcacctcgaagacctcaaattaagccgcgaattgtcccgtgtacgcaccgatttgccgctcgaagttgatttcggtcgccgccgcgaacctgactgggagggtcttaaagcgtttttagagcgtcttgaatttggttcgctcttgcatgaattcggccttttagaaagcccgttactggccgaagaagcaccttggccaccgcccgagggcgcgtttttaggttaccgtttgagtcgcccggaaccgatgtgggccgaattactggctcttgcagcgtctgcccagggacgtgtgtatcgcgcggaagaccctcatggtgcgctccgcggcctcttcgaagtccgtggactccttgccaaagacttagctgttgttgcattgcgcgaaggtcttgatttacctccgactgatgatccaatgcttcttgcgtacctcttggacccgtcaaacacgacgcccgaaggcgtagcccgtcgttacggcggcgagtggaccgaagatgcacagaaacgcgcgttattggccgaacgtttgcacgaaaatttattaggacgtttgcaaggcgaggaacgtctcctctggctttacgaagaagtggagaaaccattgagtcgcgtgctcgcgcatatggaagctaccggtgtcaaattagacgtggcgtatttggagaatctcagccttgaagttgctgcccacatgcgccgcttggaggaagaagtattccgtttagcaggccgttcctttcgccttaactctcgcgatcagttagaacgtgtgttgttcgatgaacttggtctccctcctatcggcaagacagagaagaccggtaaacgtagcacttcagcggcggttttagaagctcttcgcgaagtccatcccattgtggacaagatcttgcagtaccgcgaaatggcgaaattgaaaggcacctatattgaccgtcttccggcattagtccacccgaaaacgggacgcctccatacccgcttcaaccaaacagccacggcgaccggtcgtttgtcctcctctgatccaaaccttcagaatattccagtacgtaccccattgggccagaagatccgccgtgcgtttgtagctgaggagggttggcgtttagtggccctcgattatcgtcaaattgaattacgtgtccttgcccatctttctggcgatgagaacctcatccgcgtgtttcaggaaggcaaagacattcacactcaaacggcaagctggatgtttggattatcagctgaagcgatcgatcctttgatgcgtcgtgcagcgaagaccatcaatttcggtgttctctacggtatgagtgcctttcgtttgtcgcaggaattaggcattccctatgaagaagctcaggcgttcattcagaaatactttcaaagctatcccaaagttaaagcatggatcgagaagactctccgtgaaggccgcacacgtggttacgtagagaccttatttggacgtcgccgctatgttcccgatttaaacgctcgcgtgaaaggcaagcgtgaagccgccgaacgcatggcgttcaacatgcctgtacagggcacggcagctgacctcatgaaacttgcaatggtgcgcctttttccacaattgcgtgaagttggtgcccgcatgctcttgcaggtccacgatgaactcttgttagaagcgccaaaagagcgtgcggaagaggtggcagccctcgcgaaagaagttatggaaggcgtgtggcccttagcggtgcctcttgaagtcgaagttggtattggcgaggattggctggctgccaaagga

SEQ ID NO: 5278 - protein, 841 aa, synthetic construct
  REGION 1..841: note = Variant of DNA polymerase I from Thermus sp. strain 2.9
MHHHHHHGGSGVLPVFEPKGRVLLVDGHHLAYRNFFALKGLTTSLGEPVQGVYGFAKSLLKALKEDGDVVIVVFDAKAPSFRHEAYEAYKAGRAPTPEDFPRQLALMKELVDLLGLERLEVPGFEADDVLATLAKKAEREGYEVQILTADRDLFQLLSPRISVLHPEGHRITPEWLWEKYGLRPEQWVDFRALAGDPSDNIPGVKGIGEKTALKLLKEWGSLENLLKNLDQVKPESVREKILAHLEDLKLSRELSRVRTDLPLEVDFGRRREPDWEGLKAFLERLEFGSLLHEFGLLESPLLAEEAPWPPPEGAFLGYRLSRPEPMWAELLALAASAQGRVYRAEDPHGALRGLFEVRGLLAKDLAVVALREGLDLPPTDDPMLLAYLLDPSNTTPEGVARRYGGEWTEDAQKRALLAERLHENLLGRLQGEERLLWLYEEVEKPLSRVLAHMEATGVKLDVAYLENLSLEVAAHMRRLEEEVFRLAGRSFRLNSRDQLERVLFDELGLPPIGKTEKTGKRSTSAAVLEALREVHPIVDKILQYREMAKLKGTYIDRLPALVHPKTGRLHTRFNQTATATGRLSSSDPNLQNIPVRTPLGQKIRRAFVAEEGWRLVALDYRQIELRVLAHLSGDENLIRVFQEGKDIHTQTASWMFGLSAEAIDPLMRRAAKTINFGVLYGMSAFRLSQELGIPYEEAQAFIQKYFQSYPKVKAWIEKTLREGRTRGYVETLFGRRRYVPDLNARVKGKREAAERMAFNMPVQGTAADLMKLAMVRLFPQLREVGARMLLQVHDELLLEAPKERAEEVAALAKEVMEGVWPLAVPLEVEVGIGEDWLAAKG

SEQ ID NO: 5279 - DNA, 2523 bp, synthetic construct
  misc_feature 1..2523: note = Variant of DNA polymerase I from Thermus sp. strain 2.9
  source 1..2523: mol_type = other DNA
atgcaccatcatcatcatcatggcggtagcggcgtgttaccggtgttcgagcctaaaggtcgcgtgcttctggttgatggccatcatctcgcgtatcgtaacttctttgccctgaaaggattaaccaccagcctgggcgagccggtacagggtgtctacggctttgcaaagtcgctcctgaaagctctgaaagaagacggtgatgtggtgattgttgtctttgatgcgaaagcgccaagttttcgccacgaagcgtacgaagcttacaaagccgggcgtgctccaacgccggaagactttcctcgccaattggcgcttatgaaggaattagtggatttgcttggcctcgaacgcttggaagttcccggtttcgaggcagacgacgtattagcgactctcgcaaagaaagccgaacgtgagggctatgaagtccagatcttgacagcagatcgcgatcttttccagcttttatctccgcgcatctcggtgttacacccggaagggcatcgtatcaccccggaatggctctgggagaaatatggtttgcgtcccgaacaatgggtggattttcgcgccttagcaggcgatccgagcgacaatattccgggagttaaaggtatcggcgagaagacggcgctcaagctccttaaagaatgggggtcgttggagaacttgcttaagaatttagatcaggtcaaaccagagtcagtgcgtgagaagattcttgctcacctcgaagacctcaaattaagccgcgaattgtcccgtgtacgcaccgatttgccgctcgaagttgatttcggtcgccgccgcgaacctgactgggagggtcttaaagcgtttttagagcgtcttgaatttggttcgctcttgcatgaattcggccttttagaaagcccgttactggccgaagaagcaccttggccaccgcccgagggcgcgtttttaggttaccgtttgagtcgcccggaaccgatgtgggccgaattactggctcttgcagcgtctgcccagggacgtgtgtatcgcgcggaagaccctcatggtgcgctccgcggcctcttcgaagtccgtggactccttgccaaagacttagctgttgttgcattgcgcgaaggtcttgatttacctccgactgatgatccaatgcttcttgcgtacctcttggacccgtcaaacacgacgcccgaaggcgtagcccgtcgttacggcggcgagtggaccgaagatgcagcgtggcgcgcgttattggccgaacgtttgcacgaaaatttattaggacgtttgcaaggcgaggaacgtctcctctggctttacgaagaagtggagaaaccattgagtcgcgtgctcgcgcatatggaagctaccggtgtcaaattagacgtggcgtatttggagaatctcagccttgaagttgctgcccacatgcgccgcttggaggaagaagtattccgtttagcaggccgttcctttcgccttaactctcgcgatcagttagaacgtgtgttgttcgatgaacttggtctccctcctatcggcaagacagagaagaccggtaaacgtagcacttcagcggcggttttagaagctcttcgcgaagtccatcccattgtggacaagatcttgcagtaccgcgaaatggcgaaattgaaaggcacctatattgaccgtcttccggcattagtccacccgaaaacgggacgcctccatacccgcttcaaccaaacagccacggcgaccggtcgtttgtcctcctctgatccaaaccttcagaatattccagtacgtaccccattgggccagaagatccgccgtgcgtttgtagctgaggagggttggcgtttagtggccctcgattatcgtcaaattgaattacgtgtccttgcccatctttctggcgatgagaacctcatccgcgtgtttcaggaaggcaaagacattcacactcaaacggcaagctggatgtttggattatcagctgaagcgatcgatcctttgatgcgtcgtgcagcgaagaccatcaatttcggtgttctctacggtatgagtgcctttcgtttgtcgcaggaattaggcattccctatgaagaagctcaggcgttcattcagaaatactttcaaagctatcccaaagttaaagcatggatcgagaagactctccgtgaaggccgcacacgtggttacgtagagaccttatttggacgtcgccgctatgttcccgatttaaacgctcgcgtgaaaggcaagcgtgaagccgccgaacgcatggcgttcaacatgcctgtacagggcacggcagctgacctcatgaaacttgcaatggtgcgcctttttccacaattgcgtgaagttggtgcccgcatgctcttgcaggtccacgatgaactcttgttagaagcgccaaaagagcgtgcggaagaggtggcagccctcgcgaaagaagttatggaaggcgtgtggcccttagcggtgcctcttgaagtcgaagttggtattggcgaggattggctggctgccaaagga

SEQ ID NO: 5280 - protein, 841 aa, synthetic construct
  REGION 1..841: note = Variant of DNA polymerase I from Thermus sp. strain 2.9
MHHHHHHGGSGVLPVFEPKGRVLLVDGHHLAYRNFFALKGLTTSLGEPVQGVYGFAKSLLKALKEDGDVVIVVFDAKAPSFRHEAYEAYKAGRAPTPEDFPRQLALMKELVDLLGLERLEVPGFEADDVLATLAKKAEREGYEVQILTADRDLFQLLSPRISVLHPEGHRITPEWLWEKYGLRPEQWVDFRALAGDPSDNIPGVKGIGEKTALKLLKEWGSLENLLKNLDQVKPESVREKILAHLEDLKLSRELSRVRTDLPLEVDFGRRREPDWEGLKAFLERLEFGSLLHEFGLLESPLLAEEAPWPPPEGAFLGYRLSRPEPMWAELLALAASAQGRVYRAEDPHGALRGLFEVRGLLAKDLAVVALREGLDLPPTDDPMLLAYLLDPSNTTPEGVARRYGGEWTEDAAWRALLAERLHENLLGRLQGEERLLWLYEEVEKPLSRVLAHMEATGVKLDVAYLENLSLEVAAHMRRLEEEVFRLAGRSFRLNSRDQLERVLFDELGLPPIGKTEKTGKRSTSAAVLEALREVHPIVDKILQYREMAKLKGTYIDRLPALVHPKTGRLHTRFNQTATATGRLSSSDPNLQNIPVRTPLGQKIRRAFVAEEGWRLVALDYRQIELRVLAHLSGDENLIRVFQEGKDIHTQTASWMFGLSAEAIDPLMRRAAKTINFGVLYGMSAFRLSQELGIPYEEAQAFIQKYFQSYPKVKAWIEKTLREGRTRGYVETLFGRRRYVPDLNARVKGKREAAERMAFNMPVQGTAADLMKLAMVRLFPQLREVGARMLLQVHDELLLEAPKERAEEVAALAKEVMEGVWPLAVPLEVEVGIGEDWLAAKG

SEQ ID NO: 5281 - DNA, 2523 bp, synthetic construct
  misc_feature 1..2523: note = Variant of DNA polymerase I from Thermus sp. strain 2.9
  source 1..2523: mol_type = other DNA
atgcaccatcatcatcatcatggcggtagcggcgtgttaccggtgttcgagcctaaaggtcgcgtgcttctggttgatggccatcatctcgcgtatcgtaacttctttgccctgaaaggattaaccaccagcctgggcgagccggtacagggtgtctacggctttgcaaagtcgctcctgaaagctctgaaagaagacggtgatgtggtgattgttgtctttgatgcgaaagcgccaagttttcgccacgaagcgtacgaagcttacaaagccgggcgtgctccaacgccggaagactttcctcgccaattggcgcttatgaaggaattagtggatttgcttggcctcgaacgcttggaagttcccggtttcgaggcagacgacgtattagcgactctcgcaaagaaagccgaacgtgagggctatgaagtccagatcttgacagcagatcgcgatcttttccagcttttatctccgcgcatctcggtgttacacccggaagggcatcgtatcaccccggaatggctctgggagaaatatggtttgcgtcccgaacaatgggtggattttcgcgccttagcaggcgatccgagcgacaatattccgggagttaaaggtatcggcgagaagacggcgctcaagctccttaaagaatgggggtcgttggagaacttgcttaagaatttagatcaggtcaaaccagagtcagtgcgtgagaagattcttgctcacctcgaagacctcaaattaagccgcgaattgtcccgtgtacgcaccgatttgccgctcgaagttgatttcggtcgccgccgcgaacctgactgggagggtcttaaagcgtttttagagcgtcttgaatttggttcgctcttgcatgaattcggccttttagaaagcccgttactggccgaagaagcaccttggccaccgcccgagggcgcgtttttaggttaccgtttgagtcgcccggaaccgatgtgggccgaattactggctcttgcagcgtctgcccagggacgtgtgtatcgcgcggaagaccctcatggtgcgctccgcggcctcttcgaagtccgtggactccttgccaaagacttagctgttgttgcattgcgcgaaggtcttgatttacctccgactgatgatccaatgcttcttgcgtacctcttggacccgtcaaacacgacgcccgaaggcgtagcccgtcgttacggcggcgagtggaccgaagatgcagcgaaacgcgcgttattggccgaacgtttgcacgaaaatttattaggacgtttgcaaggcgaggaacgtctcctctggctttacgaagaagtggagaaaccattgagtcgcgtgctcgcgcatatggaagctaccggtgtcaaattagacgtggcgtatttggagatgcttcaccttgaagttgctgcccacatgcgccgcttggaggaagaagtattccgtttagcaggccgttcctttcgccttaactctcgcgatcagttagaacgtgtgttgttcgatgaacttggtctccctcctatcggcaagacagagaagaccggtaaacgtagcacttcagcggcggttttagaagctcttcgcgaagtccatcccattgtggacaagatcttgcagtaccgcgaaatggcgaaattgaaaggcacctatattgaccgtcttccggcattagtccacccgaaaacgggacgcctccatacccgcttcaaccaaacagccacggcgaccggtcgtttgtcctcctctgatccaaaccttcagaatattccagtacgtaccccattgggccagaagatccgccgtgcgtttgtagctgaggagggttggcgtttagtggccctcgattatcgtcaaattgaattacgtgtccttgcccatctttctggcgatgagaacctcatccgcgtgtttcaggaaggcaaagacattcacactcaaacggcaagctggatgtttggattatcagctgaagcgatcgatcctttgatgcgtcgtgcagcgaagaccatcaatttcggtgttctctacggtatgagtgcctttcgtttgtcgcaggaattaggcattccctatgaagaagctcaggcgttcattcagaaatactttcaaagctatcccaaagttaaagcatggatcgagaagactctccgtgaaggccgcacacgtggttacgtagagaccttatttggacgtcgccgctatgttcccgatttaaacgctcgcgtgaaaggcaagcgtgaagccgccgaacgcatggcgttcaacatgcctgtacagggcacggcagctgacctcatgaaacttgcaatggtgcgcctttttccacaattgcgtgaagttggtgcccgcatgctcttgcaggtccacgatgaactcttgttagaagcgccaaaagagcgtgcggaagaggtggcagccctcgcgaaagaagttatggaaggcgtgtggcccttagcggtgcctcttgaagtcgaagttggtattggcgaggattggctggctgccaaagga

SEQ ID NO: 5282 - protein, 841 aa, synthetic construct
  REGION 1..841: note = Variant of DNA polymerase I from Thermus sp. strain 2.9
MHHHHHHGGSGVLPVFEPKGRVLLVDGHHLAYRNFFALKGLTTSLGEPVQGVYGFAKSLLKALKEDGDVVIVVFDAKAPSFRHEAYEAYKAGRAPTPEDFPRQLALMKELVDLLGLERLEVPGFEADDVLATLAKKAEREGYEVQILTADRDLFQLLSPRISVLHPEGHRITPEWLWEKYGLRPEQWVDFRALAGDPSDNIPGVKGIGEKTALKLLKEWGSLENLLKNLDQVKPESVREKILAHLEDLKLSRELSRVRTDLPLEVDFGRRREPDWEGLKAFLERLEFGSLLHEFGLLESPLLAEEAPWPPPEGAFLGYRLSRPEPMWAELLALAASAQGRVYRAEDPHGALRGLFEVRGLLAKDLAVVALREGLDLPPTDDPMLLAYLLDPSNTTPEGVARRYGGEWTEDAAKRALLAERLHENLLGRLQGEERLLWLYEEVEKPLSRVLAHMEATGVKLDVAYLEMLHLEVAAHMRRLEEEVFRLAGRSFRLNSRDQLERVLFDELGLPPIGKTEKTGKRSTSAAVLEALREVHPIVDKILQYREMAKLKGTYIDRLPALVHPKTGRLHTRFNQTATATGRLSSSDPNLQNIPVRTPLGQKIRRAFVAEEGWRLVALDYRQIELRVLAHLSGDENLIRVFQEGKDIHTQTASWMFGLSAEAIDPLMRRAAKTINFGVLYGMSAFRLSQELGIPYEEAQAFIQKYFQSYPKVKAWIEKTLREGRTRGYVETLFGRRRYVPDLNARVKGKREAAERMAFNMPVQGTAADLMKLAMVRLFPQLREVGARMLLQVHDELLLEAPKERAEEVAALAKEVMEGVWPLAVPLEVEVGIGEDWLAAKG

SEQ ID NO: 5283 - DNA, 2523 bp, synthetic construct
  misc_feature 1..2523: note = Variant of DNA polymerase I from Thermus sp. strain 2.9
  source 1..2523: mol_type = other DNA
atgcaccatcatcatcatcatggcggtagcggcgtgttaccggtgttcgagcctaaaggtcgcgtgcttctggttgatggccatcatctcgcgtatcgtaacttctttgccctgaaaggattaaccaccagcctgggcgagccggtacagggtgtctacggctttgcaaagtcgctcctgaaagctctgaaagaagacggtgatgtggtgattgttgtctttgatgcgaaagcgccaagttttcgccacgaagcgtacgaagcttacaaagccgggcgtgctccaacgccggaagactttcctcgccaattggcgcttatgaaggaattagtggatttgcttggcctcgaacgcttggaagttcccggtttcgaggcagacgacgtattagcgactctcgcaaagaaagccgaacgtgagggctatgaagtccagatcttgacagcagatcgcgatcttttccagcttttatctccgcgcatctcggtgttacacccggaagggcatcgtatcaccccggaatggctctgggagaaatatggtttgcgtcccgaacaatgggtggattttcgcgccttagcaggcgatccgagcgacaatattccgggagttaaaggtatcggcgagaagacggcgctcaagctccttaaagaatgggggtcgttggagaacttgcttaagaatttagatcaggtcaaaccagagtcagtgcgtgagaagattcttgctcacctcgaagacctcaaattaagccgcgaattgtcccgtgtacgcaccgatttgccgctcgaagttgatttcggtcgccgccgcgaacctgactgggagggtcttaaagcgtttttagagcgtcttgaatttggttcgctcttgcatgaattcggccttttagaaagcccgttactggccgaagaagcaccttggccaccgcccgagggcgcgtttttaggttaccgtttgagtcgcccggaaccgatgtgggccgaattactggctcttgcagcgtctgcccagggacgtgtgtatcgcgcggaagaccctcatggtgcgctccgcggcctcttcgaagtccgtggactccttgccaaagacttagctgttgttgcattgcgcgaaggtcttgatttacctccgactgatgatccaatgcttcttgcgtacctcttggacccgtcaaacacgacgcccgaaggcgtagcccgtcgttacggcggcgagtggaccgaagatgcagcgaaacgcgcgttattggccgaacgtttgcacgaaaatttattaggacgtttgcaaggcgaggaacgtctcctctggctttacgaagaagtggagaaaccattgagtcgcgtgctcgcgcatatggaagctaccggtgtcaaattagacgtggcgtatttggagaatctcagccttgaagttgctgcccacatgcgccgcttggaggaagaagtattccgtttagcaggccgttcctttcgccttaactctcgcgatcagttagaacgtgtgttgttcgatgaacttggtctccctcctatcggcaagacagagaagaccggtaaacgtagcacttcagcggcggttttagaagctcttcgcgaagtccatcccattgtggacaagatcttgcagtaccgcgaaatggcgcatttgaaaggcacctatattgaccgtcttccggcattagtccacccgaaaacgggacgcctccatacccgcttcaaccaaacagccacggcgaccggtcgtttgtcctcctctgatccaaaccttcagaatattccagtacgtaccccattgggccagaagatccgccgtgcgtttgtagctgaggagggttggcgtttagtggccctcgattatcgtcaaattgaattacgtgtccttgcccatctttctggcgatgagaacctcatccgcgtgtttcaggaaggcaaagacattcacactcaaacggcaagctggatgtttggattatcagctgaagcgatcgatcctttgatgcgtcgtgcagcgaagaccatcaatttcggtgttctctacggtatgagtgcctttcgtttgtcgcaggaattaggcattccctatgaagaagctcaggcgttcattcagaaatactttcaaagctatcccaaagttaaagcatggatcgagaagactctccgtgaaggccgcacacgtggttacgtagagaccttatttggacgtcgccgctatgttcccgatttaaacgctcgcgtgaaaggcaagcgtgaagccgccgaacgcatggcgttcaacatgcctgtacagggcacggcagctgacctcatgaaacttgcaatggtgcgcctttttccacaattgcgtgaagttggtgcccgcatgctcttgcaggtccacgatgaactcttgttagaagcgccaaaagagcgtgcggaagaggtggcagccctcgcgaaagaagttatggaaggcgtgtggcccttagcggtgcctcttgaagtcgaagttggtattggcgaggattggctggctgccaaagga

SEQ ID NO: 5284 - protein, 841 aa, synthetic construct
  REGION 1..841: note = Variant of DNA polymerase I from Thermus sp. strain 2.9
MHHHHHHGGSGVLPVFEPKGRVLLVDGHHLAYRNFFALKGLTTSLGEPVQGVYGFAKSLLKALKEDGDVVIVVFDAKAPSFRHEAYEAYKAGRAPTPEDFPRQLALMKELVDLLGLERLEVPGFEADDVLATLAKKAEREGYEVQILTADRDLFQLLSPRISVLHPEGHRITPEWLWEKYGLRPEQWVDFRALAGDPSDNIPGVKGIGEKTALKLLKEWGSLENLLKNLDQVKPESVREKILAHLEDLKLSRELSRVRTDLPLEVDFGRRREPDWEGLKAFLERLEFGSLLHEFGLLESPLLAEEAPWPPPEGAFLGYRLSRPEPMWAELLALAASAQGRVYRAEDPHGALRGLFEVRGLLAKDLAVVALREGLDLPPTDDPMLLAYLLDPSNTTPEGVARRYGGEWTEDAAKRALLAERLHENLLGRLQGEERLLWLYEEVEKPLSRVLAHMEATGVKLDVAYLENLSLEVAAHMRRLEEEVFRLAGRSFRLNSRDQLERVLFDELGLPPIGKTEKTGKRSTSAAVLEALREVHPIVDKILQYREMAHLKGTYIDRLPALVHPKTGRLHTRFNQTATATGRLSSSDPNLQNIPVRTPLGQKIRRAFVAEEGWRLVALDYRQIELRVLAHLSGDENLIRVFQEGKDIHTQTASWMFGLSAEAIDPLMRRAAKTINFGVLYGMSAFRLSQELGIPYEEAQAFIQKYFQSYPKVKAWIEKTLREGRTRGYVETLFGRRRYVPDLNARVKGKREAAERMAFNMPVQGTAADLMKLAMVRLFPQLREVGARMLLQVHDELLLEAPKERAEEVAALAKEVMEGVWPLAVPLEVEVGIGEDWLAAKG

SEQ ID NO: 5285 - DNA, 2523 bp, synthetic construct
  misc_feature 1..2523: note = Variant of DNA polymerase I from Thermus sp. strain 2.9
  source 1..2523: mol_type = other DNA
atgcaccatcatcatcatcatggcggtagcggcgtgttaccggtgttcgagcctaaaggtcgcgtgcttctggttgatggccatcatctcgcgtatcgtaacttctttgccctgaaaggattaaccaccagcctgggcgagccggtacagggtgtctacggctttgcaaagtcgctcctgaaagctctgaaagaagacggtgatgtggtgattgttgtctttgatgcgaaagcgccaagttttcgccacgaagcgtacgaagcttacaaagccgggcgtgctccaacgccggaagactttcctcgccaattggcgcttatgaaggaattagtggatttgcttggcctcgaacgcttggaagttcccggtttcgaggcagacgacgtattagcgactctcgcaaagaaagccgaacgtgagggctatgaagtccagatcttgacagcagatcgcgatcttttccagcttttatctccgcgcatctcggtgttacacccggaagggcatcgtatcaccccggaatggctctgggagaaatatggtttgcgtcccgaacaatgggtggattttcgcgccttagcaggcgatccgagcgacaatattccgggagttaaaggtatcggcgagaagacggcgctcaagctccttaaagaatgggggtcgttggagaacttgcttaagaatttagatcaggtcaaaccagagtcagtgcgtgagaagattcttgctcacctcgaagacctcaaattaagccgcgaattgtcccgtgtacgcaccgatttgccgctcgaagttgatttcggtcgccgccgcgaacctgactgggagggtcttaaagcgtttttagagcgtcttgaatttggttcgctcttgcatgaattcggccttttagaaagcccgttactggccgaagaagcaccttggccaccgcccgagggcgcgtttttaggttaccgtttgagtcgcccggaaccgatgtgggccgaattactggctcttgcagcgtctgcccagggacgtgtgtatcgcgcggaagaccctcatggtgcgctccgcggcctcttcgaagtccgtggactccttgccaaagacttagctgttgttgcattgcgcgaaggtcttgatttacctccgactgatgatccaatgcttcttgcgtacctcttggacccgtcaaacacgacgcccgaaggcgtagcccgtcgttacggcggcgagtggaccgaagatgcagcgaaacgcgcgttattggccgaacgtttgcacgaaaatttattaggacgtttgcaaggcgaggaacgtctcctctggctttacgaagaagtggagaaaccattgagtcgcgtgctcgcgcatatggaagctaccggtgtcaaattagacgtggcgtatttggagaatctcagccttgaagttgctgcccacatgcgccgcttggaggaagaagtattccgtttagcaggccgttcctttcgccttaactctcgcgatcagttagaacgtgtgttgttcgatgaacttggtctccctcctatcggcaagacagagaagaccggtaaacgtagcacttcagcggcggttttagaagctcttcgcgaagtccatcccattgtggacaagatcttgcagtaccgcgaaatggcgaaattgaaaggcacctatattgaccgtcttccggcattagtccacccgaaaacgggacgcctccatacccgcttcaaccaaacagccacggcgaccggtcgtttgtcctcctctatgccaaaccttcagaatattccagtacgtaccccattgggccagaagatccgccgtgcgtttgtagctgaggagggttggcgtttagtggccctcgattatcgtcaaattgaattacgtgtccttgcccatctttctggcgatgagaacctcatccgcgtgtttcaggaaggcaaagacattcacactcaaacggcaagctggatgtttggattatcagctgaagcgatcgatcctttgatgcgtcgtgcagcgaagaccatcaatttcggtgttctctacggtatgagtgcctttcgtttgtcgcaggaattaggcattccctatgaagaagctcaggcgttcattcagaaatactttcaaagctatcccaaagttaaagcatggatcgagaagactctccgtgaaggccgcacacgtggttacgtagagaccttatttggacgtcgccgctatgttcccgatttaaacgctcgcgtgaaaggcaagcgtgaagccgccgaacgcatggcgttcaacatgcctgtacagggcacggcagctgacctcatgaaacttgcaatggtgcgcctttttccacaattgcgtgaagttggtgcccgcatgctcttgcaggtccacgatgaactcttgttagaagcgccaaaagagcgtgcggaagaggtggcagccctcgcgaaagaagttatggaaggcgtgtggcccttagcggtgcctcttgaagtcgaagttggtattggcgaggattggctggctgccaaagga

SEQ ID NO: 5286 - protein, 841 aa, synthetic construct
  REGION 1..841: note = Variant of DNA polymerase I from Thermus sp. strain 2.9
MHHHHHHGGSGVLPVFEPKGRVLLVDGHHLAYRNFFALKGLTTSLGEPVQGVYGFAKSLLKALKEDGDVVIVVFDAKAPSFRHEAYEAYKAGRAPTPEDFPRQLALMKELVDLLGLERLEVPGFEADDVLATLAKKAEREGYEVQILTADRDLFQLLSPRISVLHPEGHRITPEWLWEKYGLRPEQWVDFRALAGDPSDNIPGVKGIGEKTALKLLKEWGSLENLLKNLDQVKPESVREKILAHLEDLKLSRELSRVRTDLPLEVDFGRRREPDWEGLKAFLERLEFGSLLHEFGLLESPLLAEEAPWPPPEGAFLGYRLSRPEPMWAELLALAASAQGRVYRAEDPHGALRGLFEVRGLLAKDLAVVALREGLDLPPTDDPMLLAYLLDPSNTTPEGVARRYGGEWTEDAAKRALLAERLHENLLGRLQGEERLLWLYEEVEKPLSRVLAHMEATGVKLDVAYLENLSLEVAAHMRRLEEEVFRLAGRSFRLNSRDQLERVLFDELGLPPIGKTEKTGKRSTSAAVLEALREVHPIVDKILQYREMAKLKGTYIDRLPALVHPKTGRLHTRFNQTATATGRLSSSMPNLQNIPVRTPLGQKIRRAFVAEEGWRLVALDYRQIELRVLAHLSGDENLIRVFQEGKDIHTQTASWMFGLSAEAIDPLMRRAAKTINFGVLYGMSAFRLSQELGIPYEEAQAFIQKYFQSYPKVKAWIEKTLREGRTRGYVETLFGRRRYVPDLNARVKGKREAAERMAFNMPVQGTAADLMKLAMVRLFPQLREVGARMLLQVHDELLLEAPKERAEEVAALAKEVMEGVWPLAVPLEVEVGIGEDWLAAKG

SEQ ID NO: 5287 - DNA, 2523 bp, synthetic construct
  misc_feature 1..2523: note = Variant of DNA polymerase I from Thermus sp. strain 2.9
  source 1..2523: mol_type = other DNA
atgcaccatcatcatcatcatggcggtagcggcgtgttaccggtgttcgagcctaaaggtcgcgtgcttctggttgatggccatcatctcgcgtatcgtaacttctttgccctgaaaggattaaccaccagcctgggcgagccggtacagggtgtctacggctttgcaaagtcgctcctgaaagctctgaaagaagacggtgatgtggtgattgttgtctttgatgcgaaagcgccaagttttcgccacgaagcgtacgaagcttacaaagccgggcgtgctccaacgccggaagactttcctcgccaattggcgcttatgaaggaattagtggatttgcttggcctcgaacgcttggaagttcccggtttcgaggcagacgacgtattagcgactctcgcaaagaaagccgaacgtgagggctatgaagtccagatcttgacagcagatcgcgatcttttccagcttttatctccgcgcatctcggtgttacacccggaagggcatcgtatcaccccggaatggctctgggagaaatatggtttgcgtcccgaacaatgggtggattttcgcgccttagcaggcgatccgagcgacaatattccgggagttaaaggtatcggcgagaagacggcgctcaagctccttaaagaatgggggtcgttggagaacttgcttaagaatttagatcaggtcaaaccagagtcagtgcgtgagaagattcttgctcacctcgaagacctcaaattaagccgcgaattgtcccgtgtacgcaccgatttgccgctcgaagttgatttcggtcgccgccgcgaacctgactgggagggtcttaaagcgtttttagagcgtcttgaatttggttcgctcttgcatgaattcggccttttagaaagcccgttactggccgaagaagcaccttggccaccgcccgagggcgcgtttttaggttaccgtttgagtcgcccggaaccgatgtgggccgaattactggatcttgcagcgtctgcccagggacgtgtgtatcgcgcggaagaccctcatggtgcgctccgcggcctcttcgaagtccgtggactccttgccaaagacttagctgttgttgcattgcgcgaaggtcttgatttacctccgactgatgatccaatgcttcttgcgtacctcttggacccgtcaaacacgacgcccgaaggcgtagcccgtcgttacggcggcgagtggaccgaagatgcagcgaaacgcgcgttattggccgaacgtttgcacgaaaatttattaggacgtttgcaaggcgaggaacgtctcctctggctttacgaagaagtggagaaaccattgagtcgcgtgctcgcgcatatggaagctaccggtgtcaaattagacgtggcgtatttggagaatctcagccttgaagttgctgcccacatgcgccgcttggaggaagaagtattccgtttagcaggccgttcctttcgccttaactctcgcgatcagttagaacgtgtgttgttcgatgaacttggtctccctcctatcggcaagacagagaagaccggtaaacgtagcacttcagcggcggttttagaagctcttcgcgaagtccatcccattgtggacaagatcttgcagtaccgcgaaatggcgaaattgaaaggcacctatattgaccgtcttccggcattagtccacccgaaaacgggacgcctccatacccgcttcaaccaaacagccacggcgaccggtcgtttgtcctcctctgatccaaaccttcagaatattccagtacgtaccccattgggccagaagatccgccgtgcgtttgtagctgaggagggttggcgtttagtggccctcgattatcgtcaaattgaattacgtgtccttgcccatctttctggcgatgagaacctcatccgcgtgtttcaggaaggcaaagacattcacactcaaacggcaagctggatgtttggattatcagctgaagcgatcgatcctttgatgcgtcgtgcagcgaagaccatcaatttcggtgttctctacggtatgagtgcctttcgtttgtcgcaggaattaggcattccctatgaagaagctcaggcgttcattcagaaatactttcaaagctatcccaaagttaaagcatggatcgagaagactctccgtgaaggccgcacacgtggttacgtagagaccttatttggacgtcgccgctatgttcccgatttaaacgctcgcgtgaaaggcaagcgtgaagccgccgaacgcatggcgttcaacatgcctgtacagggcacggcagctgacctcatgaaacttgcaatggtgcgcctttttccacaattgcgtgaagttggtgcccgcatgctcttgcaggtccacgatgaactcttgttagaagcgccaaaagagcgtgcggaagaggtggcagccctcgcgaaagaagttatggaaggcgtgtggcccttagcggtgcctcttgaagtcgaagttggtattggcgaggattggctggctgccaaagga

SEQ ID NO: 5288 - protein, 841 aa, synthetic construct
  REGION 1..841: note = Variant of DNA polymerase I from Thermus sp. strain 2.9
MHHHHHHGGSGVLPVFEPKGRVLLVDGHHLAYRNFFALKGLTTSLGEPVQGVYGFAKSLLKALKEDGDVVIVVFDAKAPSFRHEAYEAYKAGRAPTPEDFPRQLALMKELVDLLGLERLEVPGFEADDVLATLAKKAEREGYEVQILTADRDLFQLLSPRISVLHPEGHRITPEWLWEKYGLRPEQWVDFRALAGDPSDNIPGVKGIGEKTALKLLKEWGSLENLLKNLDQVKPESVREKILAHLEDLKLSRELSRVRTDLPLEVDFGRRREPDWEGLKAFLERLEFGSLLHEFGLLESPLLAEEAPWPPPEGAFLGYRLSRPEPMWAELLDLAASAQGRVYRAEDPHGALRGLFEVRGLLAKDLAVVALREGLDLPPTDDPMLLAYLLDPSNTTPEGVARRYGGEWTEDAAKRALLAERLHENLLGRLQGEERLLWLYEEVEKPLSRVLAHMEATGVKLDVAYLENLSLEVAAHMRRLEEEVFRLAGRSFRLNSRDQLERVLFDELGLPPIGKTEKTGKRSTSAAVLEALREVHPIVDKILQYREMAKLKGTYIDRLPALVHPKTGRLHTRFNQTATATGRLSSSDPNLQNIPVRTPLGQKIRRAFVAEEGWRLVALDYRQIELRVLAHLSGDENLIRVFQEGKDIHTQTASWMFGLSAEAIDPLMRRAAKTINFGVLYGMSAFRLSQELGIPYEEAQAFIQKYFQSYPKVKAWIEKTLREGRTRGYVETLFGRRRYVPDLNARVKGKREAAERMAFNMPVQGTAADLMKLAMVRLFPQLREVGARMLLQVHDELLLEAPKERAEEVAALAKEVMEGVWPLAVPLEVEVGIGEDWLAAKG

SEQ ID NO: 5289 - DNA, 2523 bp, synthetic construct
  misc_feature 1..2523: note = Variant of DNA polymerase I from Thermus sp. strain 2.9
  source 1..2523: mol_type = other DNA
atgcaccatcatcatcatcatggcggtagcggcgtgttaccggtgttcgagcctaaaggtcgcgtgcttctggttgatggccatcatctcgcgtatcgtaacttctttgccctgaaaggattaaccaccagcctgggcgagccggtacagggtgtctacggctttgcaaagtcgctcctgaaagctctgaaagaagacggtgatgtggtgattgttgtctttgatgcgaaagcgccaagttttcgccacgaagcgtacgaagcttacaaagccgggcgtgctccaacgccggaagactttcctcgccaattggcgcttatgaaggaattagtggatttgcttggcctcgaacgcttggaagttcccggtttcgaggcagacgacgtattagcgactctcgcaaagaaagccgaacgtgagggctatgaagtccagatcttgacagcagatcgcgatcttttccagcttttatctccgcgcatctcggtgttacacccggaagggcatcgtatcaccccggaatggctctgggagaaatatggtttgcgtcccgaacaatgggtggattttcgcgccttagcaggcgatccgagcgacaatattccgggagttaaaggtatcggcgagaagacggcgctcaagctccttaaagaatgggggtcgttggagaacttgcttaagaatttagatcaggtcaaaccagagtcagtgcgtgagaagattcttgctcacctcgaagacctcaaattaagccgcgaattgtcccgtgtacgcaccgatttgccgctcgaagttgatttcggtcgccgccgcgaacctgactgggagggtcttaaagcgtttttagagcgtcttgaatttggttcgctcttgcatgaattcggccttttagaaagcccgttactggccgaagaagcaccttggccaccgcccgagggcgcgtttttaggttaccgtttgagtcgcccggaaccgatgtgggccgaattactggctcttgcagcgtctgcccagggacgtgtgtatcgcgcggaagaccctcatggtgcgctccgcggcctcttcgaagtccgtggactccttgccaaagacttagctgttgttgcattgcgcgaaggtcttgatttacctccgactgatgatccaatgcttcttgcgtacctcttggacccgtcaaacacgacgcccgaaggcgtagcccgtcgttacggcggcgagtggaccgaagatgcagcgaaacgcgcgttattggccgaacgtttgcacgaaaatttattaggacgtttgcaaggcgaggaacgtctcctctggctttacgaagaagtggagaaaccattgagtcgcgtgctcgcgcatatggaagctaccggtgtcaaattagacgtggcgtatttggagaatctcagccttgaagttgctgcccacatgcgccgcttggaggaagaagtattccgtttagcaggccgttcctttcgccttaactctcgcgatcagttagaacgtgtgttgttcgatgaacttggtctccctcctatcggcaagacagagaagaccggtaaacgtagcacttcagcggcggttttagaagctcttcgcgaagtccatcccattgtggacaagatcttgcagtaccgcgaaatggcgaaattgaaaggcacctatattgaccgtcttccggcattagtccacccgaaaacgggacgcctccatacccgcttcaaccaaacagccacggcgaccggtcgtttgtcctcctctgttccaaaccttcagaatattccagtacgtaccccattgggccagaagatccgccgtgcgtttgtagctgaggagggttggcgtttagtggccctcgattatcgtcaaattgaattacgtgtccttgcccatctttctggcgatgagaacctcatccgcgtgtttcaggaaggcaaagacattcacactcaaacggcaagctggatgtttggattatcagctgaagcgatcgatcctttgatgcgtcgtgcagcgaagaccatcaatttcggtgttctctacggtatgagtgcctttcgtttgtcgcaggaattaggcattccctatgaagaagctcaggcgttcattcagaaatactttcaaagctatcccaaagttaaagcatggatcgagaagactctccgtgaaggccgcacacgtggttacgtagagaccttatttggacgtcgccgctatgttcccgatttaaacgctcgcgtgaaaggcaagcgtgaagccgccgaacgcatggcgttcaacatgcctgtacagggcacggcagctgacctcatgaaacttgcaatggtgcgcctttttccacaattgcgtgaagttggtgcccgcatgctcttgcaggtccacgatgaactcttgttagaagcgccaaaagagcgtgcggaagaggtggcagccctcgcgaaagaagttatggaaggcgtgtggcccttagcggtgcctcttgaagtcgaagttggtattggcgaggattggctggctgccaaagga

SEQ ID NO: 5290 - protein, 841 aa, synthetic construct
  REGION 1..841: note = Variant of DNA polymerase I from Thermus sp. strain 2.9
MHHHHHHGGSGVLPVFEPKGRVLLVDGHHLAYRNFFALKGLTTSLGEPVQGVYGFAKSLLKALKEDGDVVIVVFDAKAPSFRHEAYEAYKAGRAPTPEDFPRQLALMKELVDLLGLERLEVPGFEADDVLATLAKKAEREGYEVQILTADRDLFQLLSPRISVLHPEGHRITPEWLWEKYGLRPEQWVDFRALAGDPSDNIPGVKGIGEKTALKLLKEWGSLENLLKNLDQVKPESVREKILAHLEDLKLSRELSRVRTDLPLEVDFGRRREPDWEGLKAFLERLEFGSLLHEFGLLESPLLAEEAPWPPPEGAFLGYRLSRPEPMWAELLALAASAQGRVYRAEDPHGALRGLFEVRGLLAKDLAVVALREGLDLPPTDDPMLLAYLLDPSNTTPEGVARRYGGEWTEDAAKRALLAERLHENLLGRLQGEERLLWLYEEVEKPLSRVLAHMEATGVKLDVAYLENLSLEVAAHMRRLEEEVFRLAGRSFRLNSRDQLERVLFDELGLPPIGKTEKTGKRSTSAAVLEALREVHPIVDKILQYREMAKLKGTYIDRLPALVHPKTGRLHTRFNQTATATGRLSSSVPNLQNIPVRTPLGQKIRRAFVAEEGWRLVALDYRQIELRVLAHLSGDENLIRVFQEGKDIHTQTASWMFGLSAEAIDPLMRRAAKTINFGVLYGMSAFRLSQELGIPYEEAQAFIQKYFQSYPKVKAWIEKTLREGRTRGYVETLFGRRRYVPDLNARVKGKREAAERMAFNMPVQGTAADLMKLAMVRLFPQLREVGARMLLQVHDELLLEAPKERAEEVAALAKEVMEGVWPLAVPLEVEVGIGEDWLAAKG

SEQ ID NO: 5291 - DNA, 2523 bp, synthetic construct
  misc_feature 1..2523: note = Variant of DNA polymerase I from Thermus sp. strain 2.9
  source 1..2523: mol_type = other DNA
atgcaccatcatcatcatcatggcggtagcggcgtgttaccggtgttcgagcctaaaggtcgcgtgcttctggttgatggccatcatctcgcgtatcgtaacttctttgccctgaaaggattaaccaccagcctgggcgagccggtacagggtgtctacggctttgcaaagtcgctcctgaaagctctgaaagaagacggtgatgtggtgattgttgtctttgatgcgaaagcgccaagttttcgccacgaagcgtacgaagcttacaaagccgggcgtgctccaacgccggaagactttcctcgccaattggcgcttatgaaggaattagtggatttgcttggcctcgaacgcttggaagttcccggtttcgaggcagacgacgtattagcgactctcgcaaagaaagccgaacgtgagggctatgaagtccagatcttgacagcagatcgcgatcttttccagcttttatctccgcgcatctcggtgttacacccggaagggcatcgtatcaccccggaatggctctgggagaaatatggtttgcgtcccgaacaatgggtggattttcgcgccttagcaggcgatccgagcgacaatattccgggagttaaaggtatcggcgagaagacggcgctcaagctccttaaagaatgggggtcgttggagaacttgcttaagaatttagatcaggtcaaaccagagtcagtgcgtgagaagattcttgctcacctcgaagacctcaaattaagccgcgaattgtcccgtgtacgcaccgatttgccgctcgaagttgatttcggtcgccgccgcgaacctgactgggagggtcttaaagcgtttttagagcgtcttgaatttggttcgctcttgcatgaattcggccttttagaaagcccgttactggccgaagaagcaccttggccaccgcccgagggcgcgtttttaggttaccgtttgagtcgcccggaaccgatgtgggccgaattactggctcttgcagcgtctgcccagggacgtgtgtatcgcgcggaagaccctcatggtgcgctccgcggcctcttcgaagtccgtggactccttgccaaagacttagctgttgttgcattgcgcgaaggtcttgatttacctccgactgatgatccaatgcttcttgcgtacctcttggacccgtcaaacacgacgcccgaaggcgtagcccgtcgttacggcggcgagtggaccgaagatgcagcgaaacgcgcgttattggccgaacgtttgcacgaaaatttattaggacgtttgcaaggcgaggaacgtctcctctggctttacgaagaagtggagaaaccattgagtcgcgtgctcgcgcatatggaagctaccggtgtcaaattagacgtggcgtatttggagaatctcagccttgaagttgctgcccacatgcgccgcttggaggaagaagtattccgtttagcaggccgttcctttcgccttaactctcgcgatcagttagaacgtgtgttgttcgatgaacttggtctccctcctatcggcaagacagagaagaccggtaaacgtagcacttcagcggcggttttagaagctcttcgcgaagtccatcccattgtggacaagatcttgcagtaccgcgaaatggcgaaattgaaaggcacctatattgaccgtcttccggcattagtccacccgaaaacgggacgcctccatacccgcttcaaccaaacagccacggcgaccggtcgtttgtcctcctctgatccaaaccttcagaatattccagtacgtaccccattgggccagaagatccgccgtgcgtttgtagctgaggagggttggcgtttagtggccctcgattatcgtcaaattgaattacgtgtccttgcccatctttctggcgatgagaacctcatccgcgtgtttcaggaaggcaaagacattcacactcaaacggcaagctggatgtttggattatcagctgaagcgatcgatcctttgatgcgtcgtgcagcgaagaccatcaatttcggtgttctctacggtatgagtgcctttcgtttgtcgcaggaattaggcattccctatgaagaagctcaggcgttcattcagaaatactttcaaagctatcccaaagttaaagcatggatcgagaagactctccgtgaaggccgcacacgtggttacgtagagaccttatttggacgtcgccgctatgttcccgatttaaacgctcgcgtgaaaggcaagcgtgaagccgccgaacgcatggcgttcaacatgcctgtacagggcacggcaacggacctcatgaaacttgcaatggtgcgcctttttccacaattgcgtgaagttggtgcccgcatgctcttgcaggtccacgatgaactcttgttagaagcgccaaaagagcgtgcggaagaggtggcagccctcgcgaaagaagttatggaaggcgtgtggcccttagcggtgcctcttgaagtcgaagttggtattggcgaggattggctggctgccaaagga

SEQ ID NO: 5292 - protein, 841 aa, synthetic construct
  REGION 1..841: note = Variant of DNA polymerase I from Thermus sp. strain 2.9
MHHHHHHGGSGVLPVFEPKGRVLLVDGHHLAYRNFFALKGLTTSLGEPVQGVYGFAKSLLKALKEDGDVVIVVFDAKAPSFRHEAYEAYKAGRAPTPEDFPRQLALMKELVDLLGLERLEVPGFEADDVLATLAKKAEREGYEVQILTADRDLFQLLSPRISVLHPEGHRITPEWLWEKYGLRPEQWVDFRALAGDPSDNIPGVKGIGEKTALKLLKEWGSLENLLKNLDQVKPESVREKILAHLEDLKLSRELSRVRTDLPLEVDFGRRREPDWEGLKAFLERLEFGSLLHEFGLLESPLLAEEAPWPPPEGAFLGYRLSRPEPMWAELLALAASAQGRVYRAEDPHGALRGLFEVRGLLAKDLAVVALREGLDLPPTDDPMLLAYLLDPSNTTPEGVARRYGGEWTEDAAKRALLAERLHENLLGRLQGEERLLWLYEEVEKPLSRVLAHMEATGVKLDVAYLENLSLEVAAHMRRLEEEVFRLAGRSFRLNSRDQLERVLFDELGLPPIGKTEKTGKRSTSAAVLEALREVHPIVDKILQYREMAKLKGTYIDRLPALVHPKTGRLHTRFNQTATATGRLSSSDPNLQNIPVRTPLGQKIRRAFVAEEGWRLVALDYRQIELRVLAHLSGDENLIRVFQEGKDIHTQTASWMFGLSAEAIDPLMRRAAKTINFGVLYGMSAFRLSQELGIPYEEAQAFIQKYFQSYPKVKAWIEKTLREGRTRGYVETLFGRRRYVPDLNARVKGKREAAERMAFNMPVQGTATDLMKLAMVRLFPQLREVGARMLLQVHDELLLEAPKERAEEVAALAKEVMEGVWPLAVPLEVEVGIGEDWLAAKG

SEQ ID NO: 5293 - DNA, 2523 bp, synthetic construct
  misc_feature 1..2523: note = Variant of DNA polymerase I from Thermus sp. strain 2.9
  source 1..2523: mol_type = other DNA
atgcaccatcatcatcatcatggcggtagcggcgtgttaccggtgttcgagcctaaaggtcgcgtgcttctggttgatggccatcatctcgcgtatcgtaacttctttgccctgaaaggattaaccaccagcctgggcgagccggtacagggtgtctacggctttgcaaagtcgctcctgaaagctctgaaagaagacggtgatgtggtgattgttgtctttgatgcgaaagcgccaagttttcgccacgaagcgtacgaagcttacaaagccgggcgtgctccaacgccggaagactttcctcgccaattggcgcttatgaaggaattagtggatttgcttggcctcgaacgcttggaagttcccggtttcgaggcagacgacgtattagcgactctcgcaaagaaagccgaacgtgagggctatgaagtccagatcttgacagcagatcgcgatcttttccagcttttatctccgcgcatctcggtgttacacccggaagggcatcgtatcaccccggaatggctctgggagaaatatggtttgcgtcccgaacaatgggtggattttcgcgccttagcaggcgatccgagcgacaatattccgggagttaaaggtatcggcgagaagacggcgctcaagctccttaaagaatgggggtcgttggagaacttgcttaagaatttagatcaggtcaaaccagagtcagtgcgtgagaagattcttgctcacctcgaagacctcaaattaagccgcgaattgtcccgtgtacgcaccgatttgccgctcgaagttgatttcggccgccgccgcgaacctgactgggagggtcttaaagcgtttttagagcgtcttgaatttggttcgctcttgcatgaattcggccttttagaaagcccgttactggccgaagaagcaccttggccaccgcccgagggcgcgtttttaggttaccgtttgagtcgcccggaaccgatgtgggccgaattactggctcttgcagcgtctgcccagggacgtgtgtatcgcgcggaagaccctcatggtgcgctccgcggcctcttcgaagtccgtggactccttgccaaagacttagctgttgttgcattgcgcgaaggtcttgatttacctccgactgatgatccaatgcttcttgcgtacctcttggacccgtcaaacacgacgcccgaaggcgtagcccgtcgttacggcggcgagtggaccgaagatgcagcgaaacgcgcgttattggccgaacgtttgcacgcaaatttattaggacgtttgcaaggcgaggaacgtctcctctggctttacgaagaagtggagaaaccattgagtcgcgtgctcgcgcatatggaagctaccggtgtcaaattagacgtggcgtatttggaggcccttagccttgaagttgctgcccacatgcgccgcttggaggaagaagtattccgtttagcaggccgttcctttcgccttaactctcgcgatcagttagaacgtgtgttgttcgatgaacttggtctccctcctatcggcaagacagagaagaccggtaaacgtagcacttcagcggcggttttagaagctcttcgcgaagtccatcccattgtggacaagatcttgcagtaccgcgaactggcgaaattgaaaggcacctatattgaccctcttccggcattagtccacccgaaaacgggacgcctccatacccgcttcaaccaaacagccacggcgaccggtcgtttgtcctcctctgatccaaaccttcagaatattccagtacgtaccccattgggccagaagatccgccgtgcgtttgtagctgaggagggttggcgtttagtggccctcgattatagtcaaattgaattacgtgtccttgcccatctttctggcgatgagaacctcatccgcgtgtttcaggaaggcaaagacattcacactcaaacggcaagctggatgtttggattatcagctgaagcgatcgatcctttgatgcgtcgtgcagcgaagaccatcaatttcggtgttctctacggtatgagtgcctttcgtttgtcgcaggaattaggcattccctatgaagaagctgcagcgttcattcagaaatactttcaaagctatcccaaagttaaagcatggatcgagaagactctcgaggaaggccgcacacgtggttacgtagagaccttatttggacgtcgccgctatgttcccgatttaaacgctcgcgtgaaaggcaaacgtgaagccgccgaacgcatggcgttcaacatgcctgtacagggcacggcagctgacctcatgaaacttgcaatggtgcgcctttttccacaattgcgtgaagttggtgcccgcatgctcttgcaggtccacgatgaactcttgttagaagcgccaaaagagcgtgcggaagaggtggcagccctcgcgaaagaagttatggaaggcgtgtggcccttagcggtgcctcttgaagtcgaagttggtattggcgaggattggctggctgccaaagga

SEQ ID NO: 5294 - protein, 841 aa, synthetic construct
  REGION 1..841: note = Variant of DNA polymerase I from Thermus sp. strain 2.9
MHHHHHHGGSGVLPVFEPKGRVLLVDGHHLAYRNFFALKGLTTSLGEPVQGVYGFAKSLLKALKEDGDVVIVVFDAKAPSFRHEAYEAYKAGRAPTPEDFPRQLALMKELVDLLGLERLEVPGFEADDVLATLAKKAEREGYEVQILTADRDLFQLLSPRISVLHPEGHRITPEWLWEKYGLRPEQWVDFRALAGDPSDNIPGVKGIGEKTALKLLKEWGSLENLLKNLDQVKPESVREKILAHLEDLKLSRELSRVRTDLPLEVDFGRRREPDWEGLKAFLERLEFGSLLHEFGLLESPLLAEEAPWPPPEGAFLGYRLSRPEPMWAELLALAASAQGRVYRAEDPHGALRGLFEVRGLLAKDLAVVALREGLDLPPTDDPMLLAYLLDPSNTTPEGVARRYGGEWTEDAAKRALLAERLHANLLGRLQGEERLLWLYEEVEKPLSRVLAHMEATGVKLDVAYLEALSLEVAAHMRRLEEEVFRLAGRSFRLNSRDQLERVLFDELGLPPIGKTEKTGKRSTSAAVLEALREVHPIVDKILQYRELAKLKGTYIDPLPALVHPKTGRLHTRFNQTATATGRLSSSDPNLQNIPVRTPLGQKIRRAFVAEEGWRLVALDYSQIELRVLAHLSGDENLIRVFQEGKDIHTQTASWMFGLSAEAIDPLMRRAAKTINFGVLYGMSAFRLSQELGIPYEEAAAFIQKYFQSYPKVKAWIEKTLEEGRTRGYVETLFGRRRYVPDLNARVKGKREAAERMAFNMPVQGTAADLMKLAMVRLFPQLREVGARMLLQVHDELLLEAPKERAEEVAALAKEVMEGVWPLAVPLEVEVGIGEDWLAAKG

SEQ ID NO: 5295 - DNA, 2523 bp, synthetic construct
  misc_feature 1..2523: note = Variant of DNA polymerase I from Thermus sp. strain 2.9
  source 1..2523: mol_type = other DNA
atgcaccatcatcatcatcatggcggtagcggcgtgttaccggtgttcgagcctaaaggtcgcgtgcttctggttgatggccatcatctcgcgtatcgtaacttctttgccctgaaaggattaaccaccagcctgggcgagccggtacagggtgtctacggctttgcaaagtcgctcctgaaagctctgaaagaagacggtgatgtggtgattgttgtctttgatgcgaaagcgccaagttttcgccacgaagcgtacgaagcttacaaagccgggcgtgctccaacgccggaagactttcctcgccaattggcgcttatgaaggaattagtggatttgcttggcctcgaacgcttggaagttcccggtttcgaggcagacgacgtattagcgactctcgcaaagaaagccgaacgtgagggctatgaagtccagatcttgacagcagatcgcgatcttttccagcttttatctccgcgcatctcggtgttacacccggaagggcatcgtatcaccccggaatggctctgggagaaatatggtttgcgtcccgaacaatgggtggattttcgcgccttagcaggcgatccgagcgacaatattccgggagttaaaggtatcggcgagaagacggcgctcaagctccttaaagaatgggggtcgttggagaacttgcttaagaatttagatcaggtcaaaccagagtcagtgcgtgagaagattcttgctcacctcgaagacctcaaattaagccgcgaattgtcccgtgtacgcaccgatttgccgctcgaagttgatttcggtcgccgccgcgaacctgactgggagggtcttaaagcgtttttagagcgtcttgaatttggttcgctcttgcatgaattcggccttttagaaagcccgttactggccgaagaagcaccttggccaccgcccgagggcgcgtttttaggttaccgtttgagtcgcccggaaccgatgtgggccgaattactggctcttgcagcgtctgcccagggacgtgtgtatcgcgcggaagaccctcatggtgcgctccgcggcctcttcgaagtccgtggactccttgccaaagacttagctgttgttgcattgcgcgaaggtcttgatttacctccgactgatgatccaatgcttcttgcgtacctcttggacccgtcaaacacgacgcccgaaggcgtagcccgtcgttacggcggcgagtggaccgaagatgcagcgaaacgcgcgttattggccgaacgtttgcacgcaaatttattaggacgtttgcaaggcgaggaacgtctcctctggctttacgaagaagtggagaaaccattgagtcgcgtgctcgcgcatatggaagctaccggtgtcaaattagacgtggcgtatttggagaatcttcaccttgaagttgctgcccacatgcgccgcttggaggaagaagtattccgtttagcaggccgctcctttcgccttaactctcgcgatcagttagaacgtgtgttgttcgatgaacttggtctccctcctatcggcaagacagagaagaccggtaaacgtagcacttcagcggcggttttagaagctcttcgcgaagtccatcccattgtggacaagatcttgcagtaccgcgaactggcgaaattgaaaggcacctatattgaccctcttccggcattagtccacccgaaaacgggacgcctccatacccgcttcaaccaaacagccacggcgaccggtcgtttgtccagttctgatccaaaccttcagaatattccagtacgtaccccattgggccagaagatccgccgtgcgtttgtagctgaggagggttggcgtttagtggccctcgattatagtcaaattgaattacgtgtccttgcccatctttctggcgatgagaacctcatccgcgtgtttcaggaaggcaaagacattcacactcaaacggcaagctggatgtttggattatcagctgaagcgatcgatcctttgatgcgtcgtgcagcgaagaccatcaatttcggtgttctctacggtatgagtgcctttcgtttgtcgcaggaattaggcattccctatgaagaagctcaggcgttcattcagaaatactttcaaagctatcccaaagttaaagcatggatcgagaagactctccgtgaaggccgcacacgtggttacgtagagaccttatttggacgtcgccgctatgttcccgatttaaacgctcgcgtgaaaggcgtacgtgaagccgccgaacgcatggcgttcaacatgcctgtacagggcacggcagctgacctcatgaaacttgcaatggtgcgcctttttccacaattgcgtgaagttggtgcccgcatgctcttgcaggtccacgatgaactcttgttagaagcgccaaaagagcgtgcggaagaggtggcagccctcgcgaaagaagttatggaaggcgtgtggcccttagcggtgcctcttgaagtcgaagttggtattggcgaggattggctggctgccaaagga

SEQ ID NO: 5296 - protein, 841 aa, synthetic construct
  REGION 1..841: note = Variant of DNA polymerase I from Thermus sp. strain 2.9
MHHHHHHGGSGVLPVFEPKGRVLLVDGHHLAYRNFFALKGLTTSLGEPVQGVYGFAKSLLKALKEDGDVVIVVFDAKAPSFRHEAYEAYKAGRAPTPEDFPRQLALMKELVDLLGLERLEVPGFEADDVLATLAKKAEREGYEVQILTADRDLFQLLSPRISVLHPEGHRITPEWLWEKYGLRPEQWVDFRALAGDPSDNIPGVKGIGEKTALKLLKEWGSLENLLKNLDQVKPESVREKILAHLEDLKLSRELSRVRTDLPLEVDFGRRREPDWEGLKAFLERLEFGSLLHEFGLLESPLLAEEAPWPPPEGAFLGYRLSRPEPMWAELLALAASAQGRVYRAEDPHGALRGLFEVRGLLAKDLAVVALREGLDLPPTDDPMLLAYLLDPSNTTPEGVARRYGGEWTEDAAKRALLAERLHANLLGRLQGEERLLWLYEEVEKPLSRVLAHMEATGVKLDVAYLENLHLEVAAHMRRLEEEVFRLAGRSFRLNSRDQLERVLFDELGLPPIGKTEKTGKRSTSAAVLEALREVHPIVDKILQYRELAKLKGTYIDPLPALVHPKTGRLHTRFNQTATATGRLSSSDPNLQNIPVRTPLGQKIRRAFVAEEGWRLVALDYSQIELRVLAHLSGDENLIRVFQEGKDIHTQTASWMFGLSAEAIDPLMRRAAKTINFGVLYGMSAFRLSQELGIPYEEAQAFIQKYFQSYPKVKAWIEKTLREGRTRGYVETLFGRRRYVPDLNARVKGVREAAERMAFNMPVQGTAADLMKLAMVRLFPQLREVGARMLLQVHDELLLEAPKERAEEVAALAKEVMEGVWPLAVPLEVEVGIGEDWLAAKG

SEQ ID NO: 5297 - DNA, 2523 bp, synthetic construct
  misc_feature 1..2523: note = Variant of DNA polymerase I from Thermus sp. strain 2.9
  source 1..2523: mol_type = other DNA
atgcaccatcatcatcatcatggcggtagcggcgtgttaccggtgttcgagcctaaaggtcgcgtgcttctggttgatggccatcatctcgcgtatcgtaacttctttgccctgaaaggattaaccaccagcctgggcgagccggtacagggtgtctacggctttgcaaagtcgctcctgaaagctctgaaagaagacggtgatgtggtgattgttgtctttgatgcgaaagcgccaagttttcgccacgaagcgtacgaagcttacaaagccgggcgtgctccaacgccggaagactttcctcgccaattggcgcttatgaaggaattagtggatttgcttggcctcgaacgcttggaagttcccggtttcgaggcagacgacgtattagcgactctcgcaaagaaagccgaacgtgagggctatgaagtccagatcttgacagcagatcgcgatcttttccagcttttatctccgcgcatctcggtgttacacccggaagggcatcgtatcaccccggaatggctctgggagaaatatggtttgcgtcccgaacaatgggtggattttcgcgccttagcaggcgatccgagcgacaatattccgggagttaaaggtatcggcgagaagacggcgctcaagctccttaaagaatgggggtcgttggagaacttgcttaagaatttagatcaggtcaaaccagagtcagtgcgtgagaagattcttgctcacctcgaagacctcaaattaagccgcgaattgtcccgtgtacgcaccgatttgccgctcgaagttgatttcggtcgccgccgcgaacctgactgggagggtcttaaagcgtttttagagcgtcttgaatttggttcgctcttgcatgaattcggccttttagaaagcccgttactggccgaagaagcaccttggccaccgcccgagggcgcgtttttaggttaccgtttgagtcgcccggaaccgatgtgggccgaattactggctcttgcagcgtctgcccagggacgtgtgtatcgcgcggaagaccctcatggtgcgctccgcggcctcttcgaagtccgtggactccttgccaaagacttagctgttgttgcattgcgcgaaggtcttgatttacctccgactgatgatccaatgcttcttgcgtacctcttggacccgtcaaacacgacgcccgaaggcgtagcccgtcgttacggcggcgagtggaccgaagatgcagcgaaacgcgcgttattggccgaacgtttgcacgaaaatttattaggacgtttgcaaggcgaggaacgtctcctctggctttacgaagaagtggagaaaccattgagtcgcgtgctcgcgcatatggaagctaccggtgtcaaattagacgtggcgtatttggagaatctcagccttgaagttgctgcccacatgcgccgcttggaggaagaagtattccgtttagcaggccgttcctttcgccttaactctcgcgatcagttagaacgtgtgttgttcgatgaacttggtctccctcctatcggcaagacagagaagaccggtaaacgtagcacttcagcggcggttttagaagctcttcgcgaagtccatcccattgtggacaagatcttgcagtaccgcgaaatggcgaaattgaaaggcacctatattgaccgtcttccggcattagtccacccgaaaacgggacgcctccatacccgcttcaaccaaacagccacggcgaccggtcgtttggtgtcctctgatccaaaccttcagaatattccagtacgtaccccattgggccagaagatccgccgtgcgtttgtagctgaggagggttggcgtttagtggccctcgattatcgtcaaattgaattacgtgtccttgcccatctttctggcgatgagaacctcatccgcgtgtttcaggaaggcaaagacattcacactcaaacggcaagctggatgtttggattatcagctgaagcgatcgatcctttgatgcgtcgtgcagcgaagaccatcaatttcggtgttctctacggtatgagtgcctttcgtttgtcgcaggaattaggcattccctatgaagaagctcaggcgttcattcagaaatactttcaaagctatcccaaagttaaagcatggatcgagaagactctccgtgaaggccgcacacgtggttacgtagagaccttatttggacgtcgccgctatgttcccgatttaaacgctcgcgtgaaaggcaagcgtgaagccgccgaacgcatggcgttcaacatgcctgtacagggcacggcagctgacctcatgaaacttgcaatggtgcgcctttttccacaattgcgtgaagttggtgcccgcatgctcttgcaggtccacgatgaactcttgttagaagcgccaaaagagcgtgcggaagaggtggcagccctcgcgaaagaagttatggaaggcgtgtggcccttagcggtgcctcttgaagtcgaagttggtattggcgaggattggctggctgccaaagga

SEQ ID NO: 5298 - protein, 841 aa, synthetic construct
  REGION 1..841: note = Variant of DNA polymerase I from Thermus sp. strain 2.9
MHHHHHHGGSGVLPVFEPKGRVLLVDGHHLAYRNFFALKGLTTSLGEPVQGVYGFAKSLLKALKEDGDVVIVVFDAKAPSFRHEAYEAYKAGRAPTPEDFPRQLALMKELVDLLGLERLEVPGFEADDVLATLAKKAEREGYEVQILTADRDLFQLLSPRISVLHPEGHRITPEWLWEKYGLRPEQWVDFRALAGDPSDNIPGVKGIGEKTALKLLKEWGSLENLLKNLDQVKPESVREKILAHLEDLKLSRELSRVRTDLPLEVDFGRRREPDWEGLKAFLERLEFGSLLHEFGLLESPLLAEEAPWPPPEGAFLGYRLSRPEPMWAELLALAASAQGRVYRAEDPHGALRGLFEVRGLLAKDLAVVALREGLDLPPTDDPMLLAYLLDPSNTTPEGVARRYGGEWTEDAAKRALLAERLHENLLGRLQGEERLLWLYEEVEKPLSRVLAHMEATGVKLDVAYLENLSLEVAAHMRRLEEEVFRLAGRSFRLNSRDQLERVLFDELGLPPIGKTEKTGKRSTSAAVLEALREVHPIVDKILQYREMAKLKGTYIDRLPALVHPKTGRLHTRFNQTATATGRLVSSDPNLQNIPVRTPLGQKIRRAFVAEEGWRLVALDYRQIELRVLAHLSGDENLIRVFQEGKDIHTQTASWMFGLSAEAIDPLMRRAAKTINFGVLYGMSAFRLSQELGIPYEEAQAFIQKYFQSYPKVKAWIEKTLREGRTRGYVETLFGRRRYVPDLNARVKGKREAAERMAFNMPVQGTAADLMKLAMVRLFPQLREVGARMLLQVHDELLLEAPKERAEEVAALAKEVMEGVWPLAVPLEVEVGIGEDWLAAKG

SEQ ID NO: 5299 - DNA, 2523 bp, synthetic construct
  misc_feature 1..2523: note = Variant of DNA polymerase I from Thermus sp. strain 2.9
  source 1..2523: mol_type = other DNA
atgcaccatcatcatcatcatggcggtagcggcgtgttaccggtgttcgagcctaaaggtcgcgtgcttctggttgatggccatcatctcgcgtatcgtaacttctttgccctgaaaggattaaccaccagcctgggcgagccggtacagggtgtctacggctttgcaaagtcgctcctgaaagctctgaaagaagacggtgatgtggtgattgttgtctttgatgcgaaagcgccaagttttcgccacgaagcgtacgaagcttacaaagccgggcgtgctccaacgccggaagactttcctcgccaattggcgcttatgaaggaattagtggatttgcttggcctcgaacgcttggaagttcccggtttcgaggcagacgacgtattagcgactctcgcaaagaaagccgaacgtgagggctatgaagtccagatcttgacagcagatcgcgatcttttccagcttttatctccgcgcatctcggtgttacacccggaagggcatcgtatcaccccggaatggctctgggagaaatatggtttgcgtcccgaacaatgggtggattttcgcgccttagcaggcgatccgagcgacaatattccgggagttaaaggtatcggcgagaagacggcgctcaagctccttaaagaatgggggtcgttggagaacttgcttaagaatttagatcaggtcaaaccagagtcagtgcgtgagaagattcttgctcacctcgaagacctcaaattaagccgcgaattgtcccgtgtacgcaccgatttgccgctcgaagttgatttcggtcgccgccgcgaacctgactgggagggtcttaaagcgtttttagagcgtcttgaatttggttcgctcttgcatgaattcggccttttagaaagcccgttactggccgaagaagcaccttggccaccgcccgagggcgcgtttttaggttaccgtttgagtcgcccggaaccgatgtgggccgaattactggctcttgcagcgtctgcccagggacgtgtgtatcgcgcggaagaccctcatggtgcgctccgcggcctcttcgaagtccgtggactccttgccaaagacttagctgttgttgcattgcgcgaaggtcttgatttacctccgactgatgatccaatgcttcttgcgtacctcttggacccgtcaaacacgacgcccgaaggcgtagcccgtcgttacggcggcgagtggaccgaagatgcagcgaaacgcgcgttattggccgaacgtttgcacgaaaatttattaggacgtttgcaaggcgaggaacgtctcctctggctttacgaagaagtggagaaaccattgagtcgcgtgctcgcgcatatggaagctaccggtgtcaaattagacgtggcgtatttggagaatctcagccttgaagttgctgcccacatgcgccgcttggaggaagaagtattccgtttagcaggccgttcctttcgccttaactctcgcgatcagttagaacgtgtgttgttcgatgaaaagggtctccctcctatcggcaagacagagaagaccggtaaacgtagcacttcagcggcggttttagaagctcttcgcgaagtccatcccattgtggacaagatcttgcagtaccgcgaaatggcgaaattgaaaggcacctatattgaccgtcttccggcattagtccacccgaaaacgggacgcctccatacccgcttcaaccaaacagccacggcgaccggtcgtttgtcctcctctgatccaaaccttcagaatattccagtacgtaccccattgggccagaagatccgccgtgcgtttgtagctgaggagggttggcgtttagtggccctcgattatcgtcaaattgaattacgtgtccttgcccatctttctggcgatgagaacctcatccgcgtgtttcaggaaggcaaagacattcacactcaaacggcaagctggatgtttggattatcagctgaagcgatcgatcctttgatgcgtcgtgcagcgaagaccatcaatttcggtgttctctacggtatgagtgcctttcgtttgtcgcaggaattaggcattccctatgaagaagctcaggcgttcattcagaaatactttcaaagctatcccaaagttaaagcatggatcgagaagactctccgtgaaggccgcacacgtggttacgtagagaccttatttggacgtcgccgctatgttcccgatttaaacgctcgcgtgaaaggcaagcgtgaagccgccgaacgcatggcgttcaacatgcctgtacagggcacggcagctgacctcatgaaacttgcaatggtgcgcctttttccacaattgcgtgaagttggtgcccgcatgctcttgcaggtccacgatgaactcttgttagaagcgccaaaagagcgtgcggaagaggtggcagccctcgcgaaagaagttatggaaggcgtgtggcccttagcggtgcctcttgaagtcgaagttggtattggcgaggattggctggctgccaaagga

SEQ ID NO: 5300 - protein, 841 aa, synthetic construct
  REGION 1..841: note = Variant of DNA polymerase I from Thermus sp. strain 2.9
MHHHHHHGGSGVLPVFEPKGRVLLVDGHHLAYRNFFALKGLTTSLGEPVQGVYGFAKSLLKALKEDGDVVIVVFDAKAPSFRHEAYEAYKAGRAPTPEDFPRQLALMKELVDLLGLERLEVPGFEADDVLATLAKKAEREGYEVQILTADRDLFQLLSPRISVLHPEGHRITPEWLWEKYGLRPEQWVDFRALAGDPSDNIPGVKGIGEKTALKLLKEWGSLENLLKNLDQVKPESVREKILAHLEDLKLSRELSRVRTDLPLEVDFGRRREPDWEGLKAFLERLEFGSLLHEFGLLESPLLAEEAPWPPPEGAFLGYRLSRPEPMWAELLALAASAQGRVYRAEDPHGALRGLFEVRGLLAKDLAVVALREGLDLPPTDDPMLLAYLLDPSNTTPEGVARRYGGEWTEDAAKRALLAERLHENLLGRLQGEERLLWLYEEVEKPLSRVLAHMEATGVKLDVAYLENLSLEVAAHMRRLEEEVFRLAGRSFRLNSRDQLERVLFDEKGLPPIGKTEKTGKRSTSAAVLEALREVHPIVDKILQYREMAKLKGTYIDRLPALVHPKTGRLHTRFNQTATATGRLSSSDPNLQNIPVRTPLGQKIRRAFVAEEGWRLVALDYRQIELRVLAHLSGDENLIRVFQEGKDIHTQTASWMFGLSAEAIDPLMRRAAKTINFGVLYGMSAFRLSQELGIPYEEAQAFIQKYFQSYPKVKAWIEKTLREGRTRGYVETLFGRRRYVPDLNARVKGKREAAERMAFNMPVQGTAADLMKLAMVRLFPQLREVGARMLLQVHDELLLEAPKERAEEVAALAKEVMEGVWPLAVPLEVEVGIGEDWLAAKG

SEQ ID NO: 5301 - DNA, 2523 bp, synthetic construct
  misc_feature 1..2523: note = Variant of DNA polymerase I from Thermus sp. strain 2.9
  source 1..2523: mol_type = other DNA
atgcaccatcatcatcatcatggcggtagcggcgtgttaccggtgttcgagcctaaaggtcgcgtgcttctggttgatggccatcatctcgcgtatcgtaacttctttgccctgaaaggattaaccaccagccgcggcgagccggtacagggtgtctacggctttgcaaagtcgctcctgaaagctctgaaagaagacggtgatgtggtgattgttgtctttgatgcgaaagcgccaagttttcgccacgaagcgtacgaagcttacaaagccgggcgtgctccaacgccggaagactttcctcgccaattggcgcttatgaaggaattagtggatttgcttggcctcgaacgcttggaagttcccggtttcgaggcagacgacgtattagcgactctcgcaaagaaagccgaacgtgagggctatgaagtccagatcttgacagcagatcgcgatcttttccagcttttatctccgcgcatctcggtgttacacccggaagggcatcgtatcaccccggaatggctctgggagaaatatggtttgcgtcccgaacaatgggtggattttcgcgccttagcaggcgatccgagcgacaatattccgggagttaaaggtatcggcgagaagacggcgctcaagctccttaaagaatgggggtcgttggagaacttgcttaagaatttagatcaggtcaaaccagagtcagtgcgtgagaagattcttgctcacctcgaagacctcaaattaagccgcgaattgtcccgtgtacgcaccgatttgccgctcgaagttgatttcggccgccgccgcgaacctgactgggagggtcttaaagcgtttttagagcgtcttgaatttggttcgctcttgcatgaattcggccttttagaaagcccgttactggccgaagaagcaccttggccaccgcccgagggcgcgtttttaggttaccgtttgagtcgcccggaaccgatgtgggccgaattactggctcttgcagcgtctgcccagggacgtgtgtatcgcgcggaagaccctcatggtgcgctccgcggcctcttcgaagtccgtggactccttgccaaagacttagctgttgttgcattgcgcgaaggtcttgatttacctccgactgatgatccaatgcttcttgcgtacctcttggacccgtcaaacacgacgcccgaaggcgtagcccgtcgttacggcggcgagtggaccgaagatgcagcgaaacgcgcgttattggccgaacgtttgcacgaaaatttattaggacgtttgcaaggcgaggaacgtctcctctggctttacgaagaagtggagaaaccattgagtcgcgtgctcgcgcatatggaagctaccggtgtcaaattagacgtggcgtatttggagaatcttcaccttgaagttgctgcccacatgcgccgcttggaggaagaagtattccgtttagcaggccgctcctttcgccttaactctcgcgatcagttagaacgtgtgttgttcgatgaacttggtctccctcctatcggcaagacagagaagaccggtaaacgtagcacttcagcggcggttttagaagctcttcgcgaagtccatcccattgtggacaagatcttgcagtaccgcgaaatggcgaaattgaaaggcacctatattgaccgtcttccggcattagtccacccgaaaacgggacgcctccatacccgcttcaaccaaacagccacggcgaccggtcgtttgtccagttctgatccaaaccttcagaatattccagtacgtaccccattgggccagaagatccgccgtgcgtttgtagctgaggagggttggcgtttagtggccctcgattatcgtcaaattgaattacgtgtccttgcccatctttctggcgatgagaacctcatccgcgtgtttcaggaaggcaaagacattcacactcaaacggcaagctggatgtttggattatcagctgaagcgatcgatcctttgatgcgtcgtgcagcgaagaccatcaatttcggtgttctctacggtatgagtgcctttcgtttgtcgcaggaattaggcattccctatgaagaagctcaggcgttcattcagaaatactttcaaagctatcccaaagttaaagcatggatcgagaagactctccgcgaaggccgcacacgtggttacgtagagaccttatttggacgtcgccgctatgttcccgatttaaacgctcgcgtgaaaggcgtacgtgaagccgccgaacgcatggcgttcaacatgcctgtacagggcacggcagctgacctcatgaaacttgcaatggtgcgcctttttccacaattgcgtgaagttggtgcccgcatgctcttgcaggtccacgatgaactcttgttagaagcgccaaaagagcgtgcggaagaggtggcagccctcgcgaaagaagttatggaaggcgtgtggcccttagcggtgcctcttgaagtcgaagttggtattggcgaggattggctggctgccaaagga

SEQ ID NO: 5302 - protein, 841 aa, synthetic construct
  REGION 1..841: note = Variant of DNA polymerase I from Thermus sp. strain 2.9
MHHHHHHGGSGVLPVFEPKGRVLLVDGHHLAYRNFFALKGLTTSRGEPVQGVYGFAKSLLKALKEDGDVVIVVFDAKAPSFRHEAYEAYKAGRAPTPEDFPRQLALMKELVDLLGLERLEVPGFEADDVLATLAKKAEREGYEVQILTADRDLFQLLSPRISVLHPEGHRITPEWLWEKYGLRPEQWVDFRALAGDPSDNIPGVKGIGEKTALKLLKEWGSLENLLKNLDQVKPESVREKILAHLEDLKLSRELSRVRTDLPLEVDFGRRREPDWEGLKAFLERLEFGSLLHEFGLLESPLLAEEAPWPPPEGAFLGYRLSRPEPMWAELLALAASAQGRVYRAEDPHGALRGLFEVRGLLAKDLAVVALREGLDLPPTDDPMLLAYLLDPSNTTPEGVARRYGGEWTEDAAKRALLAERLHENLLGRLQGEERLLWLYEEVEKPLSRVLAHMEATGVKLDVAYLENLHLEVAAHMRRLEEEVFRLAGRSFRLNSRDQLERVLFDELGLPPIGKTEKTGKRSTSAAVLEALREVHPIVDKILQYREMAKLKGTYIDRLPALVHPKTGRLHTRFNQTATATGRLSSSDPNLQNIPVRTPLGQKIRRAFVAEEGWRLVALDYRQIELRVLAHLSGDENLIRVFQEGKDIHTQTASWMFGLSAEAIDPLMRRAAKTINFGVLYGMSAFRLSQELGIPYEEAQAFIQKYFQSYPKVKAWIEKTLREGRTRGYVETLFGRRRYVPDLNARVKGVREAAERMAFNMPVQGTAADLMKLAMVRLFPQLREVGARMLLQVHDELLLEAPKERAEEVAALAKEVMEGVWPLAVPLEVEVGIGEDWLAAKG

SEQ ID NO: 5303 - DNA, 2523 bp, synthetic construct
  misc_feature 1..2523: note = Variant of DNA polymerase I from Thermus sp. strain 2.9
  source 1..2523: mol_type = other DNA
atgcaccatcatcatcatcatggcggtagcggcgtgttaccggtgttcgagcctaaaggtcgcgtgcttctggttgatggccatcatctcgcgtatcgtaacttctttgccctgaaaggattaaccaccagcctgggcgagccggtacagggtgtctacggctttgcaaagtcgctcctgaaagctctgaaagaagacggtgatgtggtgattgttgtctttgatgcgaaagcgccaagttttcgccacgaagcgtacgaagcttacaaagccgggcgtgctccaacgccggaagactttcctcgccaattggcgcttatgaaggaattagtggatttgcttggcctcgaacgcttggaagttcccggtttcgaggcagacgacgtattagcgactctcgcaaagaaagccgaacgtgagggctatgaagtccagatcttgacagcagatcgcgatcttttccagcttttatctccgcgcatctcggtgttacacccggaagggcatcgtatcaccccggaatggctctgggagaaatatggtttgcgtcccgaacaatgggtggattttcgcgccttagcaggcgatccgagcgacaatattccgggagttaaaggtatcggcgagaagacggcgctcaagctccttaaagaatgggggtcgttggagaacttgcttaagaatttagatcaggtcaaaccagagtcagtgcgtgagaagattcttgctcacctcgaagacctcaaattaagccgcgaattgtcccgtgtacgcaccgatttgccgctcgaagttgatttcggtcgccgccgcgaacctgactgggagggtcttaaagcgtttttagagcgtcttgaatttggttcgctcttgcatgaattcggccttttagaaagcccgttactggccgaagaagcaccttggccaccgcccgagggcgcgtttttaggttaccgtttgagtcgcccggaaccgatgtgggccgaattactggctcttgcagcgtctgcccagggacgtgtgtatcgcgcggaagaccctcatggtgcgctccgcggcctcttcgaagtccgtggactccttgccaaagacttagctgttgttgcattgcgcgaaggtcttgatttacctccgactgatgatccaatgcttcttgcgtacctcttggacccgtcaaacacgacgcccgaaggcgtagcccgtcgttacggcggcgagtggaccgaagatgcagcgaaacgcgcgttattggccgaacgtttgcacgaaaatttattaggacgtttgcaaggcgaggaacgtctcctctggctttacgaagaagtggagaaaccattgagtcgcgtgctcgcgcatatggaagctaccggtgtcaaattagacgtggcgtatttggagaatctcagccttgaagttgctgcccacatgcgccgcttggaggaagaagtattccgtttagcaggccgttcctttcgccttaactctcgcgatcagttagaacgtgtgttgttcgatgaacttggtctccctcctatcggcaagacagagaagaccggtaaacgtagcacttcagcggcggttttagaagctcttcgcgaagtccatcccattgtggacaagatcttgcagtaccgcgaaatggcgaaattgaaaggcacctatattgaccgtcttccggcattagtccacccgaaaacgggacgcctccatacccgcttcaaccaaacagccacggcgaccggtcgtttgtcctcctctgatccaaaccttcagaatattccagtacgtaccccattgggccagaagatccgccgtgcgtttgtagctgaggagggttggcgtttagtggccctcgattatcgtcaaattgaattacgtgtccttgcccatctttctggcgatgagaacctcatccgcgtgtttcaggaaggcaaagacattcacactcaaacggcaagctggatgtttggattatcagctgaagcgatcgatcctttgatgcgtcgtgcagcgaagaccatcaatttcggtgttctctacggtatgagtgcctttcgtttgtcgcaggaattaggcattccctatgaagaagctcaggcgttcattcagaaatactttcaaagctatcccaaagttaaagcatggatcgagaagactctccgtgaaggccgcacacgtggttacgtagagaccttatttggacgtcgccgctatgttcccgatttaaacgctcgcgtgaaagataagcgtgaagccgccgaacgcatggcgttcaacatgcctgtacagggcacggcagctgacctcatgaaacttgcaatggtgcgcctttttccacaattgcgtgaagttggtgcccgcatgctcttgcaggtccacgatgaactcttgttagaagcgccaaaagagcgtgcggaagaggtggcagccctcgcgaaagaagttatggaaggcgtgtggcccttagcggtgcctcttgaagtcgaagttggtattggcgaggattggctggctgccaaagga

SEQ ID NO: 5304 - protein, 841 aa, synthetic construct
  REGION 1..841: note = Variant of DNA polymerase I from Thermus sp. strain 2.9
MHHHHHHGGSGVLPVFEPKGRVLLVDGHHLAYRNFFALKGLTTSLGEPVQGVYGFAKSLLKALKEDGDVVIVVFDAKAPSFRHEAYEAYKAGRAPTPEDFPRQLALMKELVDLLGLERLEVPGFEADDVLATLAKKAEREGYEVQILTADRDLFQLLSPRISVLHPEGHRITPEWLWEKYGLRPEQWVDFRALAGDPSDNIPGVKGIGEKTALKLLKEWGSLENLLKNLDQVKPESVREKILAHLEDLKLSRELSRVRTDLPLEVDFGRRREPDWEGLKAFLERLEFGSLLHEFGLLESPLLAEEAPWPPPEGAFLGYRLSRPEPMWAELLALAASAQGRVYRAEDPHGALRGLFEVRGLLAKDLAVVALREGLDLPPTDDPMLLAYLLDPSNTTPEGVARRYGGEWTEDAAKRALLAERLHENLLGRLQGEERLLWLYEEVEKPLSRVLAHMEATGVKLDVAYLENLSLEVAAHMRRLEEEVFRLAGRSFRLNSRDQLERVLFDELGLPPIGKTEKTGKRSTSAAVLEALREVHPIVDKILQYREMAKLKGTYIDRLPALVHPKTGRLHTRFNQTATATGRLSSSDPNLQNIPVRTPLGQKIRRAFVAEEGWRLVALDYRQIELRVLAHLSGDENLIRVFQEGKDIHTQTASWMFGLSAEAIDPLMRRAAKTINFGVLYGMSAFRLSQELGIPYEEAQAFIQKYFQSYPKVKAWIEKTLREGRTRGYVETLFGRRRYVPDLNARVKDKREAAERMAFNMPVQGTAADLMKLAMVRLFPQLREVGARMLLQVHDELLLEAPKERAEEVAALAKEVMEGVWPLAVPLEVEVGIGEDWLAAKG

SEQ ID NO: 5305 - DNA, 2523 bp, synthetic construct
  misc_feature 1..2523: note = Variant of DNA polymerase I from Thermus sp. strain 2.9
  source 1..2523: mol_type = other DNA
atgcaccatcatcatcatcatggcggtagcggcgtgttaccggtgttcgagcctaaaggtcgcgtgcttctggttgatggccatcatctcgcgtatcgtaacttctttgccctgaaaggattaaccaccagcctgggcgagccggtacagggtgtctacggctttgcaaagtcgctcctgaaagctctgaaagaagacggtgatgtggtgattgttgtctttgatgcgaaagcgccaagttttcgccacgaagcgtacgaagcttacaaagccgggcgtgctccaacgccggaagactttcctcgccaattggcgcttatgaaggaattagtggatttgcttggcctcgaacgcttggaagttcccggtttcgaggcagacgacgtattagcgactctcgcaaagaaagccgaacgtgagggctatgaagtccagatcttgacagcagatcgcgatcttttccagcttttatctccgcgcatctcggtgttacacccggaagggcatcgtatcaccccggaatggctctgggagaaatatggtttgcgtcccgaacaatgggtggattttcgcgccttagcaggcgatccgagcgacaatattccgggagttaaaggtatcggcgagaagacggcgctcaagctccttaaagaatgggggtcgttggagaacttgcttaagaatttagatcaggtcaaaccagagtcagtgcgtgagaagattcttgctcacctcgaagacctcaaattaagccgcgaattgtcccgtgtacgcaccgatttgccgctcgaagttgatttcggtcgccgccgcgaacctgactgggagggtcttaaagcgtttttagagcgtcttgaatttggttcgctcttgcatgaattcggccttttagaaagcccgttactggccgaagaagcaccttggccaccgcccgagggcgcgtttttaggttaccgtttgagtcgcccggaaccgatgtgggccgaattactggctcttgcagcgtctgcccagggacgtgtgtatcgcgcggaagaccctcatggtgcgctccgcggcctcttcgaagtccgtggactccttgccaaagacttagctgttgttgcattgcgcgaaggtcttgatttacctccgactgatgatccaatgcttcttgcgtacctcttggacccgtcaaacacgacgcccctgggcgtagcccgtcgttacggcggcgagtggaccgaagatgcagcgaaacgcgcgttattggccgaacgtttgcacgaaaatttattaggacgtttgcaaggcgaggaacgtctcctctggctttacgaagaagtggagaaaccattgagtcgcgtgctcgcgcatatggaagctaccggtgtcaaattagacgtggcgtatttggagaatctcagccttgaagttgctgcccacatgcgccgcttggaggaagaagtattccgtttagcaggccgttcctttcgccttaactctcgcgatcagttagaacgtgtgttgttcgatgaacttggtctccctcctatcggcaagacagagaagaccggtaaacgtagcacttcagcggcggttttagaagctcttcgcgaagtccatcccattgtggacaagatcttgcagtaccgcgaaatggcgaaattgaaaggcacctatattgaccgtcttccggcattagtccacccgaaaacgggacgcctccatacccgcttcaaccaaacagccacggcgaccggtcgtttgtcctcctctgatccaaaccttcagaatattccagtacgtaccccattgggccagaagatccgccgtgcgtttgtagctgaggagggttggcgtttagtggccctcgattatcgtcaaattgaattacgtgtccttgcccatctttctggcgatgagaacctcatccgcgtgtttcaggaaggcaaagacattcacactcaaacggcaagctggatgtttggattatcagctgaagcgatcgatcctttgatgcgtcgtgcagcgaagaccatcaatttcggtgttctctacggtatgagtgcctttcgtttgtcgcaggaattaggcattccctatgaagaagctcaggcgttcattcagaaatactttcaaagctatcccaaagttaaagcatggatcgagaagactctccgtgaaggccgcacacgtggttacgtagagaccttatttggacgtcgccgctatgttcccgatttaaacgctcgcgtgaaaggcaagcgtgaagccgccgaacgcatggcgttcaacatgcctgtacagggcacggcagctgacctcatgaaacttgcaatggtgcgcctttttccacaattgcgtgaagttggtgcccgcatgctcttgcaggtccacgatgaactcttgttagaagcgccaaaagagcgtgcggaagaggtggcagccctcgcgaaagaagttatggaaggcgtgtggcccttagcggtgcctcttgaagtcgaagttggtattggcgaggattggctggctgccaaagga

SEQ ID NO: 5306 - protein, 841 aa, synthetic construct
  REGION 1..841: note = Variant of DNA polymerase I from Thermus sp. strain 2.9
MHHHHHHGGSGVLPVFEPKGRVLLVDGHHLAYRNFFALKGLTTSLGEPVQGVYGFAKSLLKALKEDGDVVIVVFDAKAPSFRHEAYEAYKAGRAPTPEDFPRQLALMKELVDLLGLERLEVPGFEADDVLATLAKKAEREGYEVQILTADRDLFQLLSPRISVLHPEGHRITPEWLWEKYGLRPEQWVDFRALAGDPSDNIPGVKGIGEKTALKLLKEWGSLENLLKNLDQVKPESVREKILAHLEDLKLSRELSRVRTDLPLEVDFGRRREPDWEGLKAFLERLEFGSLLHEFGLLESPLLAEEAPWPPPEGAFLGYRLSRPEPMWAELLALAASAQGRVYRAEDPHGALRGLFEVRGLLAKDLAVVALREGLDLPPTDDPMLLAYLLDPSNTTPLGVARRYGGEWTEDAAKRALLAERLHENLLGRLQGEERLLWLYEEVEKPLSRVLAHMEATGVKLDVAYLENLSLEVAAHMRRLEEEVFRLAGRSFRLNSRDQLERVLFDELGLPPIGKTEKTGKRSTSAAVLEALREVHPIVDKILQYREMAKLKGTYIDRLPALVHPKTGRLHTRFNQTATATGRLSSSDPNLQNIPVRTPLGQKIRRAFVAEEGWRLVALDYRQIELRVLAHLSGDENLIRVFQEGKDIHTQTASWMFGLSAEAIDPLMRRAAKTINFGVLYGMSAFRLSQELGIPYEEAQAFIQKYFQSYPKVKAWIEKTLREGRTRGYVETLFGRRRYVPDLNARVKGKREAAERMAFNMPVQGTAADLMKLAMVRLFPQLREVGARMLLQVHDELLLEAPKERAEEVAALAKEVMEGVWPLAVPLEVEVGIGEDWLAAKG

SEQ ID NO: 5307 - DNA, 2523 bp, synthetic construct
  misc_feature 1..2523: note = Variant of DNA polymerase I from Thermus sp. strain 2.9
  source 1..2523: mol_type = other DNA
atgcaccatcatcatcatcatggcggtagcggcgtgttaccggtgttcgagcctaaaggtcgcgtgcttctggttgatggccatcatctcgcgtatcgtaacttctttgccctgaaaggattaaccaccagcctgggcgagccggtacagggtgtctacggctttgcaaagtcgctcctgaaagctctgaaagaagacggtgatgtggtgattgttgtctttgatgcgaaagcgccaagttttcgccacgaagcgtacgaagcttacaaagccgggcgtgctccaacgccggaagactttcctcgccaattggcgcttatgaaggaattagtggatttgcttggcctcgaacgcttggaagttcccggtttcgaggcagacgacgtattagcgactctcgcaaagaaagccgaacgtgagggctatgaagtccagatcttgacagcagatcgcgatcttttccagcttttatctccgcgcatctcggtgttacacccggaagggcatcgtatcaccccggaatggctctgggagaaatatggtttgcgtcccgaacaatgggtggattttcgcgccttagcaggcgatccgagcgacaatattccgggagttaaaggtatcggcgagaagacggcgctcaagctccttaaagaatgggggtcgttggagaacttgcttaagaatttagatcaggtcaaaccagagtcagtgcgtgagaagattcttgctcacctcgaagacctcaaattaagccgcgaattgtcccgtgtacgcaccgatttgccgctcgaagttgatttcggtcgccgccgcgaacctgactgggagggtcttaaagcgtttttagagcgtcttgaatttggttcgctcttgcatgaattcggccttttagaaagcccgttactggccgaagaagcaccttggccaccgcccgagggcgcgtttttaggttaccgtttgagtcgcccggaaccgatgtgggccgaattactggctcttgcagcgtctgcccagggacgtgtgtatcgcgcggaagaccctcatggtgcgctccgcggcctcttcgaagtccgtggactccttgccaaagacttagctgttgttgcattgcgcgaaggtcttgatttacctccgactgatgatccaatgcttcttgcgtacctcttggacccgtcaaacacgacgcccgaaggcgtagcccgtcgttacggcggcgagtggaccgaagatgcagcgaaacgcgcgttattggccgaacgtttgcacgaaaatttattaggacgtttgcaaggcgaggaacgtctcctctggctttacgaagaagtggagaaaccattgagtcgcgtgctcgcgcatatggaagctaccggtgtcaaattagacgtggcgtatttggagaatcttcaccttcaggttgctgcccacatgcgccgcttggaggaagaagtattccgtttagcaggccgttcctttcgccttaactctcgcgatcagttagaacgtgtgttgttcgatgaacttggtctccctcctatcggcaagacagagaagaccggtaaacgtagcacttcagcggcggttttagaagctcttcgcgaagtccatcccattgtggacaagatcttgcagtaccgcgaaatggcgaaattgaaaggcacctatattgaccgtcttccggcattagtccacccgaaaacgggacgcctccatacccgcttcaaccaaacagccacggcgaccggtcgtttgtcctcctctgatccaaaccttcagaatattccagtacgtaccccattgggccagaagatccgccgtgcgtttgtagctgaggagggttggcgtttagtggccctcgattatcgtcaaattgaattacgtgtccttgcccatctttctggcgatgagaacctcatccgcgtgtttcaggaaggcaaagacattcacactcaaacggcaagctggatgtttggattatcagctgaagcgatcgatcctttgatgcgtcgtgcagcgaagaccatcaatttcggtgttctctacggtatgagtgcctttcgtttgtcgcaggaattaggcattccctatgaagaagctcaggcgttcattcagaaatactttcaaagctatcccaaagttaaagcatggatcgagaagactctccgtgaaggccgcacacgtggttacgtagagaccttatttggacgtcgccgctatgttcccgatttaaacgctcgcgtgaaaggcaagcgtgaagccgccgaacgcatggcgttcaacatgcctgtacagggcacggcagctgacctcatgaaacttgcaatggtgcgcctttttccacaattgcgtgaagttggtgcccgcatgctcttgcaggtccacgatgaactcttgttagaagcgccaaaagagcgtgcggaagaggtggcagccctcgcgaaagaagttatggaaggcgtgtggcccttagcggtgcctcttgaagtcgaagttggtattggcgaggattggctggctgccaaagga

SEQ ID NO: 5308 - protein, 841 aa, synthetic construct
  REGION 1..841: note = Variant of DNA polymerase I from Thermus sp. strain 2.9
MHHHHHHGGSGVLPVFEPKGRVLLVDGHHLAYRNFFALKGLTTSLGEPVQGVYGFAKSLLKALKEDGDVVIVVFDAKAPSFRHEAYEAYKAGRAPTPEDFPRQLALMKELVDLLGLERLEVPGFEADDVLATLAKKAEREGYEVQILTADRDLFQLLSPRISVLHPEGHRITPEWLWEKYGLRPEQWVDFRALAGDPSDNIPGVKGIGEKTALKLLKEWGSLENLLKNLDQVKPESVREKILAHLEDLKLSRELSRVRTDLPLEVDFGRRREPDWEGLKAFLERLEFGSLLHEFGLLESPLLAEEAPWPPPEGAFLGYRLSRPEPMWAELLALAASAQGRVYRAEDPHGALRGLFEVRGLLAKDLAVVALREGLDLPPTDDPMLLAYLLDPSNTTPEGVARRYGGEWTEDAAKRALLAERLHENLLGRLQGEERLLWLYEEVEKPLSRVLAHMEATGVKLDVAYLENLHLQVAAHMRRLEEEVFRLAGRSFRLNSRDQLERVLFDELGLPPIGKTEKTGKRSTSAAVLEALREVHPIVDKILQYREMAKLKGTYIDRLPALVHPKTGRLHTRFNQTATATGRLSSSDPNLQNIPVRTPLGQKIRRAFVAEEGWRLVALDYRQIELRVLAHLSGDENLIRVFQEGKDIHTQTASWMFGLSAEAIDPLMRRAAKTINFGVLYGMSAFRLSQELGIPYEEAQAFIQKYFQSYPKVKAWIEKTLREGRTRGYVETLFGRRRYVPDLNARVKGKREAAERMAFNMPVQGTAADLMKLAMVRLFPQLREVGARMLLQVHDELLLEAPKERAEEVAALAKEVMEGVWPLAVPLEVEVGIGEDWLAAKG

SEQ ID NO: 5309 - DNA, 2523 bp, synthetic construct
  misc_feature 1..2523: note = Variant of DNA polymerase I from Thermus sp. strain 2.9
  source 1..2523: mol_type = other DNA
atgcaccatcatcatcatcatggcggtagcggcgtgttaccggtgttcgagcctaaaggtcgcgtgcttctggttgatggccatcatctcgcgtatcgtaacttctttgccctgaaaggattaaccaccagcctgggcgagccggtacagggtgtctacggctttgcaaagtcgctcctgaaagctctgaaagaagacggtgatgtggtgattgttgtctttgatgcgaaagcgccaagttttcgccacgaagcgtacgaagcttacaaagccgggcgtgctccaacgccggaagactttcctcgccaattggcgcttatgaaggaattagtggatttgcttggcctcgaacgcttggaagttcccggtttcgaggcagacgacgtattagcgactctcgcaaagaaagccgaacgtgagggctatgaagtccagatcttgacagcagatcgcgatcttttccagcttttatctccgcgcatctcggtgttacacccggaagggcatcgtatcaccccggaatggctctgggagaaatatggtttgcgtcccgaacaatgggtggattttcgcgccttagcaggcgatccgagcgacaatattccgggagttaaaggtatcggcgagaagacggcgctcaagctccttaaagaatgggggtcgttggagaacttgcttaagaatttagatcaggtcaaaccagagtcagtgcgtgagaagattcttgctcacctcgaagacctcaaattaagccgcgaattgtcccgtgtacgcaccgatttgccgctcgaagttgatttcggtcgccgccgcgaacctgactgggagggtcttaaagcgtttttagagcgtcttgaatttggttcgctcttgcatgaattcggccttttagaaagcccgttactggccgaagaagcaccttggccaccgcccgagggcgcgtttttaggttaccgtttgagtcgcccggaaccgatgtgggccgaattactggctcttgcagcgtctgcccagggacgtgtgtatcgcgcggaagaccctcatggtgcgatgcgcggcctcttcgaagtccgtggactccttgccaaagacttagctgttgttgcattgcgcgaaggtcttgatttacctccgactgatgatccaatgcttcttgcgtacctcttggacccgtcaaacacgacgcccgaaggcgtagcccgtcgttacggcggcgagtggaccgaagatgcagcgaaacgcgcgttattggccgaacgtttgcacgaaaatttattaggacgtttgcaaggcgaggaacgtctcctctggctttacgaagaagtggagaaaccattgagtcgcgtgctcgcgcatatggaagctaccggtgtcaaattagacgtggcgtatttggagaatctcagccttgaagttgctgcccacatgcgccgcttggaggaagaagtattccgtttagcaggccgttcctttcgccttaactctcgcgatcagttagaacgtgtgttgttcgatgaacttggtctccctcctatcggcaagacagagaagaccggtaaacgtagcacttcagcggcggttttagaagctcttcgcgaagtccatcccattgtggacaagatcttgcagtaccgcgaaatggcgaaattgaaaggcacctatattgaccgtcttccggcattagtccacccgaaaacgggacgcctccatacccgcttcaaccaaacagccacggcgaccggtcgtttgtcctcctctgatccaaaccttcagaatattccagtacgtaccccattgggccagaagatccgccgtgcgtttgtagctgaggagggttggcgtttagtggccctcgattatcgtcaaattgaattacgtgtccttgcccatctttctggcgatgagaacctcatccgcgtgtttcaggaaggcaaagacattcacactcaaacggcaagctggatgtttggattatcagctgaagcgatcgatcctttgatgcgtcgtgcagcgaagaccatcaatttcggtgttctctacggtatgagtgcctttcgtttgtcgcaggaattaggcattccctatgaagaagctcaggcgttcattcagaaatactttcaaagctatcccaaagttaaagcatggatcgagaagactctccgtgaaggccgcacacgtggttacgtagagaccttatttggacgtcgccgctatgttcccgatttaaacgctcgcgtgaaaggcaagcgtgaagccgccgaacgcatggcgttcaacatgcctgtacagggcacggcagctgacctcatgaaacttgcaatggtgcgcctttttccacaattgcgtgaagttggtgcccgcatgctcttgcaggtccacgatgaactcttgttagaagcgccaaaagagcgtgcggaagaggtggcagccctcgcgaaagaagttatggaaggcgtgtggcccttagcggtgcctcttgaagtcgaagttggtattggcgaggattggctggctgccaaagga

SEQ ID NO: 5310 - protein, 841 aa, synthetic construct
  REGION 1..841: note = Variant of DNA polymerase I from Thermus sp. strain 2.9
MHHHHHHGGSGVLPVFEPKGRVLLVDGHHLAYRNFFALKGLTTSLGEPVQGVYGFAKSLLKALKEDGDVVIVVFDAKAPSFRHEAYEAYKAGRAPTPEDFPRQLALMKELVDLLGLERLEVPGFEADDVLATLAKKAEREGYEVQILTADRDLFQLLSPRISVLHPEGHRITPEWLWEKYGLRPEQWVDFRALAGDPSDNIPGVKGIGEKTALKLLKEWGSLENLLKNLDQVKPESVREKILAHLEDLKLSRELSRVRTDLPLEVDFGRRREPDWEGLKAFLERLEFGSLLHEFGLLESPLLAEEAPWPPPEGAFLGYRLSRPEPMWAELLALAASAQGRVYRAEDPHGAMRGLFEVRGLLAKDLAVVALREGLDLPPTDDPMLLAYLLDPSNTTPEGVARRYGGEWTEDAAKRALLAERLHENLLGRLQGEERLLWLYEEVEKPLSRVLAHMEATGVKLDVAYLENLSLEVAAHMRRLEEEVFRLAGRSFRLNSRDQLERVLFDELGLPPIGKTEKTGKRSTSAAVLEALREVHPIVDKILQYREMAKLKGTYIDRLPALVHPKTGRLHTRFNQTATATGRLSSSDPNLQNIPVRTPLGQKIRRAFVAEEGWRLVALDYRQIELRVLAHLSGDENLIRVFQEGKDIHTQTASWMFGLSAEAIDPLMRRAAKTINFGVLYGMSAFRLSQELGIPYEEAQAFIQKYFQSYPKVKAWIEKTLREGRTRGYVETLFGRRRYVPDLNARVKGKREAAERMAFNMPVQGTAADLMKLAMVRLFPQLREVGARMLLQVHDELLLEAPKERAEEVAALAKEVMEGVWPLAVPLEVEVGIGEDWLAAKG

SEQ ID NO: 5311 - DNA, 2523 bp, synthetic construct
  misc_feature 1..2523: note = Variant of DNA polymerase I from Thermus sp. strain 2.9
  source 1..2523: mol_type = other DNA
atgcaccatcatcatcatcatggcggtagcggcgtgttaccggtgttcgagcctaaaggtcgcgtgcttctggttgatggccatcatctcgcgtatcgtaacttctttgccctgaaaggattaaccaccagcctgggcgagccggtacagggtgtctacggctttgcaaagtcgctcctgaaagctctgaaagaagacggtgatgtggtgattgttgtctttgatgcgaaagcgccaagttttcgccacgaagcgtacgaagcttacaaagccgggcgtgctccaacgccggaagactttcctcgccaattggcgcttatgaaggaattagtggatttgcttggcctcgaacgcttggaagttcccggtttcgaggcagacgacgtattagcgactctcgcaaagaaagccgaacgtgagggctatgaagtccagatcttgacagcagatcgcgatcttttccagcttttatctccgcgcatctcggtgttacacccggaagggcatcgtatcaccccggaatggctctgggagaaatatggtttgcgtcccgaacaatgggtggattttcgcgccttagcaggcgatccgagcgacaatattccgggagttaaaggtatcggcgagaagacggcgctcaagctccttaaagaatgggggtcgttggagaacttgcttaagaatttagatcaggtcaaaccagagtcagtgcgtgagaagattcttgctcacctcgaagacctcaaattaagccgcgaattgtcccgtgtacgcaccgatttgccgctcgaagttgatttcggtcgccgccgcgaacctgactgggagggtcttaaagcgtttttagagcgtcttgaatttggttcgctcttgcatgaattcggccttttagaaagcccgttactggccgaagaagcaccttggccaccgcccgagggcgcgtttttaggttaccgtttgagtcgcccggaaccgatgtgggccgaattactggctcttgcagcgtctgcccagggacgtgtgtatcgcgcggaagaccctcatggtgcgctccgcggcctcttcgaagtccgtggactccttgccaaagacttagctgttgttgcattgcgcgaaggtcttgatttacctccgactgatgatccaatgcttcttgcgtacctcttggacccgtcaaacacgacgcccgaaggcgtagcccgtcgttacggcggcgagtggaccgaagatgcagcgaaacgcgcgttattggccgaacgtttgcacgaaaatttattaggacgtttgcaaggcgagtggcgtctcctctggctttacgaagaagtggagaaaccattgagtcgcgtgctcgcgcatatggaagctaccggtgtcaaattagacgtggcgtatttggagaatctcagccttgaagttgctgcccacatgcgccgcttggaggaagaagtattccgtttagcaggccgttcctttcgccttaactctcgcgatcagttagaacgtgtgttgttcgatgaacttggtctccctcctatcggcaagacagagaagaccggtaaacgtagcacttcagcggcggttttagaagctcttcgcgaagtccatcccattgtggacaagatcttgcagtaccgcgaaatggcgaaattgaaaggcacctatattgaccgtcttccggcattagtccacccgaaaacgggacgcctccatacccgcttcaaccaaacagccacggcgaccggtcgtttgtcctcctctgatccaaaccttcagaatattccagtacgtaccccattgggccagaagatccgccgtgcgtttgtagctgaggagggttggcgtttagtggccctcgattatcgtcaaattgaattacgtgtccttgcccatctttctggcgatgagaacctcatccgcgtgtttcaggaaggcaaagacattcacactcaaacggcaagctggatgtttggattatcagctgaagcgatcgatcctttgatgcgtcgtgcagcgaagaccatcaatttcggtgttctctacggtatgagtgcctttcgtttgtcgcaggaattaggcattccctatgaagaagctcaggcgttcattcagaaatactttcaaagctatcccaaagttaaagcatggatcgagaagactctccgtgaaggccgcacacgtggttacgtagagaccttatttggacgtcgccgctatgttcccgatttaaacgctcgcgtgaaaggcaagcgtgaagccgccgaacgcatggcgttcaacatgcctgtacagggcacggcagctgacctcatgaaacttgcaatggtgcgcctttttccacaattgcgtgaagttggtgcccgcatgctcttgcaggtccacgatgaactcttgttagaagcgccaaaagagcgtgcggaagaggtggcagccctcgcgaaagaagttatggaaggcgtgtggcccttagcggtgcctcttgaagtcgaagttggtattggcgaggattggctggctgccaaagga

SEQ ID NO: 5312 - protein, 841 aa, synthetic construct
  REGION 1..841: note = Variant of DNA polymerase I from Thermus sp. strain 2.9
MHHHHHHGGSGVLPVFEPKGRVLLVDGHHLAYRNFFALKGLTTSLGEPVQGVYGFAKSLLKALKEDGDVVIVVFDAKAPSFRHEAYEAYKAGRAPTPEDFPRQLALMKELVDLLGLERLEVPGFEADDVLATLAKKAEREGYEVQILTADRDLFQLLSPRISVLHPEGHRITPEWLWEKYGLRPEQWVDFRALAGDPSDNIPGVKGIGEKTALKLLKEWGSLENLLKNLDQVKPESVREKILAHLEDLKLSRELSRVRTDLPLEVDFGRRREPDWEGLKAFLERLEFGSLLHEFGLLESPLLAEEAPWPPPEGAFLGYRLSRPEPMWAELLALAASAQGRVYRAEDPHGALRGLFEVRGLLAKDLAVVALREGLDLPPTDDPMLLAYLLDPSNTTPEGVARRYGGEWTEDAAKRALLAERLHENLLGRLQGEWRLLWLYEEVEKPLSRVLAHMEATGVKLDVAYLENLSLEVAAHMRRLEEEVFRLAGRSFRLNSRDQLERVLFDELGLPPIGKTEKTGKRSTSAAVLEALREVHPIVDKILQYREMAKLKGTYIDRLPALVHPKTGRLHTRFNQTATATGRLSSSDPNLQNIPVRTPLGQKIRRAFVAEEGWRLVALDYRQIELRVLAHLSGDENLIRVFQEGKDIHTQTASWMFGLSAEAIDPLMRRAAKTINFGVLYGMSAFRLSQELGIPYEEAQAFIQKYFQSYPKVKAWIEKTLREGRTRGYVETLFGRRRYVPDLNARVKGKREAAERMAFNMPVQGTAADLMKLAMVRLFPQLREVGARMLLQVHDELLLEAPKERAEEVAALAKEVMEGVWPLAVPLEVEVGIGEDWLAAKG

SEQ ID NO: 5313 - DNA, 2523 bp, synthetic construct
  misc_feature 1..2523: note = Variant of DNA polymerase I from Thermus sp. strain 2.9
  source 1..2523: mol_type = other DNA
atgcaccatcatcatcatcatggcggtagcggcgtgttaccggtgttcgagcctaaaggtcgcgtgcttctggttgatggccatcatctcgcgtatcgtaacttctttgccctgaaaggattaaccaccagcctgggcgagccggtacagggtgtctacggctttgcaaagtcgctcctgaaagctctgaaagaagacggtgatgtggtgattgttgtctttgatgcgaaagcgccaagttttcgccacgaagcgtacgaagcttacaaagccgggcgtgctccaacgccggaagactttcctcgccaattggcgcttatgaaggaattagtggatttgcttggcctcgaacgcttggaagttcccggtttcgaggcagacgacgtattagcgactctcgcaaagaaagccgaacgtgagggctatgaagtccagatcttgacagcagatcgcgatcttttccagcttttatctccgcgcatctcggtgttacacccggaagggcatcgtatcaccccggaatggctctgggagaaatatggtttgcgtcccgaacaatgggtggattttcgcgccttagcaggcgatccgagcgacaatattccgggagttaaaggtatcggcgagaagacggcgctcaagctccttaaagaatgggggtcgttggagaacttgcttaagaatttagatcaggtcaaaccagagtcagtgcgtgagaagattcttgctcacctcgaagacctcaaattaagccgcgaattgtcccgtgtacgcaccgatttgccgctcgaagttgatttcggtcgccgccgcgaacctgactgggagggtcttaaagcgtttttagagcgtcttgaatttggttcgctcttgcatgaattcggccttttagaaagcccgttactggccgaagaagcaccttggccaccgcccgagggcgcgtttttaggttaccgtttgagtcgcccggaaccgatgtgggccgaattactggctcttgcagcgtctgcccagggacgtgtgtatcgcgcggaagaccctcatggtgcgctccgcggcctcttcgaagtccgtggactccttgccaaagacttagctgttgttgcattgcgcgaaggtcttgatttacctccgactgatgatccaatgcttcttgcgtacctcttggacccgtcaaacacgacgcccgaaggcgtagcccgtcgttacggcggcgagtggaccgaagatgcagcgaaacgcgcgttattggccgaacgtttgcacgaaaatttattaggacgtttgcaaggcgaggaacgtctcctctggcttttggaagaagtggagaaaccattgagtcgcgtgctcgcgcatatggaagctaccggtgtcaaattagacgtggcgtatttggagaatctcagccttgaagttgctgcccacatgcgccgcttggaggaagaagtattccgtttagcaggccgttcctttcgccttaactctcgcgatcagttagaacgtgtgttgttcgatgaacttggtctccctcctatcggcaagacagagaagaccggtaaacgtagcacttcagcggcggttttagaagctcttcgcgaagtccatcccattgtggacaagatcttgcagtaccgcgaaatggcgaaattgaaaggcacctatattgaccgtcttccggcattagtccacccgaaaacgggacgcctccatacccgcttcaaccaaacagccacggcgaccggtcgtttgtcctcctctgatccaaaccttcagaatattccagtacgtaccccattgggccagaagatccgccgtgcgtttgtagctgaggagggttggcgtttagtggccctcgattatcgtcaaattgaattacgtgtccttgcccatctttctggcgatgagaacctcatccgcgtgtttcaggaaggcaaagacattcacactcaaacggcaagctggatgtttggattatcagctgaagcgatcgatcctttgatgcgtcgtgcagcgaagaccatcaatttcggtgttctctacggtatgagtgcctttcgtttgtcgcaggaattaggcattccctatgaagaagctcaggcgttcattcagaaatactttcaaagctatcccaaagttaaagcatggatcgagaagactctccgtgaaggccgcacacgtggttacgtagagaccttatttggacgtcgccgctatgttcccgatttaaacgctcgcgtgaaaggcaagcgtgaagccgccgaacgcatggcgttcaacatgcctgtacagggcacggcagctgacctcatgaaacttgcaatggtgcgcctttttccacaattgcgtgaagttggtgcccgcatgctcttgcaggtccacgatgaactcttgttagaagcgccaaaagagcgtgcggaagaggtggcagccctcgcgaaagaagttatggaaggcgtgtggcccttagcggtgcctcttgaagtcgaagttggtattggcgaggattggctggctgccaaagga

SEQ ID NO: 5314 - protein, 841 aa, synthetic construct
  REGION 1..841: note = Variant of DNA polymerase I from Thermus sp. strain 2.9
MHHHHHHGGSGVLPVFEPKGRVLLVDGHHLAYRNFFALKGLTTSLGEPVQGVYGFAKSLLKALKEDGDVVIVVFDAKAPSFRHEAYEAYKAGRAPTPEDFPRQLALMKELVDLLGLERLEVPGFEADDVLATLAKKAEREGYEVQILTADRDLFQLLSPRISVLHPEGHRITPEWLWEKYGLRPEQWVDFRALAGDPSDNIPGVKGIGEKTALKLLKEWGSLENLLKNLDQVKPESVREKILAHLEDLKLSRELSRVRTDLPLEVDFGRRREPDWEGLKAFLERLEFGSLLHEFGLLESPLLAEEAPWPPPEGAFLGYRLSRPEPMWAELLALAASAQGRVYRAEDPHGALRGLFEVRGLLAKDLAVVALREGLDLPPTDDPMLLAYLLDPSNTTPEGVARRYGGEWTEDAAKRALLAERLHENLLGRLQGEERLLWLLEEVEKPLSRVLAHMEATGVKLDVAYLENLSLEVAAHMRRLEEEVFRLAGRSFRLNSRDQLERVLFDELGLPPIGKTEKTGKRSTSAAVLEALREVHPIVDKILQYREMAKLKGTYIDRLPALVHPKTGRLHTRFNQTATATGRLSSSDPNLQNIPVRTPLGQKIRRAFVAEEGWRLVALDYRQIELRVLAHLSGDENLIRVFQEGKDIHTQTASWMFGLSAEAIDPLMRRAAKTINFGVLYGMSAFRLSQELGIPYEEAQAFIQKYFQSYPKVKAWIEKTLREGRTRGYVETLFGRRRYVPDLNARVKGKREAAERMAFNMPVQGTAADLMKLAMVRLFPQLREVGARMLLQVHDELLLEAPKERAEEVAALAKEVMEGVWPLAVPLEVEVGIGEDWLAAKG

SEQ ID NO: 5315 - DNA, 2523 bp, synthetic construct
  misc_feature 1..2523: note = Variant of DNA polymerase I from Thermus sp. strain 2.9
  source 1..2523: mol_type = other DNA
atgcaccatcatcatcatcatggcggtagcggcgtgttaccggtgttcgagcctaaaggtcgcgtgcttctggttgatggccatcatctcgcgtatcgtaacttctttgccctgaaaggattaaccaccagcctgggcgagccggtacagggtgtctacggctttgcaaagtcgctcctgaaagctctgaaagaagacggtgatgtggtgattgttgtctttgatgcgaaagcgccaagttttcgccacgaagcgtacgaagcttacaaagccgggcgtgctccaacgccggaagactttcctcgccaattggcgcttatgaaggaattagtggatttgcttggcctcgaacgcttggaagttcccggtttcgaggcagacgacgtattagcgactctcgcaaagaaagccgaacgtgagggctatgaagtccagatcttgacagcagatcgcgatcttttccagcttttatctccgcgcatctcggtgttacacccggaagggcatcgtatcaccccggaatggctctgggagaaatatggtttgcgtcccgaacaatgggtggattttcgcgccttagcaggcgatccgagcgacaatattccgggagttaaaggtatcggcgagaagacggcgctcaagctccttaaagaatgggggtcgttggagaacttgcttaagaatttagatcaggtcaaaccagagtcagtgcgtgagaagattcttgctcacctcgaagacctcaaattaagccgcgaattgtcccgtgtacgcaccgatttgccgctcgaagttgatttccgccgccgccgcgaacctgactgggagggtcttaaagcgtttttagagcgtcttgaatttggttcgctcttgcatgaattcggccttttagaaagcccgttactggccgaagaagcaccttggccaccgcccgagggcgcgtttttaggttaccgtttgagtcgcccggaaccgatgtgggccgaattactggctcttgcagcgtctgcccagggacgtgtgtatcgcgcggaagaccctcatggtgcgctccgcggcctcttcgaagtccgtggactccttgccaaagacttagctgttgttgcattgcgcgaaggtcttgatttacctccgactgatgatccaatgcttcttgcgtacctcttggacccgtcaaacacgacgcccgaaggcgtagcccgtcgttacggcggcgagtggaccgaagatgcagcgaaacgcgcgttattggccgaacgtttgcacgcaaatttattaggacgtttgcaaggcgaggaacgtctcctctggctttacgaagaagtggagaaaccattgagtcgcgtgctcgcgcatatggaagctaccggtgtcaaattagacgtggcgtatttggagaatctcagccttgaagttgctgcccacatgcgccgcttggaggaagaagtattccgtttagcaggccgttcctttcgccttaactctcgcgatcagttagaacgtgtgttgttcgatgaacttggtctccctcctatcggcaagacagagaagaccggtaaacgtagcacttcagcggcggttttagaagctcttcgcgaagtccatcccattgtggacaagatcttgcagtaccgcgaaatggcgaaattgaaaggcacctatattgaccgtcttccggcattagtccacccgaaaacgggacgcctccatacccgcttcaaccaaacagccacggcgaccggtcgtttgtcctcctctgatccaaaccttcagaatattccagtacgtaccccattgggccagaagatccgccgtgcgtttgtagctgaggagggttggcgtttagtggccctcgattatcgtcaaattgaattacgtgtccttgcccatctttctggcgatgagaacctcatccgcgtgtttcaggaaggcaaagacattcacactcaaacggcaagctggatgtttggattatcagctgaagcgatcgatcctttgatgcgtcgtgcagcgaagaccatcaatttcggtgttctctacggtatgagtgcctttcgtttgtcgcaggaattaggcattccctatgaagaagctcaggcgttcattcagaaatactttcaaagctatcccaaagttaaagcatggatcgagaagactctccgcgaaggccgcacacgtggttacgtagagaccttatttggacgtcgccgctatgttcccgatttaaacgctcgcgtgaaaggcaaacgtgaagccgccgaacgcatggcgttcaacatgcctgtacagggcacggcagctgacctcatgaaacttgcaatggtgcgcctttttccacaattgcgtgaagttggtgcccgcatgctcttgcaggtccacgatgaactcttgttagaagcgccaaaagagcgtgcggaagaggtggcagccctcgcgaaagaagttatggaaggcgtgtggcccttagcggtgcctcttgaagtcgaagttggtattggcgaggattggctggctgccaaagga

SEQ ID NO: 5316 - protein, 841 aa, synthetic construct
  REGION 1..841: note = Variant of DNA polymerase I from Thermus sp. strain 2.9
MHHHHHHGGSGVLPVFEPKGRVLLVDGHHLAYRNFFALKGLTTSLGEPVQGVYGFAKSLLKALKEDGDVVIVVFDAKAPSFRHEAYEAYKAGRAPTPEDFPRQLALMKELVDLLGLERLEVPGFEADDVLATLAKKAEREGYEVQILTADRDLFQLLSPRISVLHPEGHRITPEWLWEKYGLRPEQWVDFRALAGDPSDNIPGVKGIGEKTALKLLKEWGSLENLLKNLDQVKPESVREKILAHLEDLKLSRELSRVRTDLPLEVDFRRRREPDWEGLKAFLERLEFGSLLHEFGLLESPLLAEEAPWPPPEGAFLGYRLSRPEPMWAELLALAASAQGRVYRAEDPHGALRGLFEVRGLLAKDLAVVALREGLDLPPTDDPMLLAYLLDPSNTTPEGVARRYGGEWTEDAAKRALLAERLHANLLGRLQGEERLLWLYEEVEKPLSRVLAHMEATGVKLDVAYLENLSLEVAAHMRRLEEEVFRLAGRSFRLNSRDQLERVLFDELGLPPIGKTEKTGKRSTSAAVLEALREVHPIVDKILQYREMAKLKGTYIDRLPALVHPKTGRLHTRFNQTATATGRLSSSDPNLQNIPVRTPLGQKIRRAFVAEEGWRLVALDYRQIELRVLAHLSGDENLIRVFQEGKDIHTQTASWMFGLSAEAIDPLMRRAAKTINFGVLYGMSAFRLSQELGIPYEEAQAFIQKYFQSYPKVKAWIEKTLREGRTRGYVETLFGRRRYVPDLNARVKGKREAAERMAFNMPVQGTAADLMKLAMVRLFPQLREVGARMLLQVHDELLLEAPKERAEEVAALAKEVMEGVWPLAVPLEVEVGIGEDWLAAKG

SEQ ID NO: 5317 - DNA, 2523 bp, synthetic construct
  misc_feature 1..2523: note = Variant of DNA polymerase I from Thermus sp. strain 2.9
  source 1..2523: mol_type = other DNA
atgcaccatcatcatcatcatggcggtagcggcgtgttaccggtgttcgagcctaaaggtcgcgtgcttctggttgatggccatcatctcgcgtatcgtaacttctttgccctgaaaggattaaccaccagcctgggcgagccggtacagggtgtctacggctttgcaaagtcgctcctgaaagctctgaaagaagacggtgatgtggtgattgttgtctttgatgcgaaagcgccaagttttcgccacgaagcgtacgaagcttacaaagccgggcgtgctccaacgccggaagactttcctcgccaattggcgcttatgaaggaattagtggatttgcttggcctcgaacgcttggaagttcccggtttcgaggcagacgacgtattagcgactctcgcaaagaaagccgaacgtgagggctatgaagtccagatcttgacagcagatcgcgatcttttccagcttttatctccgcgcatctcggtgttacacccggaagggcatcgtatcaccccggaatggctctgggagaaatatggtttgcgtcccgaacaatgggtggattttcgcgccttagcaggcgatccgagcgacaatattccgggagttaaaggtatcggcgagaagacggcgctcaagctccttaaagaatgggggtcgttggagaacttgcttaagaatttagatcaggtcaaaccagagtcagtgcgtgagaagattcttgctcacctcgaagacctcaaattaagccgcgaattgtcccgtgtacgcaccgatttgccgctcgaagttgatttcggtcgccgccgcgaacctgactgggagggtcttaaagcgtttttagagcgtcttgaatttggttcgctcttgcatgaattcggccttttagaaagcccgttactggccgaagaagcaccttggccaccgcccgagggcgcgtttttaggttaccgtttgagtcgcccggaaccgatgtgggccgaattactggctcttgcagcgtctgcccagggacgtgtgtatcgcgcggaagaccctcatggtgcgctccgcggcctcttcgaagtccgtggactccttgccaaagacttagctgttgttgcattgcgcgaaggtcttgatttacctccgactgatgatccaatgcttcttgcgtacctcttggacccgtcaaacacgacgcccgctggcgtagcccgtcgttacggcggcgagtggaccgaagatgcagcgaaacgcgcgttattggccgaacgtttgcacgaaaatttattaggacgtttgcaaggcgaggaacgtctcctctggctttacgaagaagtggagaaaccattgagtcgcgtgctcgcgcatatggaagctaccggtgtcaaattagacgtggcgtatttggagaatctcagccttgaagttgctgcccacatgcgccgcttggaggaagaagtattccgtttagcaggccgttcctttcgccttaactctcgcgatcagttagaacgtgtgttgttcgatgaacttggtctccctcctatcggcaagacagagaagaccggtaaacgtagcacttcagcggcggttttagaagctcttcgcgaagtccatcccattgtggacaagatcttgcagtaccgcgaaatggcgaaattgaaaggcacctatattgaccgtcttccggcattagtccacccgaaaacgggacgcctccatacccgcttcaaccaaacagccacggcgaccggtcgtttgtcctcctctgatccaaaccttcagaatattccagtacgtaccccattgggccagaagatccgccgtgcgtttgtagctgaggagggttggcgtttagtggccctcgattatcgtcaaattgaattacgtgtccttgcccatctttctggcgatgagaacctcatccgcgtgtttcaggaaggcaaagacattcacactcaaacggcaagctggatgtttggattatcagctgaagcgatcgatcctttgatgcgtcgtgcagcgaagaccatcaatttcggtgttctctacggtatgagtgcctttcgtttgtcgcaggaattaggcattccctatgaagaagctcaggcgttcattcagaaatactttcaaagctatcccaaagttaaagcatggatcgagaagactctccgtgaaggccgcacacgtggttacgtagagaccttatttggacgtcgccgctatgttcccgatttaaacgctcgcgtgaaaggcaagcgtgaagccgccgaacgcatggcgttcaacatgcctgtacagggcacggcagctgacctcatgaaacttgcaatggtgcgcctttttccacaattgcgtgaagttggtgcccgcatgctcttgcaggtccacgatgaactcttgttagaagcgccaaaagagcgtgcggaagaggtggcagccctcgcgaaagaagttatggaaggcgtgtggcccttagcggtgcctcttgaagtcgaagttggtattggcgaggattggctggctgccaaagga

SEQ ID NO: 5318 - protein, 841 aa, synthetic construct
  REGION 1..841: note = Variant of DNA polymerase I from Thermus sp. strain 2.9
MHHHHHHGGSGVLPVFEPKGRVLLVDGHHLAYRNFFALKGLTTSLGEPVQGVYGFAKSLLKALKEDGDVVIVVFDAKAPSFRHEAYEAYKAGRAPTPEDFPRQLALMKELVDLLGLERLEVPGFEADDVLATLAKKAEREGYEVQILTADRDLFQLLSPRISVLHPEGHRITPEWLWEKYGLRPEQWVDFRALAGDPSDNIPGVKGIGEKTALKLLKEWGSLENLLKNLDQVKPESVREKILAHLEDLKLSRELSRVRTDLPLEVDFGRRREPDWEGLKAFLERLEFGSLLHEFGLLESPLLAEEAPWPPPEGAFLGYRLSRPEPMWAELLALAASAQGRVYRAEDPHGALRGLFEVRGLLAKDLAVVALREGLDLPPTDDPMLLAYLLDPSNTTPAGVARRYGGEWTEDAAKRALLAERLHENLLGRLQGEERLLWLYEEVEKPLSRVLAHMEATGVKLDVAYLENLSLEVAAHMRRLEEEVFRLAGRSFRLNSRDQLERVLFDELGLPPIGKTEKTGKRSTSAAVLEALREVHPIVDKILQYREMAKLKGTYIDRLPALVHPKTGRLHTRFNQTATATGRLSSSDPNLQNIPVRTPLGQKIRRAFVAEEGWRLVALDYRQIELRVLAHLSGDENLIRVFQEGKDIHTQTASWMFGLSAEAIDPLMRRAAKTINFGVLYGMSAFRLSQELGIPYEEAQAFIQKYFQSYPKVKAWIEKTLREGRTRGYVETLFGRRRYVPDLNARVKGKREAAERMAFNMPVQGTAADLMKLAMVRLFPQLREVGARMLLQVHDELLLEAPKERAEEVAALAKEVMEGVWPLAVPLEVEVGIGEDWLAAKG

SEQ ID NO: 5319 - DNA, 2523 bp, synthetic construct
  misc_feature 1..2523: note = Variant of DNA polymerase I from Thermus sp. strain 2.9
  source 1..2523: mol_type = other DNA
atgcaccatcatcatcatcatggcggtagcggcgtgttaccggtgttcgagcctaaaggtcgcgtgcttctggttgatggccatcatctcgcgtatcgtaacttctttgccctgaaaggattaaccaccagcctgggcgagccggtacagggtgtctacggctttgcaaagtcgctcctgaaagctctgaaagaagacggtgatgtggtgattgttgtctttgatgcgaaagcgccaagttttcgccacgaagcgtacgaagcttacaaagccgggcgtgctccaacgccggaagactttcctcgccaattggcgcttatgaaggaattagtggatttgcttggcctcgaacgcttggaagttcccggtttcgaggcagacgacgtattagcgactctcgcaaagaaagccgaacgtgagggctatgaagtccagatcttgacagcagatcgcgatcttttccagcttttatctccgcgcatctcggtgttacacccggaagggcatcgtatcaccccggaatggctctgggagaaatatggtttgcgtcccgaacaatgggtggattttcgcgccttagcaggcgatccgagcgacaatattccgggagttaaaggtatcggcgagaagacggcgctcaagctccttaaagaatgggggtcgttggagaacttgcttaagaatttagatcaggtcaaaccagagtcagtgcgtgagaagattcttgctcacctcgaagacctcaaattaagccgcgaattgtcccgtgtacgcaccgatttgccgctcgaagttgatttcggtcgccgccgcgaacctgactgggagggtcttaaagcgtttttagagcgtcttgaatttggttcgctcttgcatgaattcggccttttagaaagcccgttactggccgaagaagcaccttggccaccgcccgagggcgcgtttttaggttaccgtttgagtcgcccggaaccgatgtgggccgaattactggctcttgcagcgtctgcccagggacgtgtgtatcgcgcggaagaccctcatggtgcgctccgcggcctcttcgaagtccgtggactccttgccaaagacttagctgttgttgcattgcgcgaaggtcttgatttacctccgactgatgatccaatgcttcttgcgtacctcttggacccgtcaaacacgacgcccgaaggcgtagcccgtcgttacggcggcgagtggaccgaagatgcagcgaaacgcgcgttattggccgaacgtttgcacgaaaatttattaggacgtttgcaaggcgaggaacgtctcctctggctttacgaagaagtggagaaaccattgagtcgcgtgctcgcgcatatggaagctaccggtgtcaaattagacgtggcgtatttggagaatctcagccttgaagttgctgcccacatgcgccgcttggaggaagaagtattccgtttagcaggccgttcctttcgccttaactctcgcgatcagttagaacgtgtgttgttcgatgaacttggtctccctcctatcggcaagacagagaagaccggtaaacgtagcacttcagcggcggttttagaagctcttcgcgaagtccatcccattgtggacaagatcttgcagtaccgcgaaatggcgaaattgaaaggcacctatattgaccgtcttccggcattagtccacccgaaaacgggacgcctccatacccgcttcaaccaaacagccacggcgaccggtcgtttgtcctcctctgatccaaaccttcagaatattccagtacgtaccccattgggccagaagatccgccgtgcgtttgtagctgaggagggttggcgtttagtggccctcgattatcgtcaaattgaattacgtgtccttgcccatctttctggcgatgagaacctcatccgcgtgtttcaggaaggcaaagacattcacactcaaacggcaagctggatgtttggattatcagctgaagcgatcgatcctttgatgcgtcgtgcagcgaagaccatcaatttcggtgttctctacggtatgagtgcctttcgtttgtcgcaggaattaggcattccctatgaagaagctcaggcgttcattcagaaatactttcaaagctatcccaaagttaaagcatggatcgagaagactctccgtgaaggccgcacacgtggttacgtagagaccttatttggacgtcgccgctatgttcccgatttaaacgctcgcgtgaaaggcaagcgtgaagccgccgaacgcatggcgttcaacatgcctgtacagggcacggcagctgacctcatgaaacttgcaatggtgcgcctttttccacaattgcgtgaagttggtgcccgcatgctcttgcaggtccacgatgaactcttgttagaagcgccaaaagagcgtgcggaagaggtggcagccctcgcgaaagaagttatggaaggcgtgtggcagttagcggtgcctcttgaagtcgaagttggtattggcgaggattggctggctgccaaagga

SEQ ID NO: 5320 - protein, 841 aa, synthetic construct
  REGION 1..841: note = Variant of DNA polymerase I from Thermus sp. strain 2.9
MHHHHHHGGSGVLPVFEPKGRVLLVDGHHLAYRNFFALKGLTTSLGEPVQGVYGFAKSLLKALKEDGDVVIVVFDAKAPSFRHEAYEAYKAGRAPTPEDFPRQLALMKELVDLLGLERLEVPGFEADDVLATLAKKAEREGYEVQILTADRDLFQLLSPRISVLHPEGHRITPEWLWEKYGLRPEQWVDFRALAGDPSDNIPGVKGIGEKTALKLLKEWGSLENLLKNLDQVKPESVREKILAHLEDLKLSRELSRVRTDLPLEVDFGRRREPDWEGLKAFLERLEFGSLLHEFGLLESPLLAEEAPWPPPEGAFLGYRLSRPEPMWAELLALAASAQGRVYRAEDPHGALRGLFEVRGLLAKDLAVVALREGLDLPPTDDPMLLAYLLDPSNTTPEGVARRYGGEWTEDAAKRALLAERLHENLLGRLQGEERLLWLYEEVEKPLSRVLAHMEATGVKLDVAYLENLSLEVAAHMRRLEEEVFRLAGRSFRLNSRDQLERVLFDELGLPPIGKTEKTGKRSTSAAVLEALREVHPIVDKILQYREMAKLKGTYIDRLPALVHPKTGRLHTRFNQTATATGRLSSSDPNLQNIPVRTPLGQKIRRAFVAEEGWRLVALDYRQIELRVLAHLSGDENLIRVFQEGKDIHTQTASWMFGLSAEAIDPLMRRAAKTINFGVLYGMSAFRLSQELGIPYEEAQAFIQKYFQSYPKVKAWIEKTLREGRTRGYVETLFGRRRYVPDLNARVKGKREAAERMAFNMPVQGTAADLMKLAMVRLFPQLREVGARMLLQVHDELLLEAPKERAEEVAALAKEVMEGVWQLAVPLEVEVGIGEDWLAAKG

SEQ ID NO: 5321 - DNA, 2523 bp, synthetic construct
  misc_feature 1..2523: note = Variant of DNA polymerase I from Thermus sp. strain 2.9
  source 1..2523: mol_type = other DNA
atgcaccatcatcatcatcatggcggtagcggcgtgttaccggtgttcgagcctaaaggtcgcgtgcttctggttgatggccatcatctcgcgtatcgtaacttctttgccctgaaaggattaaccaccagcctgggcgagccggtacagggtgtctacggctttgcaaagtcgctcctgaaagctctgaaagaagacggtgatgtggtgattgttgtctttgatgcgaaagcgccaagttttcgccacgaagcgtacgaagcttacaaagccgggcgtgctccaacgccggaagactttcctcgccaattggcgcttatgaaggaattagtggatttgcttggcctcgaacgcttggaagttcccggtttcgaggcagacgacgtattagcgactctcgcaaagaaagccgaacgtgagggctatgaagtccagatcttgacagcagatcgcgatcttttccagcttttatctccgcgcatctcggtgttacacccggaagggcatcgtatcaccccggaatggctctgggagaaatatggtttgcgtcccgaacaatgggtggattttcgcgccttagcaggcgatccgagcgacaatattccgggagttaaaggtatcggcgagaagacggcgctcaagctccttaaagaatgggggtcgttggagaacttgcttaagaatttagatcaggtcaaaccagagtcagtgcgtgagaagattcttgctcacctcgaagacctcaaattaagccgcgaattgtcccgtgtacgcaccgatttgccgctcgaagttgatttcggtcgccgccgcgaacctgactgggagggtcttaaagcgtttttagagcgtcttgaatttggttcgctcttgcatgaattcggccttttagaaagcccgttactggccgaagaagcaccttggccaccgcccgagggcgcgtttttaggttaccgtttgagtcgcccggaaccgatgtgggccgaattactggctcttgcagcgtctgcccagggacgtgtgtatcgcgcggaagaccctcatggtgcgctccgcggcctcttcgaagtccgtggactccttgccaaagacttagctgttgttgcattgcgcgaaggtcttgatttacctccgactgatgatccaatgcttcttgcgtacctcttggacccgtcaaacacgacgcccgaaggcgtagcccgtcgttacggcggcgagtggccggaagatgcagcgaaacgcgcgttattggccgaacgtttgcacgaaaatttattaggacgtttgcaaggcgaggaacgtctcctctggctttacgaagaagtggagaaaccattgagtcgcgtgctcgcgcatatggaagctaccggtgtcaaattagacgtggcgtatttggagaatctcagccttgaagttgctgcccacatgcgccgcttggaggaagaagtattccgtttagcaggccgttcctttcgccttaactctcgcgatcagttagaacgtgtgttgttcgatgaacttggtctccctcctatcggcaagacagagaagaccggtaaacgtagcacttcagcggcggttttagaagctcttcgcgaagtccatcccattgtggacaagatcttgcagtaccgcgaaatggcgaaattgaaaggcacctatattgaccgtcttccggcattagtccacccgaaaacgggacgcctccatacccgcttcaaccaaacagccacggcgaccggtcgtttgtcctcctctgatccaaaccttcagaatattccagtacgtaccccattgggccagaagatccgccgtgcgtttgtagctgaggagggttggcgtttagtggccctcgattatcgtcaaattgaattacgtgtccttgcccatctttctggcgatgagaacctcatccgcgtgtttcaggaaggcaaagacattcacactcaaacggcaagctggatgtttggattatcagctgaagcgatcgatcctttgatgcgtcgtgcagcgaagaccatcaatttcggtgttctctacggtatgagtgcctttcgtttgtcgcaggaattaggcattccctatgaagaagctcaggcgttcattcagaaatactttcaaagctatcccaaagttaaagcatggatcgagaagactctccgtgaaggccgcacacgtggttacgtagagaccttatttggacgtcgccgctatgttcccgatttaaacgctcgcgtgaaaggcaagcgtgaagccgccgaacgcatggcgttcaacatgcctgtacagggcacggcagctgacctcatgaaacttgcaatggtgcgcctttttccacaattgcgtgaagttggtgcccgcatgctcttgcaggtccacgatgaactcttgttagaagcgccaaaagagcgtgcggaagaggtggcagccctcgcgaaagaagttatggaaggcgtgtggcccttagcggtgcctcttgaagtcgaagttggtattggcgaggattggctggctgccaaagga

SEQ ID NO: 5322 - protein, 841 aa, synthetic construct
  REGION 1..841: note = Variant of DNA polymerase I from Thermus sp. strain 2.9
MHHHHHHGGSGVLPVFEPKGRVLLVDGHHLAYRNFFALKGLTTSLGEPVQGVYGFAKSLLKALKEDGDVVIVVFDAKAPSFRHEAYEAYKAGRAPTPEDFPRQLALMKELVDLLGLERLEVPGFEADDVLATLAKKAEREGYEVQILTADRDLFQLLSPRISVLHPEGHRITPEWLWEKYGLRPEQWVDFRALAGDPSDNIPGVKGIGEKTALKLLKEWGSLENLLKNLDQVKPESVREKILAHLEDLKLSRELSRVRTDLPLEVDFGRRREPDWEGLKAFLERLEFGSLLHEFGLLESPLLAEEAPWPPPEGAFLGYRLSRPEPMWAELLALAASAQGRVYRAEDPHGALRGLFEVRGLLAKDLAVVALREGLDLPPTDDPMLLAYLLDPSNTTPEGVARRYGGEWPEDAAKRALLAERLHENLLGRLQGEERLLWLYEEVEKPLSRVLAHMEATGVKLDVAYLENLSLEVAAHMRRLEEEVFRLAGRSFRLNSRDQLERVLFDELGLPPIGKTEKTGKRSTSAAVLEALREVHPIVDKILQYREMAKLKGTYIDRLPALVHPKTGRLHTRFNQTATATGRLSSSDPNLQNIPVRTPLGQKIRRAFVAEEGWRLVALDYRQIELRVLAHLSGDENLIRVFQEGKDIHTQTASWMFGLSAEAIDPLMRRAAKTINFGVLYGMSAFRLSQELGIPYEEAQAFIQKYFQSYPKVKAWIEKTLREGRTRGYVETLFGRRRYVPDLNARVKGKREAAERMAFNMPVQGTAADLMKLAMVRLFPQLREVGARMLLQVHDELLLEAPKERAEEVAALAKEVMEGVWPLAVPLEVEVGIGEDWLAAKG

SEQ ID NO: 5323 - DNA, 2523 bp, synthetic construct
  misc_feature 1..2523: note = Variant of DNA polymerase I from Thermus sp. strain 2.9
  source 1..2523: mol_type = other DNA
atgcaccatcatcatcatcatggcggtagcggcgtgttaccggtgttcgagcctaaaggtcgcgtgcttctggttgatggccatcatctcgcgtatcgtaacttctttgccctgaaaggattaaccaccagcctgggcgagccggtacagggtgtctacggctttgcaaagtcgctcctgaaagctctgaaagaagacggtgatgtggtgattgttgtctttgatgcgaaagcgccaagttttcgccacgaagcgtacgaagcttacaaagccgggcgtgctccaacgccggaagactttcctcgccaattggcgcttatgaaggaattagtggatttgcttggcctcgaacgcttggaagttcccggtttcgaggcagacgacgtattagcgactctcgcaaagaaagccgaacgtgagggctatgaagtccagatcttgacagcagatcgcgatcttttccagcttttatctccgcgcatctcggtgttacacccggaagggcatcgtatcaccccggaatggctctgggagaaatatggtttgcgtcccgaacaatgggtggattttcgcgccttagcaggcgatccgagcgacaatattccgggagttaaaggtatcggcgagaagacggcgctcaagctccttaaagaatgggggtcgttggagaacttgcttaagaatttagatcaggtcaaaccagagtcagtgcgtgagaagattcttgctcacctcgaagacctcaaattaagccgcgaattgtcccgtgtacgcaccgatttgccgctcgaagttgatttcggtcgccgccgcgaacctgactgggagggtcttaaagcgtttttagagcgtcttgaatttggttcgctcttgcatgaattcggccttttagaaagcccgttactggccgaagaagcaccttggccaccgcccgagggcgcgtttttaggttaccgtttgagtcgcccggaaccgatgtgggccgaattactggctcttgcagcgtctgcccagggacgtgtgtatcgcgcggaagaccctcatggtgcgctccgcggcctcttcgaagtccgtggactccttgccaaagacttagctgttgttgcattgcgcgaaggtcttgatttacctccgactgatgatccaatgcttcttgcgtacctcttggacccgtcaaacacgacgcccgaaggcgtagcccgtcgttacggcggcgagtggaccgaagatgcagcgaaacgcgcgttattggccgaacgtttgcacgaaaatttattaggacgtttgcaaggcgaggaacgtctcctctggctttacgaagaagtggagaaaccattgagtcgcgtgctcgcgcatatggaagctaccggtgtcaaattagacgtggcgtatttggaggcccttagccttgaagttgctgcccacatgcgccgcttggaggaagaagtattccgtttagcaggccgttcctttcgccttaactctcgcgatcagttagaacgtgtgttgttcgatgaacttggtctccctcctatcggcaagacagagaagaccggtaaacgtagcacttcagcggcggttttagaagctcttcgcgaagtccatcccattgtggacaagatcttgcagtaccgcgaaatggcgaaattgaaaggcacctatattgaccgtcttccggcattagtccacccgaaaacgggacgcctccatacccgcttcaaccaaacagccacggcgaccggtcgtttgtcctcctctgatccaaaccttcagaatattccagtacgtaccccattgggccagaagatccgccgtgcgtttgtagctgaggagggttggcgtttagtggccctcgattatcgtcaaattgaattacgtgtccttgcccatctttctggcgatgagaacctcatccgcgtgtttcaggaaggcaaagacattcacactcaaacggcaagctggatgtttggattatcagctgaagcgatcgatcctttgatgcgtcgtgcagcgaagaccatcaatttcggtgttctctacggtatgagtgcctttcgtttgtcgcaggaattaggcattccctatgaagaagctcaggcgttcattcagaaatactttcaaagctatcccaaagttaaagcatggatcgagaagactctcgaggaaggccgcacacgtggttacgtagagaccttatttggacgtcgccgctatgttcccgatttaaacgctcgcgtgaaaggcaagcgtgaagccgccgaacgcatggcgttcaacatgcctgtacagggcacggcagctgacctcatgaaacttgcaatggtgcgcctttttccacaattgcgtgaagttggtgcccgcatgctcttgcaggtccacgatgaactcttgttagaagcgccaaaagagcgtgcggaagaggtggcagccctcgcgaaagaagttatggaaggcgtgtggcccttagcggtgcctcttgaagtcgaagttggtattggcgaggattggctggctgccaaagga

SEQ ID NO: 5324 - protein, 841 aa, synthetic construct
  REGION 1..841: note = Variant of DNA polymerase I from Thermus sp. strain 2.9
MHHHHHHGGSGVLPVFEPKGRVLLVDGHHLAYRNFFALKGLTTSLGEPVQGVYGFAKSLLKALKEDGDVVIVVFDAKAPSFRHEAYEAYKAGRAPTPEDFPRQLALMKELVDLLGLERLEVPGFEADDVLATLAKKAEREGYEVQILTADRDLFQLLSPRISVLHPEGHRITPEWLWEKYGLRPEQWVDFRALAGDPSDNIPGVKGIGEKTALKLLKEWGSLENLLKNLDQVKPESVREKILAHLEDLKLSRELSRVRTDLPLEVDFGRRREPDWEGLKAFLERLEFGSLLHEFGLLESPLLAEEAPWPPPEGAFLGYRLSRPEPMWAELLALAASAQGRVYRAEDPHGALRGLFEVRGLLAKDLAVVALREGLDLPPTDDPMLLAYLLDPSNTTPEGVARRYGGEWTEDAAKRALLAERLHENLLGRLQGEERLLWLYEEVEKPLSRVLAHMEATGVKLDVAYLEALSLEVAAHMRRLEEEVFRLAGRSFRLNSRDQLERVLFDELGLPPIGKTEKTGKRSTSAAVLEALREVHPIVDKILQYREMAKLKGTYIDRLPALVHPKTGRLHTRFNQTATATGRLSSSDPNLQNIPVRTPLGQKIRRAFVAEEGWRLVALDYRQIELRVLAHLSGDENLIRVFQEGKDIHTQTASWMFGLSAEAIDPLMRRAAKTINFGVLYGMSAFRLSQELGIPYEEAQAFIQKYFQSYPKVKAWIEKTLEEGRTRGYVETLFGRRRYVPDLNARVKGKREAAERMAFNMPVQGTAADLMKLAMVRLFPQLREVGARMLLQVHDELLLEAPKERAEEVAALAKEVMEGVWPLAVPLEVEVGIGEDWLAAKG

SEQ ID NO: 5325 - DNA, 2523 bp, synthetic construct
  misc_feature 1..2523: note = Variant of DNA polymerase I from Thermus sp. strain 2.9
  source 1..2523: mol_type = other DNA
atgcaccatcatcatcatcatggcggtagcggcgtgttaccggtgttcgagcctaaaggtcgcgtgcttctggttgatggccatcatctcgcgtatcgtaacttctttgccctgaaaggattaaccaccagcctgggcgagccggtacagggtgtctacggctttgcaaagtcgctcctgaaagctctgaaagaagacggtgatgtggtgattgttgtctttgatgcgaaagcgccaagttttcgccacgaagcgtacgaagcttacaaagccgggcgtgctccaacgccggaagactttcctcgccaattggcgcttatgaaggaattagtggatttgcttggcctcgaacgcttggaagttcccggtttcgaggcagacgacgtattagcgactctcgcaaagaaagccgaacgtgagggctatgaagtccagatcttgacagcagatcgcgatcttttccagcttttatctccgcgcatctcggtgttacacccggaagggcatcgtatcaccccggaatggctctgggagaaatatggtttgcgtcccgaacaatgggtggattttcgcgccttagcaggcgatccgagcgacaatattccgggagttaaaggtatcggcgagaagacggcgctcaagctccttaaagaatgggggtcgttggagaacttgcttaagaatttagatcaggtcaaaccagagtcagtgcgtgagaagattcttgctcacctcgaagacctcaaattaagccgcgaattgtcccgtgtacgcaccgatttgccgctcgaagttgatttcggtcgccgccgcgaacctgactgggagggtcttaaagcgtttttagagcgtcttgaatttggttcgctcttgcatgaattcggccttttagaaagcccgttaccggccgaagaagcaccttggccaccgcccgagggcgcgtttttaggttaccgtttgagtcgcccggaaccgatgtgggccgaattactggctcttgcagcgtctgcccagggacgtgtgtatcgcgcggaagaccctcatggtgcgctccgcggcctcttcgaagtccgtggactccttgccaaagacttagctgttgttgcattgcgcgaaggtcttgatttacctccgactgatgatccaatgcttcttgcgtacctcttggacccgtcaaacacgacgcccgaaggcgtagcccgtcgttacggcggcgagtggaccgaagatgcagcgaaacgcgcgttattggccgaacgtttgcacgaaaatttattaggacgtttgcaaggcgaggaacgtctcctctggctttacgaagaagtggagaaaccattgagtcgcgtgctcgcgcatatggaagctaccggtgtcaaattagacgtggcgtatttggagaatcttagccttgaagttgctgcccatatgcgccgcttggaggaagaagtattccgtttagcaggccgttcctttcgccttaactctcgcgatcagttagaacgtgtgttgttcgatgaacttggtctccctcctatcggcaagacagagaagaccggtaaacgtagcacttcagcggcggttttagaagctcttcgcgaagtccatcccattgtggacaagatcttgcagtaccgcgaaatggcgaaattgaaaggcacctatattgaccgtcttccggcattagtccacccgaaaacgggacgcctccatacccgcttcaaccaaacagccacggcgaccggtcgtttgtcctcctctgatccaaaccttcagaatattccagtacgtaccccattgggccagaagatccgccgtgcgtttgtagctgaggagggttggcgtttagtggccctcgattatcgtcaaattgaattacgtgtccttgcccatctttctggcgatgagaacctcatccgcgtgtttcaggaaggcaaagacattcacactcaaacggcaagctggatgtttggattatcagctgaagcgatcgatcctttgatgcgtcgtgcagcgaagaccatcaatttcggtgttctctacggtatgagtgcctttcgtttgtcgcaggaattaggcattccctatgaagaagctcaggcgttcattcagaaatactttcaaagctatcccaaagttaaagcatggatcgagaagactctcgaggaaggccgcacacgtggttacgtagagaccttatttggacgtcgccgctatgttcccgatttaaacgctcgcgtgaaaggcaagcgtgaagccgccgaacgcatggcgttcaacatgcctgtacagggcacggcagctgacctcatgaaacttgcaatggtgcgcctttttccacaattgcgtgaagttggtgcccgcatgctcttgcaggtccacgatgaactcttgttagaagcgccaaaagagcgtgcggaagaggtggcagccctcgcgaaagaagttatggaaggcgtgtggcccttagcggtgcctcttgaagtcgaagttggtattggcgaggattggctggctgccaaagga

SEQ ID NO: 5326 - protein, 841 aa, synthetic construct
  REGION 1..841: note = Variant of DNA polymerase I from Thermus sp. strain 2.9
MHHHHHHGGSGVLPVFEPKGRVLLVDGHHLAYRNFFALKGLTTSLGEPVQGVYGFAKSLLKALKEDGDVVIVVFDAKAPSFRHEAYEAYKAGRAPTPEDFPRQLALMKELVDLLGLERLEVPGFEADDVLATLAKKAEREGYEVQILTADRDLFQLLSPRISVLHPEGHRITPEWLWEKYGLRPEQWVDFRALAGDPSDNIPGVKGIGEKTALKLLKEWGSLENLLKNLDQVKPESVREKILAHLEDLKLSRELSRVRTDLPLEVDFGRRREPDWEGLKAFLERLEFGSLLHEFGLLESPLPAEEAPWPPPEGAFLGYRLSRPEPMWAELLALAASAQGRVYRAEDPHGALRGLFEVRGLLAKDLAVVALREGLDLPPTDDPMLLAYLLDPSNTTPEGVARRYGGEWTEDAAKRALLAERLHENLLGRLQGEERLLWLYEEVEKPLSRVLAHMEATGVKLDVAYLENLSLEVAAHMRRLEEEVFRLAGRSFRLNSRDQLERVLFDELGLPPIGKTEKTGKRSTSAAVLEALREVHPIVDKILQYREMAKLKGTYIDRLPALVHPKTGRLHTRFNQTATATGRLSSSDPNLQNIPVRTPLGQKIRRAFVAEEGWRLVALDYRQIELRVLAHLSGDENLIRVFQEGKDIHTQTASWMFGLSAEAIDPLMRRAAKTINFGVLYGMSAFRLSQELGIPYEEAQAFIQKYFQSYPKVKAWIEKTLEEGRTRGYVETLFGRRRYVPDLNARVKGKREAAERMAFNMPVQGTAADLMKLAMVRLFPQLREVGARMLLQVHDELLLEAPKERAEEVAALAKEVMEGVWPLAVPLEVEVGIGEDWLAAKG

SEQ ID NO: 5327 - DNA, 2523 bp, synthetic construct
  misc_feature 1..2523: note = Variant of DNA polymerase I from Thermus sp. strain 2.9
  source 1..2523: mol_type = other DNA
atgcaccatcatcatcatcatggcggtagcggcgtgttaccggtgttcgagcctaaaggtcgcgtgcttctggttgatggccatcatctcgcgtatcgtaacttctttgccctgaaaggattaaccaccagcctgggcgagccggtacagggtgtctacggctttgcaaagtcgctcctgaaagctctgaaagaagacggtgatgtggtgattgttgtctttgatgcgaaagcgccaagttttcgccacgaagcgtacgaagcttacaaagccgggcgtgctccaacgccggaagactttcctcgccaattggcgcttatgaaggaattagtggatttgcttggcctcgaacgcttggaagttcccggtttcgaggcagacgacgtattagcgactctcgcaaagaaagccgaacgtgagggctatgaagtccagatcttgacagcagatcgcgatcttttccagcttttatctccgcgcatctcggtgttacacccggaagggcatcgtatcaccccggaatggctctgggagaaatatggtttgcgtcccgaacaatgggtggattttcgcgccttagcaggcgatccgagcgacaatattccgggagttaaaggtatcggcgagaagacggcgctcaagctccttaaagaatgggggtcgttggagaacttgcttaagaatttagatcaggtcaaaccagagtcagtgcgtgagaagattcttgctcacctcgaagacctcaaattaagccgcgaattgtcccgtgtacgcaccgatttgccgctcgaagttgatttcggccgccgccgcgaacctgactgggagggtcttaaagcgtttttagagcgtcttgaatttggttcgctcttgcatgaattcggccttttagaaagcccgttactggccgaagaagcaccttggccaccgcccgagggcgcgtttttaggttaccgtttgagtcgcccggaaccgatgtgggccgaattactggctcttgcagcgtctgcccagggacgtgtgtatcgcgcggaagaccctcatggtgcgctccgcggcctcttcgaagtccgtggactccttgccaaagacttagctgttgttgcattgcgcgaaggtcttgatttacctccgactgatgatccaatgcttcttgcgtacctcttggacccgtcaaacacgacgcccgaaggcgtagcccgtcgttacggcggcgagtggaccgaagatgcagcgaaacgcgcgttattggccgaacgtttgcacgaaaatttattaggacgtttgcaaggcgaggaacgtctcctctggctttacgaagaagtggagaaaccattgagtcgcgtgctcgcgcatatggaagctaccggtgtcaaattagacgtggcgtatttggagaatctcagccttgaagttgctgcccacatgcgccgcttggaggaagaagtattccgtttagcaggccgttcctttcgccttaactctcgcgatcagttagaacgtgtgttgttcgatgaacttggtctccctcctatcggcaagacagagaagaccggtaaacgtagcacttcagcggcggttttagaagctcttcgcgaagtccatcccattgtggacaagatcttgcagtaccgcgaaatggcgaaattgaaaggcacctatattgaccgtcttccggcattagtccacccgaaaacgggacgcctccatacccgcttcaaccaaacagccacggcgaccggtcgtttgtcctcctctgatccaaaccttcagaatattccagtacgtaccccattgggccagaagatccgccgtgcgtttgtagctgaggagggttggcgtttagtggccctcgattatagtcaaattgaattacgtgtccttgcccatctttctggcgatgagaacctcatccgcgtgtttcaggaaggcaaagacattcacactcaaacggcaagctggatgtttggattatcagctgaagcgatcgatcctttgatgcgtcgtgcagcgaagaccatcaatttcggtgttctctacggtatgagtgcctttcgtttgtcgcaggaattaggcattccctatgaagaagctcaggcgttcattcagaaatactttcaaagctatcccaaagttaaagcatggatcgagaagactctccgtgaaggccgcacacgtggttacgtagagaccttatttggacgtcgccgctatgttcccgatttaaacgctcgcgtgaaaggcgtacgtgaagccgccgaacgcatggcgttcaacatgcctgtacagggcacggcagctgacctcatgaaacttgcaatggtgcgcctttttccacaattgcgtgaagttggtgcccgcatgctcttgcaggtccacgatgaactcttgttagaagcgccaaaagagcgtgcggaagaggtggcagccctcgcgaaagaagttatggaaggcgtgtggcccttagcggtgcctcttgaagtcgaagttggtattggcgaggattggctggctgccaaagga

SEQ ID NO: 5328 - protein, 841 aa, synthetic construct
  REGION 1..841: note = Variant of DNA polymerase I from Thermus sp. strain 2.9
MHHHHHHGGSGVLPVFEPKGRVLLVDGHHLAYRNFFALKGLTTSLGEPVQGVYGFAKSLLKALKEDGDVVIVVFDAKAPSFRHEAYEAYKAGRAPTPEDFPRQLALMKELVDLLGLERLEVPGFEADDVLATLAKKAEREGYEVQILTADRDLFQLLSPRISVLHPEGHRITPEWLWEKYGLRPEQWVDFRALAGDPSDNIPGVKGIGEKTALKLLKEWGSLENLLKNLDQVKPESVREKILAHLEDLKLSRELSRVRTDLPLEVDFGRRREPDWEGLKAFLERLEFGSLLHEFGLLESPLLAEEAPWPPPEGAFLGYRLSRPEPMWAELLALAASAQGRVYRAEDPHGALRGLFEVRGLLAKDLAVVALREGLDLPPTDDPMLLAYLLDPSNTTPEGVARRYGGEWTEDAAKRALLAERLHENLLGRLQGEERLLWLYEEVEKPLSRVLAHMEATGVKLDVAYLENLSLEVAAHMRRLEEEVFRLAGRSFRLNSRDQLERVLFDELGLPPIGKTEKTGKRSTSAAVLEALREVHPIVDKILQYREMAKLKGTYIDRLPALVHPKTGRLHTRFNQTATATGRLSSSDPNLQNIPVRTPLGQKIRRAFVAEEGWRLVALDYSQIELRVLAHLSGDENLIRVFQEGKDIHTQTASWMFGLSAEAIDPLMRRAAKTINFGVLYGMSAFRLSQELGIPYEEAQAFIQKYFQSYPKVKAWIEKTLREGRTRGYVETLFGRRRYVPDLNARVKGVREAAERMAFNMPVQGTAADLMKLAMVRLFPQLREVGARMLLQVHDELLLEAPKERAEEVAALAKEVMEGVWPLAVPLEVEVGIGEDWLAAKG

SEQ ID NO: 5329 - DNA, 2523 bp, synthetic construct
  misc_feature 1..2523: note = Variant of DNA polymerase I from Thermus sp. strain 2.9
  source 1..2523: mol_type = other DNA
atgcaccatcatcatcatcatggcggtagcggcgtgttaccggtgttcgagcctaaaggtcgcgtgcttctggttgatggccatcatctcgcgtatcgtaacttctttgccctgaaaggattaaccaccagcctgggcgagccggtacagggtgtctacggctttgcaaagtcgctcctgaaagctctgaaagaagacggtgatgtggtgattgttgtctttgatgcgaaagcgccaagttttcgccacgaagcgtacgaagcttacaaagccgggcgtgctccaacgccggaagactttcctcgccaattggcgcttatgaaggaattagtggatttgcttggcctcgaacgcttggaagttcccggtttcgaggcagacgacgtattagcgactctcgcaaagaaagccgaacgtgagggctatgaagtccagatcttgacagcagatcgcgatcttttccagcttttatctccgcgcatctcggtgttacacccggaagggcatcgtatcaccccggaatggctctgggagaaatatggtttgcgtcccgaacaatgggtggattttcgcgccttagcaggcgatccgagcgacaatattccgggagttaaaggtatcggcgagaagacggcgctcaagctccttaaagaatgggggtcgttggagaacttgcttaagaatttagatcaggtcaaaccagagtcagtgcgtgagaagattcttgctcacctcgaagacctcaaattaagccgcgaattgtcccgtgtacgcaccgatttgccgctcgaagttgatttcggtcgccgccgcgaacctgactgggagggtcttaaagcgtttttagagcgtcttgaatttggttcgctcttgcatgaattcggccttttagaaagcccgttactggccgaagaagcaccttggccaccgcccgagggcgcgtttttaggttaccgtttgagtcgcccggaaccgatgtgggccgaattactggctcttgcagcgtctgcccagggacgtgtgtatcgcgcggaagaccctcatggtgcgctccgcggcctcttcgaagtccgtggactccttgccaaagacttagctgttgttgcattgcgcgaaggtcttgatttacctccgactgatgatccaatgcttcttgcgtacctcttggacccgtcaaacacgacgcccgaaggcgtagcccgtcgttacggcggcgagtggaccgaagatgcagcgaaacgcgcgttattggccgaacgtttgcacgaaaatttattaggacgtttgcaaggcgaggaacgtctcctctggctttacgaagaagtggagaaaccattgagtcgcgtgctcgcgcatatggaagctaccggtgtcaaattagacgtggcgtatttggagaatctcagccttgaagttgctgcccacatgcgccgcttggaggaagaagtattccgtttagcaggccgttcctttcgccttaactctcgcgatcagttagaacgtgtgttgttcgatgaacttggtctccctcctatcggcaagacagagaagaccggtaaacgtagcacttcagcggcggttttagaagctcttcgcgaagtccatcccattgtggacaagatcttgcagtaccgcgaaatggcgaaattgaaaggcacctatattgaccgtcttccggcattagtccacccgaaaacgggacgcctccatacccgcttcaaccaaacagccacggcgaccggtcgtttgtcctcctctgatccaaaccttcagaatattccagtacgtaccccattgggccagaagatccgccgtgcgtttgtagctgaggagggttggcgtttagtggccctcgattatcgtcaaattgaattacgtgtccttgcccatctttctggcgatgagaacctcatccgcgtgtttcaggaaggcaaagacattcacactcaaacggcaagctggatgtttggattatcagctgaagcgatcgatcctttgatgcgtcgtgcagcgaagaccatcaatttcggtgttctctacggtatgagtgcctttcgtttgtcgcaggaattaggcattccctatgaagaagctcaggcgttcattcagaaatactttcaaagctatcccaaagttaaagcatggatcgagaagactctcgaagaaggccgcacacgtggttacgtagagaccttatttggacgtcgccgctatgttcccgatttaaacgctcgcgtgaaaggcaagcgtgaagccgccgaacgcatggcgttcaacatgcctgtacagggcacggcagctgacctcatgaaacttgcaatggtgcgcctttttccacaattgcgtgaagttggtgcccgcatgctcttgcaggtccacgatgaactcttgttagaagcgccaaaagagcgtgcggaagaggtggcagccctcgcgaaagaagttatggaaggcgtgtggcccttagcggtgcctcttgaagtcgaagttggtattggcgaggattggctggctgccaaagga

SEQ ID NO: 5330 - protein, 841 aa, synthetic construct
  REGION 1..841: note = Variant of DNA polymerase I from Thermus sp. strain 2.9
MHHHHHHGGSGVLPVFEPKGRVLLVDGHHLAYRNFFALKGLTTSLGEPVQGVYGFAKSLLKALKEDGDVVIVVFDAKAPSFRHEAYEAYKAGRAPTPEDFPRQLALMKELVDLLGLERLEVPGFEADDVLATLAKKAEREGYEVQILTADRDLFQLLSPRISVLHPEGHRITPEWLWEKYGLRPEQWVDFRALAGDPSDNIPGVKGIGEKTALKLLKEWGSLENLLKNLDQVKPESVREKILAHLEDLKLSRELSRVRTDLPLEVDFGRRREPDWEGLKAFLERLEFGSLLHEFGLLESPLLAEEAPWPPPEGAFLGYRLSRPEPMWAELLALAASAQGRVYRAEDPHGALRGLFEVRGLLAKDLAVVALREGLDLPPTDDPMLLAYLLDPSNTTPEGVARRYGGEWTEDAAKRALLAERLHENLLGRLQGEERLLWLYEEVEKPLSRVLAHMEATGVKLDVAYLENLSLEVAAHMRRLEEEVFRLAGRSFRLNSRDQLERVLFDELGLPPIGKTEKTGKRSTSAAVLEALREVHPIVDKILQYREMAKLKGTYIDRLPALVHPKTGRLHTRFNQTATATGRLSSSDPNLQNIPVRTPLGQKIRRAFVAEEGWRLVALDYRQIELRVLAHLSGDENLIRVFQEGKDIHTQTASWMFGLSAEAIDPLMRRAAKTINFGVLYGMSAFRLSQELGIPYEEAQAFIQKYFQSYPKVKAWIEKTLEEGRTRGYVETLFGRRRYVPDLNARVKGKREAAERMAFNMPVQGTAADLMKLAMVRLFPQLREVGARMLLQVHDELLLEAPKERAEEVAALAKEVMEGVWPLAVPLEVEVGIGEDWLAAKG

SEQ ID NO: 5331 - DNA, 2523 bp, synthetic construct
  misc_feature 1..2523: note = Variant of DNA polymerase I from Thermus sp. strain 2.9
  source 1..2523: mol_type = other DNA
atgcaccatcatcatcatcatggcggtagcggcgtgttaccggtgttcgagcctaaaggtcgcgtgcttctggttgatggccatcatctcgcgtatcgtaacttctttgccctgaaaggattaaccaccagcctgggcgagccggtacagggtgtctacggctttgcaaagtcgctcctgaaagctctgaaagaagacggtgatgtggtgattgttgtctttgatgcgaaagcgccaagttttcgccacgaagcgtacgaagcttacaaagccgggcgtgctccaacgccggaagactttcctcgccaattggcgcttatgaaggaattagtggatttgcttggcctcgaacgcttggaagttcccggtttcgaggcagacgacgtattagcgactctcgcaaagaaagccgaacgtgagggctatgaagtccagatcttgacagcagatcgcgatcttttccagcttttatctccgcgcatctcggtgttacacccggaagggcatcgtatcaccccggaatggctctgggagaaatatggtttgcgtcccgaacaatgggtggattttcgcgccttagcaggcgatccgagcgacaatattccgggagttaaaggtatcggcgagaagacggcgctcaagctccttaaagaatgggggtcgttggagaacttgcttaagaatttagatcaggtcaaaccagagtcagtgcgtgagaagattcttgctcacctcgaagacctcaaattaagccgcgaattgtcccgtgtacgcaccgatttgccgctcgaagttgatttcggtcgccgccgcgaacctgactgggagggtcttaaagcgtttttagagcgtcttgaatttggttcgctcttgcatgaattcggccttttagaaagcccgttactggccgaagaagcaccttggccaccgcccgagggcgcgtttttaggttaccgtttgagtcgcccggaaccgatgtgggccgaattactggctcttgcagcgtctgcccagggacgtgtgtatcgcgcggaagaccctcatggtgcgctccgcggcctcttcgaagtccgtggactccttgccaaagacttagctgttgttgcattgcgcgaaggtcttgatttacctccgactgatgatccaatgcttcttgcgtacctcttggacccgtcaaacacgacgcccgaaggcgtagcccgtcgttacggcggcgagtggaccgaagatgcagcgaaacgcgcgttattggccgaacgtttgcacgaaaatttattaggacgtttgcaaggcgaggaacgtctcctctggctttacgaagaagtggagaaaccattgagtcgcgtgctcgcgcatatggaagctaccggtgtcaaattagacgtggcgtatttggagaatctcagccttgaagttgctgcccacatgcgccgcttggaggaagaagtattccgtttagcaggccgttcctttcgccttaactctcgcgatcagttagaacgtgtgttgttcgatgaacttggtctccctcctatcggcaagacagagaagaccggtaaacgtagcacttcagcggcggttttagaagctcttcgcgaagtccatcccattgtggacaagatcttgcagtaccgcgaaatggcgaaattgaaaggcacctatattgaccgtcttccggcattagtccacccgaaaacgggacgcctccatacccgcttcaaccaaacagccacggcgaccggtcgtttgtcctcctctgatccaaaccttcagaatattccagtacgtaccccattgggccagaagatccgccgtgcgtttgtagctgaggagggttggcgtttagtggccctcgattatcgtcaaattgaattacgtgtccttgcccatctttctggcgatgagaacctcatccgcgtgtttcaggaaggcaaagacattcacactcaaacggcaagctggatgtttggattatcagctgaagcgatcgatcctttgatgcgtcgtgcagcgaagaccatcaatttcggtgttctctacggtatgagtgcctttcgtttgtcgcaggaattaggcattccctatgaagaagctcaggcgttcattcagaaatactttcaaacgtatcccaaagttaaagcatggatcgagaagactctccgtgaaggccgcacacgtggttacgtagagaccttatttggacgtcgccgctatgttcccgatttaaacgctcgcgtgaaaggcaagcgtgaagccgccgaacgcatggcgttcaacatgcctgtacagggcacggcagctgacctcatgaaacttgcaatggtgcgcctttttccacaattgcgtgaagttggtgcccgcatgctcttgcaggtccacgatgaactcttgttagaagcgccaaaagagcgtgcggaagaggtggcagccctcgcgaaagaagttatggaaggcgtgtggcccttagcggtgcctcttgaagtcgaagttggtattggcgaggattggctggctgccaaagga

SEQ ID NO: 5332 - protein, 841 aa, synthetic construct
  REGION 1..841: note = Variant of DNA polymerase I from Thermus sp. strain 2.9
MHHHHHHGGSGVLPVFEPKGRVLLVDGHHLAYRNFFALKGLTTSLGEPVQGVYGFAKSLLKALKEDGDVVIVVFDAKAPSFRHEAYEAYKAGRAPTPEDFPRQLALMKELVDLLGLERLEVPGFEADDVLATLAKKAEREGYEVQILTADRDLFQLLSPRISVLHPEGHRITPEWLWEKYGLRPEQWVDFRALAGDPSDNIPGVKGIGEKTALKLLKEWGSLENLLKNLDQVKPESVREKILAHLEDLKLSRELSRVRTDLPLEVDFGRRREPDWEGLKAFLERLEFGSLLHEFGLLESPLLAEEAPWPPPEGAFLGYRLSRPEPMWAELLALAASAQGRVYRAEDPHGALRGLFEVRGLLAKDLAVVALREGLDLPPTDDPMLLAYLLDPSNTTPEGVARRYGGEWTEDAAKRALLAERLHENLLGRLQGEERLLWLYEEVEKPLSRVLAHMEATGVKLDVAYLENLSLEVAAHMRRLEEEVFRLAGRSFRLNSRDQLERVLFDELGLPPIGKTEKTGKRSTSAAVLEALREVHPIVDKILQYREMAKLKGTYIDRLPALVHPKTGRLHTRFNQTATATGRLSSSDPNLQNIPVRTPLGQKIRRAFVAEEGWRLVALDYRQIELRVLAHLSGDENLIRVFQEGKDIHTQTASWMFGLSAEAIDPLMRRAAKTINFGVLYGMSAFRLSQELGIPYEEAQAFIQKYFQTYPKVKAWIEKTLREGRTRGYVETLFGRRRYVPDLNARVKGKREAAERMAFNMPVQGTAADLMKLAMVRLFPQLREVGARMLLQVHDELLLEAPKERAEEVAALAKEVMEGVWPLAVPLEVEVGIGEDWLAAKG

SEQ ID NO: 5333 - DNA, 2523 bp, synthetic construct
  misc_feature 1..2523: note = Variant of DNA polymerase I from Thermus sp. strain 2.9
  source 1..2523: mol_type = other DNA
atgcaccatcatcatcatcatggcggtagcggcgtgttaccggtgttcgagcctaaaggtcgcgtgcttctggttgatggccatcatctcgcgtatcgtaacttctttgccctgaaaggattaaccaccagcctgggcgagccggtacagggtgtctacggctttgcaaagtcgctcctgaaagctctgaaagaagacggtgatgtggtgattgttgtctttgatgcgaaagcgccaagttttcgccacgaagcgtacgaagcttacaaagccgggcgtgctccaacgccggaagactttcctcgccaattggcgcttatgaaggaattagtggatttgcttggcctcgaacgcttggaagttcccggtttcgaggcagacgacgtattagcgactctcgcaaagaaagccgaacgtgagggctatgaagtccagatcttgacagcagatcgcgatcttttccagcttttatctccgcgcatctcggtgttacacccggaagggcatcgtatcaccccggaatggctctgggagaaatatggtttgcgtcccgaacaatgggtggattttcgcgccttagcaggcgatccgagcgacaatattccgggagttaaaggtatcggcgagaagacggcgctcaagctccttaaagaatgggggtcgttggagaacttgcttaagaatttagatcaggtcaaaccagagtcagtgcgtgagaagattcttgctcacctcgaagacctcaaattaagccgcgaattgtcccgtgtacgcaccgatttgccgctcgaagttgatttcggtcgccgccgcgaacctgactgggagggtcttaaagcgtttttagagcgtcttgaatttggttcgctcttgcatgaattcggccttttagaaagcccgttactggccgaagaagcaccttggccaccgcccgagggcgcgtttttaggttaccgtttgagtcgcccggaaccgatgtgggccgaattactggctcttgcagcgtctgcccagggacgtgtgtatcgcgcggaagaccctcatggtgcgctccgcggcctcttcgaagtccgtggactccttgccaaagacttagctgttgttgcattgcgcgaaggtcttgatttacctccgactgatgatccaatgcttcttgcgtacctcttggacccgtcaaacacgacgcccgaaggcgtagcccgtcgttacggcggcgagtggaccgaagatgcagcgaaacgcgcgttattggccgaacgtttgcacgaaaatttattaggacgtttgcaaggcgaggaacgtctcctctggctttacgaagaagtggagaaaccattgagtcgcgtgctcgcgcatatggaagctaccggtgtcaaattagacgtggcgtatttggagaatctcagccttgaagttgctgcccacatgcgccgcttggaggaagaagtattccgtttagcaggccgttcctttcgccttaactctcgcgatcagttagaacgtgtgttgttcgatgaacttggtctccctcctatcggcaagacagagaagaccggtaaacgtagcacttcagcggcggttttagaagctcttcgcgaagtccatcccattgtggacaagatcttgcagtaccgcgaaatggcgaaattgaaaggcacctatattgaccgtcttccggcattagtccacccgaaaacgggacgcctccatacccgcttcaaccaaacagccacggcgaccggtcgtttgtcctcctctgatccaaaccttcagaatattccagtacgtaccccattgggccagaagatccgccgtgcgtttgtagctgaggagggttggcgtttagtggccctcgattatcgtcaaattgaattacgtgtccttgcccatctttctggcgatgagaacctcatccgcgtgtttcaggaaggcaaagacattcacactcaaacggcaagctggatgtttggattatcagctgaagcgatcgatcctttgatgcgtcgtgcagcgaagaccatcaatttcggtgttctctacggtatgagtgcctttcgtttgtcgcaggaattaggcattccctatgaagaagctcaggcgttcattcagaaatactttcaaagctatcccaaagttaaagcatggatcgagaagactctccgtgaaggccgcacacgtggttacgtagagaccttatttggacgtcgccgctatgttcccgatttaaacgctcgcgtgaaaggcaagcgtgaagccgccgaacgcatggcgttcaacatgcctgtacagggcacggcagctgacctcatgaaacttgcaatggtgcgcctttttccacaattgcgtgaagttggtgccccgatgctcttgcaggtccacgatgaactcttgttagaagcgccaaaagagcgtgcggaagaggtggcagccctcgcgaaagaagttatggaaggcgtgtggcccttagcggtgcctcttgaagtcgaagttggtattggcgaggattggctggctgccaaagga

SEQ ID NO: 5334 - protein, 841 aa, synthetic construct
  REGION 1..841: note = Variant of DNA polymerase I from Thermus sp. strain 2.9
MHHHHHHGGSGVLPVFEPKGRVLLVDGHHLAYRNFFALKGLTTSLGEPVQGVYGFAKSLLKALKEDGDVVIVVFDAKAPSFRHEAYEAYKAGRAPTPEDFPRQLALMKELVDLLGLERLEVPGFEADDVLATLAKKAEREGYEVQILTADRDLFQLLSPRISVLHPEGHRITPEWLWEKYGLRPEQWVDFRALAGDPSDNIPGVKGIGEKTALKLLKEWGSLENLLKNLDQVKPESVREKILAHLEDLKLSRELSRVRTDLPLEVDFGRRREPDWEGLKAFLERLEFGSLLHEFGLLESPLLAEEAPWPPPEGAFLGYRLSRPEPMWAELLALAASAQGRVYRAEDPHGALRGLFEVRGLLAKDLAVVALREGLDLPPTDDPMLLAYLLDPSNTTPEGVARRYGGEWTEDAAKRALLAERLHENLLGRLQGEERLLWLYEEVEKPLSRVLAHMEATGVKLDVAYLENLSLEVAAHMRRLEEEVFRLAGRSFRLNSRDQLERVLFDELGLPPIGKTEKTGKRSTSAAVLEALREVHPIVDKILQYREMAKLKGTYIDRLPALVHPKTGRLHTRFNQTATATGRLSSSDPNLQNIPVRTPLGQKIRRAFVAEEGWRLVALDYRQIELRVLAHLSGDENLIRVFQEGKDIHTQTASWMFGLSAEAIDPLMRRAAKTINFGVLYGMSAFRLSQELGIPYEEAQAFIQKYFQSYPKVKAWIEKTLREGRTRGYVETLFGRRRYVPDLNARVKGKREAAERMAFNMPVQGTAADLMKLAMVRLFPQLREVGAPMLLQVHDELLLEAPKERAEEVAALAKEVMEGVWPLAVPLEVEVGIGEDWLAAKG

SEQ ID NO: 5335 - DNA, 2523 bp, synthetic construct
  misc_feature 1..2523: note = Variant of DNA polymerase I from Thermus sp. strain 2.9
  source 1..2523: mol_type = other DNA
atgcaccatcatcatcatcatggcggtagcggcgtgttaccggtgttcgagcctaaaggtcgcgtgcttctggttgatggccatcatctcgcgtatcgtaacttctttgccctgaaaggattaaccaccagcctgggcgagccggtacagggtgtctacggctttgcaaagtcgctcctgaaagctctgaaagaagacggtgatgtggtgattgttgtctttgatgcgaaagcgccaagttttcgccacgaagcgtacgaagcttacaaagccgggcgtgctccaacgccggaagactttcctcgccaattggcgcttatgaaggaattagtggatttgcttggcctcgaacgcttggaagttcccggtttcgaggcagacgacgtattagcgactctcgcaaagaaagccgaacgtgagggctatgaagtccagatcttgacagcagatcgcgatcttttccagcttttatctccgcgcatctcggtgttacacccggaagggcatcgtatcaccccggaatggctctgggagaaatatggtttgcgtcccgaacaatgggtggattttcgcgccttagcaggcgatccgagcgacaatattccgggagttaaaggtatcggcgagaagacggcgctcaagctccttaaagaatgggggtcgttggagaacttgcttaagaatttagatcaggtcaaaccagagtcagtgcgtgagaagattcttgctcacctcgaagacctcaaattaagccgcgaattgtcccgtgtacgcaccgatttgccgctcgaagttgatttcggtcgccgccgcgaacctgactgggagggtcttaaagcgtttttagagcgtcttgaatttggttcgctcttgcatgaattcggccttttagaaagcccgttactggccgaagaagcaccttggccaccgcccgagggcgcgtttttaggttaccgtttgagtcgcccggaaccgatgtgggccgaattactggctcttgcagcgtctgcccagggacgtgtgtatcgcgcggaagaccctcatggtgcgctccgcggcctcttcgaagtccgtggactccttgccaaagacttagctgttgttgcattgcgcgaaggtcttgatttacctccgactgatgatccaatgcttcttgcgtacctcttggacccgtcaaacacgacgcccgaaggcgtagcccgtcgttacggcggcgagtggaccgaagatgcagcgaaacgcgcgttattggccgaacgtttgcacgaaaatttattaggacgtttgcaaggcgaggaacgtctcctctggctttacgaagaagtggagaaaccattgagtcgcgtgctcgcgcatatggaagctaccggtgtcaaattagacgtggcgtatttggagaatctcagccttgaagttgctgcccacatgcgccgcttggaggaagaagtattccgtttagcaggccgttcctttcgccttaactctcgcgatcagttagaacgtgtgttgttcgatgaacttggtctccctcctatcggcaagacagagaagaccggtaaacgtagcacttcagcggcggttttagaagctcttcgcgaagtccatcccattgtggacaagatcttgcagtaccgcgaaatggcgtatttgaaaggcacctatattgaccgtcttccggcattagtccacccgaaaacgggacgcctccatacccgcttcaaccaaacagccacggcgaccggtcgtttgtcctcctctgatccaaaccttcagaatattccagtacgtaccccattgggccagaagatccgccgtgcgtttgtagctgaggagggttggcgtttagtggccctcgattatcgtcaaattgaattacgtgtccttgcccatctttctggcgatgagaacctcatccgcgtgtttcaggaaggcaaagacattcacactcaaacggcaagctggatgtttggattatcagctgaagcgatcgatcctttgatgcgtcgtgcagcgaagaccatcaatttcggtgttctctacggtatgagtgcctttcgtttgtcgcaggaattaggcattccctatgaagaagctcaggcgttcattcagaaatactttcaaagctatcccaaagttaaagcatggatcgagaagactctccgtgaaggccgcacacgtggttacgtagagaccttatttggacgtcgccgctatgttcccgatttaaacgctcgcgtgaaaggcaagcgtgaagccgccgaacgcatggcgttcaacatgcctgtacagggcacggcagctgacctcatgaaacttgcaatggtgcgcctttttccacaattgcgtgaagttggtgcccgcatgctcttgcaggtccacgatgaactcttgttagaagcgccaaaagagcgtgcggaagaggtggcagccctcgcgaaagaagttatggaaggcgtgtggcccttagcggtgcctcttgaagtcgaagttggtattggcgaggattggctggctgccaaagga

SEQ ID NO: 5336 - protein, 841 aa, synthetic construct
  REGION 1..841: note = Variant of DNA polymerase I from Thermus sp. strain 2.9
MHHHHHHGGSGVLPVFEPKGRVLLVDGHHLAYRNFFALKGLTTSLGEPVQGVYGFAKSLLKALKEDGDVVIVVFDAKAPSFRHEAYEAYKAGRAPTPEDFPRQLALMKELVDLLGLERLEVPGFEADDVLATLAKKAEREGYEVQILTADRDLFQLLSPRISVLHPEGHRITPEWLWEKYGLRPEQWVDFRALAGDPSDNIPGVKGIGEKTALKLLKEWGSLENLLKNLDQVKPESVREKILAHLEDLKLSRELSRVRTDLPLEVDFGRRREPDWEGLKAFLERLEFGSLLHEFGLLESPLLAEEAPWPPPEGAFLGYRLSRPEPMWAELLALAASAQGRVYRAEDPHGALRGLFEVRGLLAKDLAVVALREGLDLPPTDDPMLLAYLLDPSNTTPEGVARRYGGEWTEDAAKRALLAERLHENLLGRLQGEERLLWLYEEVEKPLSRVLAHMEATGVKLDVAYLENLSLEVAAHMRRLEEEVFRLAGRSFRLNSRDQLERVLFDELGLPPIGKTEKTGKRSTSAAVLEALREVHPIVDKILQYREMAYLKGTYIDRLPALVHPKTGRLHTRFNQTATATGRLSSSDPNLQNIPVRTPLGQKIRRAFVAEEGWRLVALDYRQIELRVLAHLSGDENLIRVFQEGKDIHTQTASWMFGLSAEAIDPLMRRAAKTINFGVLYGMSAFRLSQELGIPYEEAQAFIQKYFQSYPKVKAWIEKTLREGRTRGYVETLFGRRRYVPDLNARVKGKREAAERMAFNMPVQGTAADLMKLAMVRLFPQLREVGARMLLQVHDELLLEAPKERAEEVAALAKEVMEGVWPLAVPLEVEVGIGEDWLAAKG

SEQ ID NO: 5337 - DNA, 2523 bp, synthetic construct
  misc_feature 1..2523: note = Variant of DNA polymerase I from Thermus sp. strain 2.9
  source 1..2523: mol_type = other DNA
atgcaccatcatcatcatcatggcggtagcggcgtgttaccggtgttcgagcctaaaggtcgcgtgcttctggttgatggccatcatctcgcgtatcgtaacttctttgccctgaaaggattaaccaccagcctgggcgagccggtacagggtgtctacggctttgcaaagtcgctcctgaaagctctgaaagaagacggtgatgtggtgattgttgtctttgatgcgaaagcgccaagttttcgccacgaagcgtacgaagcttacaaagccgggcgtgctccaacgccggaagactttcctcgccaattggcgcttatgaaggaattagtggatttgcttggcctcgaacgcttggaagttcccggtttcgaggcagacgacgtattagcgactctcgcaaagaaagccgaacgtgagggctatgaagtccagatcttgacagcagatcgcgatcttttccagcttttatctccgcgcatctcggtgttacacccggaagggcatcgtatcaccccggaatggctctgggagaaatatggtttgcgtcccgaacaatgggtggattttcgcgccttagcaggcgatccgagcgacaatattccgggagttaaaggtatcggcgagaagacggcgctcaagctccttaaagaatgggggtcgttggagaacttgcttaagaatttagatcaggtcaaaccagagtcagtgcgtgagaagattcttgctcacctcgaagacctcaaattaagccgcgaattgtcccgtgtacgcaccgatttgccgctcgaagttgatttcggtcgccgccgcgaacctgactgggagggtcttaaagcgtttttagagcgtcttgaatttggttcgctcttgcatgaattcggccttttagaaagcccgttactggccgaagaagcaccttggccaccgcccgagggcgcgtttttaggttaccgtttgagtcgcccggaaccgatgtgggccgaattactggctcttgcagcgtctgcccagggacgtgtgtatcgcgcggaagaccctcatggtgcgctccgcggcctcttcgaagtccgtggactccttgccaaagacttagctgttgttgcattgcgcgaaggtcttgatttacctccgactgatgatccaatgcttcttgcgtacctcttggacccgtcaaacacgacgcccgaaggcgtagcccgtcgttacggcggcgagtggaccgaagatgcagcgaaacgcgcgttattggccgaacgtttgcacgaaaatttattaggacgtttgcaaggcgaggaacgtctcctctggctttacgaagaagtggagaaaccattgagtcgcgtgctcgcgcatatggaagctaccggtgtcaaattagacgtggcgtatttggagaatctcagccttgaagttgctgcccacatgcgccgcttggaggaagaagtattccgtttagcaggccgttcctttcgccttaactctcgcgatcagttagaacgtgtgttgttcgatgaacttggtctccctcctatcggcaagacagagaagaccggtaaacgtagcacttcagcggcggttttagaagctcttcgcaaagtccatcccattgtggacaagatcagtcagtaccgcgaaatggcgaaattgaaaggcacctatattgaccgtcttccggcattagtccacccgaaaacgggacgcctccatacccgcttcaaccaaacagccacggcgaccggtcgtttgtcctcctctgatccaaaccttcagaatattccagtacgtaccccattgggccagaagatccgccgtgcgtttgtagctgaggagggttggcgtttagtggccctcgattatcgtcaaattgaattacgtgtccttgcccatctttctggcgatgagaacctcatccgcgtgtttcaggaaggcaaagacattcacactcaaacggcaagctggatgtttggattatcagctgaagcgatcgatcctttgatgcgtcgtgcagcgaagaccatcaatttcggtgttctctacggtatgagtgcctttcgtttgtcgcaggaattaggcattccctatgaagaagctcaggcgttcattcagaaatactttcaaagctatcccaaagttaaagcatggatcgagaagactctccgtgaaggccgcacacgtggttacgtagagaccttatttggacgtcgccgctatgttcccgatttaaacgctcgcgtgaaaggcaagcgtgaagccgccgaacgcatggcgttcaacatgcctgtacagggcacggcagctgacctcatgaaacttgcaatggtgcgcctttttccacaattgcgtgaagttggtgcccgcatgctcttgcaggtccacgatgaactcttgttagaagcgccaaaagagcgtgcggaagaggtggcagccctcgcgaaagaagttatggaaggcgtgtggcccttagcggtgcctcttgaagtcgaagttggtattggcgaggattggctggctgccaaagga

SEQ ID NO: 5338 - protein, 841 aa, synthetic construct
  REGION 1..841: note = Variant of DNA polymerase I from Thermus sp. strain 2.9
MHHHHHHGGSGVLPVFEPKGRVLLVDGHHLAYRNFFALKGLTTSLGEPVQGVYGFAKSLLKALKEDGDVVIVVFDAKAPSFRHEAYEAYKAGRAPTPEDFPRQLALMKELVDLLGLERLEVPGFEADDVLATLAKKAEREGYEVQILTADRDLFQLLSPRISVLHPEGHRITPEWLWEKYGLRPEQWVDFRALAGDPSDNIPGVKGIGEKTALKLLKEWGSLENLLKNLDQVKPESVREKILAHLEDLKLSRELSRVRTDLPLEVDFGRRREPDWEGLKAFLERLEFGSLLHEFGLLESPLLAEEAPWPPPEGAFLGYRLSRPEPMWAELLALAASAQGRVYRAEDPHGALRGLFEVRGLLAKDLAVVALREGLDLPPTDDPMLLAYLLDPSNTTPEGVARRYGGEWTEDAAKRALLAERLHENLLGRLQGEERLLWLYEEVEKPLSRVLAHMEATGVKLDVAYLENLSLEVAAHMRRLEEEVFRLAGRSFRLNSRDQLERVLFDELGLPPIGKTEKTGKRSTSAAVLEALRKVHPIVDKISQYREMAKLKGTYIDRLPALVHPKTGRLHTRFNQTATATGRLSSSDPNLQNIPVRTPLGQKIRRAFVAEEGWRLVALDYRQIELRVLAHLSGDENLIRVFQEGKDIHTQTASWMFGLSAEAIDPLMRRAAKTINFGVLYGMSAFRLSQELGIPYEEAQAFIQKYFQSYPKVKAWIEKTLREGRTRGYVETLFGRRRYVPDLNARVKGKREAAERMAFNMPVQGTAADLMKLAMVRLFPQLREVGARMLLQVHDELLLEAPKERAEEVAALAKEVMEGVWPLAVPLEVEVGIGEDWLAAKG

SEQ ID NO: 5339 - DNA, 2523 bp, synthetic construct
  misc_feature 1..2523: note = Variant of DNA polymerase I from Thermus sp. strain 2.9
  source 1..2523: mol_type = other DNA
atgcaccatcatcatcatcatggcggtagcggcgtgttaccggtgttcgagcctaaaggtcgcgtgcttctggttgatggccatcatctcgcgtatcgtaacttctttgccctgaaaggattaaccaccagcctgggcgagccggtacagggtgtctacggctttgcaaagtcgctcctgaaagctctgaaagaagacggtgatgtggtgattgttgtctttgatgcgaaagcgccaagttttcgccacgaagcgtacgaagcttacaaagccgggcgtgctccaacgccggaagactttcctcgccaattggcgcttatgaaggaattagtggatttgcttggcctcgaacgcttggaagttcccggtttcgaggcagacgacgtattagcgactctcgcaaagaaagccgaacgtgagggctatgaagtccagatcttgacagcagatcgcgatcttttccagcttttatctccgcgcatctcggtgttacacccggaagggcatcgtatcaccccggaatggctctgggagaaatatggtttgcgtcccgaacaatgggtggattttcgcgccttagcaggcgatccgagcgacaatattccgggagttaaaggtatcggcgagaagacggcgctcaagctccttaaagaatgggggtcgttggagaacttgcttaagaatttagatcaggtcaaaccagagtcagtgcgtgagaagattcttgctcacctcgaagacctcaaattaagccgcgaattgtcccgtgtacgcaccgatttgccgctcgaagttgatttcggtcgccgccgcgaacctgactgggagggtcttaaagcgtttttagagcgtcttgaatttggttcgctcttgcatgaattcggccttttagaaagcccgttactggccgaagaagcaccttggccaccgcccgagggcgcgtttttaggttaccgtttgagtcgcccggaaccgatgtgggccgaattactggctcttgcagcgtctgcccagggacgtgtgtatcgcgcggaagaccctcatggtgcgctccgcggcctcttcgaagtccgtggactccttgccaaagacttagctgttgttgcattgcgcgaaggtcttgatttacctccgactgatgatccaatgcttcttgcgtacctcttggacccgtcaaacacgacgcccgaaggcgtagcccgtcgttacggcggcgagtggaccgaagatgcagcgaaacgcgcgttattggccgaacgtttgcacgaaaatttattaggacgtttgcaaggcgaggaacgtctcctctggctttacgaagaagtggagaaaccattgagtcgcgtgctcgcgcatatggaagctaccggtgtcaaattagacgtggcgtatttggagaatctcagccttgaagttgctgcccacatgcgccgcttggaggaagaagtattccgtttagcaggccgttcctttcgccttaactctcgcgatcagttagaacgtgtgttgttcgatgaacttggtctccctcctatcggcaagacagagaagaccggtaaacgtagcacttcagcggcggttttagaagctcttcgcgaagtccatcccattgtggacaagatcttgcagtaccgcgaaatggcgaaattgaaaggcacctatattgaccgtcttccggcattagtccacccgaaaacgggacgcctccatacccgcttcaaccaaacagccacggcgaccggtcgtttgtcctcctctgatccaaaccttcagaatattccagtacgtaccccattgggccagaagatccgccgtgcgtttgtagctgaggagggttggcgtttagtggccctcgattatcgtcaaattgaattacgtgtccttgcccatctttctggcgatgagaacctcatccgcgtgtttcaggaaggcaaagacattcacactcaaacggcaagctggatgtttggattatcagctgaagcgatcgatcctttgatgcgtcgtgcagcgaagaccatcaatttcggtgttctctacggtatgagtgcctttcgtttgtcgcaggaattaggcattcccgctgaagaagctcaggcgttcattcagaaatactttcaaagctatcccaaagttaaagcatggatcgagaagactctccgtgaaggccgcacacgtggttacgtagagaccttatttggacgtcgccgctatgttcccgatttaaacgctcgcgtgaaaggcaagcgtgaagccgccgaacgcatggcgttcaacatgcctgtacagggcacggcagctgacctcatgaaacttgcaatggtgcgcctttttccacaattgcgtgaagttggtgcccgcatgctcttgcaggtccacgatgaactcttgttagaagcgccaaaagagcgtgcggaagaggtggcagccctcgcgaaagaagttatggaaggcgtgtggcccttagcggtgcctcttgaagtcgaagttggtattggcgaggattggctggctgccaaagga

SEQ ID NO: 5340 - protein, 841 aa, synthetic construct
  REGION 1..841: note = Variant of DNA polymerase I from Thermus sp. strain 2.9
MHHHHHHGGSGVLPVFEPKGRVLLVDGHHLAYRNFFALKGLTTSLGEPVQGVYGFAKSLLKALKEDGDVVIVVFDAKAPSFRHEAYEAYKAGRAPTPEDFPRQLALMKELVDLLGLERLEVPGFEADDVLATLAKKAEREGYEVQILTADRDLFQLLSPRISVLHPEGHRITPEWLWEKYGLRPEQWVDFRALAGDPSDNIPGVKGIGEKTALKLLKEWGSLENLLKNLDQVKPESVREKILAHLEDLKLSRELSRVRTDLPLEVDFGRRREPDWEGLKAFLERLEFGSLLHEFGLLESPLLAEEAPWPPPEGAFLGYRLSRPEPMWAELLALAASAQGRVYRAEDPHGALRGLFEVRGLLAKDLAVVALREGLDLPPTDDPMLLAYLLDPSNTTPEGVARRYGGEWTEDAAKRALLAERLHENLLGRLQGEERLLWLYEEVEKPLSRVLAHMEATGVKLDVAYLENLSLEVAAHMRRLEEEVFRLAGRSFRLNSRDQLERVLFDELGLPPIGKTEKTGKRSTSAAVLEALREVHPIVDKILQYREMAKLKGTYIDRLPALVHPKTGRLHTRFNQTATATGRLSSSDPNLQNIPVRTPLGQKIRRAFVAEEGWRLVALDYRQIELRVLAHLSGDENLIRVFQEGKDIHTQTASWMFGLSAEAIDPLMRRAAKTINFGVLYGMSAFRLSQELGIPAEEAQAFIQKYFQSYPKVKAWIEKTLREGRTRGYVETLFGRRRYVPDLNARVKGKREAAERMAFNMPVQGTAADLMKLAMVRLFPQLREVGARMLLQVHDELLLEAPKERAEEVAALAKEVMEGVWPLAVPLEVEVGIGEDWLAAKG

SEQ ID NO: 5341 - DNA, 2523 bp, synthetic construct
  misc_feature 1..2523: note = Variant of DNA polymerase I from Thermus sp. strain 2.9
  source 1..2523: mol_type = other DNA
atgcaccatcatcatcatcatggcggtagcggcgtgttaccggtgttcgagcctaaaggtcgcgtgcttctggttgatggccatcatctcgcgtatcgtaacttctttgccctgaaaggattaaccaccagcctgggcgagccggtacagggtgtctacggctttgcaaagtcgctcctgaaagctctgaaagaagacggtgatgtggtgattgttgtctttgatgcgaaagcgccaagttttcgccacgaagcgtacgaagcttacaaagccgggcgtgctccaacgccggaagactttcctcgccaattggcgcttatgaaggaattagtggatttgcttggcctcgaacgcttggaagttcccggtttcgaggcagacgacgtattagcgactctcgcaaagaaagccgaacgtgagggctatgaagtccagatcttgacagcagatcgcgatcttttccagcttttatctccgcgcatctcggtgttacacccggaagggcatcgtatcaccccggaatggctctgggagaaatatggtttgcgtcccgaacaatgggtggattttcgcgccttagcaggcgatccgagcgacaatattccgggagttaaaggtatcggcgagaagacggcgctcaagctccttaaagaatgggggtcgttggagaacttgcttaagaatttagatcaggtcaaaccagagtcagtgcgtgagaagattcttgctcacctcgaagacctcaaattaagccgcgaattgtcccgtgtacgcaccgatttgccgctcgaagttgatttcggtcgccgccgcgaacctgactgggagggtcttaaagcgtttttagagcgtcttgaatttggttcgctcttgcatgaattcggccttttagaaagcccgttactggccgaagaagcaccttggccaccgcccgagggcgcgtttttaggttaccgtttgagtcgcccggaaccgatgtgggccgaattactggctcttgcagcgtctgcccagggacgtgtgtatcgcgcggaagaccctcatggtgcgctccgcggcctcttcgaagtccgtggactccttgccaaagacttagctgttgttgcattgcgcgaaggtcttgatttaccttgtactgatgatccaatgcttcttgcgtacctcttggacccgtcaaacacgacgcccgaaggcgtagcccgtcgttacggcggcgagtggaccgaagatgcagcgaaacgcgcgttattggccgaacgtttgcacgaaaatttattaggacgtttgcaaggcgaggaacgtctcctctggctttacgaagaagtggagaaaccattgagtcgcgtgctcgcgcatatggaagctaccggtgtcaaattagacgtggcgtatttggagaatctcagccttgaagttgctgcccacatgcgccgcttggaggaagaagtattccgtttagcaggccgttcctttcgccttaactctcgcgatcagttagaacgtgtgttgttcgatgaacttggtctccctcctatcggcaagacagagaagaccggtaaacgtagcacttcagcggcggttttagaagctcttcgcgaagtccatcccattgtggacaagatcttgcagtaccgcgaaatggcgaaattgaaaggcacctatattgaccgtcttccggcattagtccacccgaaaacgggacgcctccatacccgcttcaaccaaacagccacggcgaccggtcgtttgtcctcctctgatccaaaccttcagaatattccagtacgtaccccattgggccagaagatccgccgtgcgtttgtagctgaggagggttggcgtttagtggccctcgattatcgtcaaattgaattacgtgtccttgcccatctttctggcgatgagaacctcatccgcgtgtttcaggaaggcaaagacattcacactcaaacggcaagctggatgtttggattatcagctgaagcgatcgatcctttgatgcgtcgtgcagcgaagaccatcaatttcggtgttctctacggtatgagtgcctttcgtttgtcgcaggaattaggcattccctatgaagaagctcaggcgttcattcagaaatactttcaaagctatcccaaagttaaagcatggatcgagaagactctccgtgaaggccgcacacgtggttacgtagagaccttatttggacgtcgccgctatgttcccgatttaaacgctcgcgtgaaaggcaagcgtgaagccgccgaacgcatggcgttcaacatgcctgtacagggcacggcagctgacctcatgaaacttgcaatggtgcgcctttttccacaattgcgtgaagttggtgcccgcatgctcttgcaggtccacgatgaactcttgttagaagcgccaaaagagcgtgcggaagaggtggcagccctcgcgaaagaagttatggaaggcgtgtggcccttagcggtgcctcttgaagtcgaagttggtattggcgaggattggctggctgccaaagga

SEQ ID NO: 5342 - protein, 841 aa, synthetic construct
  REGION 1..841: note = Variant of DNA polymerase I from Thermus sp. strain 2.9
MHHHHHHGGSGVLPVFEPKGRVLLVDGHHLAYRNFFALKGLTTSLGEPVQGVYGFAKSLLKALKEDGDVVIVVFDAKAPSFRHEAYEAYKAGRAPTPEDFPRQLALMKELVDLLGLERLEVPGFEADDVLATLAKKAEREGYEVQILTADRDLFQLLSPRISVLHPEGHRITPEWLWEKYGLRPEQWVDFRALAGDPSDNIPGVKGIGEKTALKLLKEWGSLENLLKNLDQVKPESVREKILAHLEDLKLSRELSRVRTDLPLEVDFGRRREPDWEGLKAFLERLEFGSLLHEFGLLESPLLAEEAPWPPPEGAFLGYRLSRPEPMWAELLALAASAQGRVYRAEDPHGALRGLFEVRGLLAKDLAVVALREGLDLPCTDDPMLLAYLLDPSNTTPEGVARRYGGEWTEDAAKRALLAERLHENLLGRLQGEERLLWLYEEVEKPLSRVLAHMEATGVKLDVAYLENLSLEVAAHMRRLEEEVFRLAGRSFRLNSRDQLERVLFDELGLPPIGKTEKTGKRSTSAAVLEALREVHPIVDKILQYREMAKLKGTYIDRLPALVHPKTGRLHTRFNQTATATGRLSSSDPNLQNIPVRTPLGQKIRRAFVAEEGWRLVALDYRQIELRVLAHLSGDENLIRVFQEGKDIHTQTASWMFGLSAEAIDPLMRRAAKTINFGVLYGMSAFRLSQELGIPYEEAQAFIQKYFQSYPKVKAWIEKTLREGRTRGYVETLFGRRRYVPDLNARVKGKREAAERMAFNMPVQGTAADLMKLAMVRLFPQLREVGARMLLQVHDELLLEAPKERAEEVAALAKEVMEGVWPLAVPLEVEVGIGEDWLAAKG

SEQ ID NO: 5343 - DNA, 2523 bp, synthetic construct
  misc_feature 1..2523: note = Variant of DNA polymerase I from Thermus sp. strain 2.9
  source 1..2523: mol_type = other DNA
atgcaccatcatcatcatcatggcggtagcggcgtgttaccggtgttcgagcctaaaggtcgcgtgcttctggttgatggccatcatctcgcgtatcgtaacttctttgccctgaaaggattaaccaccagcctgggcgagccggtacagggtgtctacggctttgcaaagtcgctcctgaaagctctgaaagaagacggtgatgtggtgattgttgtctttgatgcgaaagcgccaagttttcgccacgaagcgtacgaagcttacaaagccgggcgtgctccaacgccggaagactttcctcgccaattggcgcttatgaaggaattagtggatttgcttggcctcgaacgcttggaagttcccggtttcgaggcagacgacgtattagcgactctcgcaaagaaagccgaacgtgagggctatgaagtccagatcttgacagcagatcgcgatcttttccagcttttatctccgcgcatctcggtgttacacccggaagggcatcgtatcaccccggaatggctctgggagaaatatggtttgcgtcccgaacaatgggtggattttcgcgccttagcaggcgatccgagcgacaatattccgggagttaaaggtatcggcgagaagacggcgctcaagctccttaaagaatgggggtcgttggagaacttgcttaagaatttagatcaggtcaaaccagagtcagtgcgtgagaagattcttgctcacctcgaagacctcaaattaagccgcgaattgtcccgtgtacgcaccgatttgccgctcgaagttgatttcggtcgccgccgcgaacctgactgggagggtcttaaagcgtttttagagcgtcttgaatttggttcgctcttgcatgaattcggccttttagaaagcccgttactggccgaagaagcaccttggccaccgcccgagggcgcgtttttaggttaccgtttgagtcgcccggaaccgatgtgggccgaattactggctcttgcagcgtctgcccagggacgtgtgtatcgcgcggaagaccctcatggtgcgctccgcggcctcttcgaagtccgtggactccttgccaaagacttagctgttgttgcattgcgcgaaggtcttgatttacctccgactgatgatccaatgcttcttgcgtacctcttggacccgtcaaacacgacgcccgaaggcgtagcccgtcgttacggcggcgagtggaccgaagatgcagcgaaacgcgcgttattggccgaacgtttgcacgaaaatttattaggacgtttgcaaggcgaggaacgtctcctctggctttacgaagaagtggagaaaccattgagtcgcgtgctcgcgcatatggaagctaccggtgtcaaattagacgtggcgtatttggagaatcttcaccttttggttgctgcccacatgcgccgcttggaggaagaagtattccgtttagcaggccgttcctttcgccttaactctcgcgatcagttagaacgtgtgttgttcgatgaacttggtctccctcctatcggcaagacagagaagaccggtaaacgtagcacttcagcggcggttttagaagctcttcgcgaagtccatcccattgtggacaagatcttgcagtaccgcgaaatggcgaaattgaaaggcacctatattgaccgtcttccggcattagtccacccgaaaacgggacgcctccatacccgcttcaaccaaacagccacggcgaccggtcgtttgtcctcctctgatccaaaccttcagaatattccagtacgtaccccattgggccagaagatccgccgtgcgtttgtagctgaggagggttggcgtttagtggccctcgattatcgtcaaattgaattacgtgtccttgcccatctttctggcgatgagaacctcatccgcgtgtttcaggaaggcaaagacattcacactcaaacggcaagctggatgtttggattatcagctgaagcgatcgatcctttgatgcgtcgtgcagcgaagaccatcaatttcggtgttctctacggtatgagtgcctttcgtttgtcgcaggaattaggcattccctatgaagaagctcaggcgttcattcagaaatactttcaaagctatcccaaagttaaagcatggatcgagaagactctccgtgaaggccgcacacgtggttacgtagagaccttatttggacgtcgccgctatgttcccgatttaaacgctcgcgtgaaaggcaagcgtgaagccgccgaacgcatggcgttcaacatgcctgtacagggcacggcagctgacctcatgaaacttgcaatggtgcgcctttttccacaattgcgtgaagttggtgcccgcatgctcttgcaggtccacgatgaactcttgttagaagcgccaaaagagcgtgcggaagaggtggcagccctcgcgaaagaagttatggaaggcgtgtggcccttagcggtgcctcttgaagtcgaagttggtattggcgaggattggctggctgccaaagga

SEQ ID NO: 5344 - protein, 841 aa, synthetic construct
  REGION 1..841: note = Variant of DNA polymerase I from Thermus sp. strain 2.9
MHHHHHHGGSGVLPVFEPKGRVLLVDGHHLAYRNFFALKGLTTSLGEPVQGVYGFAKSLLKALKEDGDVVIVVFDAKAPSFRHEAYEAYKAGRAPTPEDFPRQLALMKELVDLLGLERLEVPGFEADDVLATLAKKAEREGYEVQILTADRDLFQLLSPRISVLHPEGHRITPEWLWEKYGLRPEQWVDFRALAGDPSDNIPGVKGIGEKTALKLLKEWGSLENLLKNLDQVKPESVREKILAHLEDLKLSRELSRVRTDLPLEVDFGRRREPDWEGLKAFLERLEFGSLLHEFGLLESPLLAEEAPWPPPEGAFLGYRLSRPEPMWAELLALAASAQGRVYRAEDPHGALRGLFEVRGLLAKDLAVVALREGLDLPPTDDPMLLAYLLDPSNTTPEGVARRYGGEWTEDAAKRALLAERLHENLLGRLQGEERLLWLYEEVEKPLSRVLAHMEATGVKLDVAYLENLHLLVAAHMRRLEEEVFRLAGRSFRLNSRDQLERVLFDELGLPPIGKTEKTGKRSTSAAVLEALREVHPIVDKILQYREMAKLKGTYIDRLPALVHPKTGRLHTRFNQTATATGRLSSSDPNLQNIPVRTPLGQKIRRAFVAEEGWRLVALDYRQIELRVLAHLSGDENLIRVFQEGKDIHTQTASWMFGLSAEAIDPLMRRAAKTINFGVLYGMSAFRLSQELGIPYEEAQAFIQKYFQSYPKVKAWIEKTLREGRTRGYVETLFGRRRYVPDLNARVKGKREAAERMAFNMPVQGTAADLMKLAMVRLFPQLREVGARMLLQVHDELLLEAPKERAEEVAALAKEVMEGVWPLAVPLEVEVGIGEDWLAAKG

SEQ ID NO: 5345 - DNA, 2523 bp, synthetic construct
  misc_feature 1..2523: note = Variant of DNA polymerase I from Thermus sp. strain 2.9
  source 1..2523: mol_type = other DNA
atgcaccatcatcatcatcatggcggtagcggcgtgttaccggtgttcgagcctaaaggtcgcgtgcttctggttgatggccatcatctcgcgtatcgtaacttctttgccctgaaaggattaaccaccagcctgggcgagccggtacagggtgtctacggctttgcaaagtcgctcctgaaagctctgaaagaagacggtgatgtggtgattgttgtctttgatgcgaaagcgccaagttttcgccacgaagcgtacgaagcttacaaagccgggcgtgctccaacgccggaagactttcctcgccaattggcgcttatgaaggaattagtggatttgcttggcctcgaacgcttggaagttcccggtttcgaggcagacgacgtattagcgactctcgcaaagaaagccgaacgtgagggctatgaagtccagatcttgacagcagatcgcgatcttttccagcttttatctccgcgcatctcggtgttacacccggaagggcatcgtatcaccccggaatggctctgggagaaatatggtttgcgtcccgaacaatgggtggattttcgcgccttagcaggcgatccgagcgacaatattccgggagttaaaggtatcggcgagaagacggcgctcaagctccttaaagaatgggggtcgttggagaacttgcttaagaatttagatcaggtcaaaccagagtcagtgcgtgagaagattcttgctcacctcgaagacctcaaattaagccgcgaattgtcccgtgtacgcaccgatttgccgctcgaagttgatttcggtcgccgccgcgaacctgactgggagggtcttaaagcgtttttagagcgtcttgaatttggttcgctcttgcatgaattcggccttttagaaagcccgttactggccgaagaagcaccttggccaccgcccgagggcgcgtttttaggttaccgtttgagtcgcccggaaccgatgtgggccgaattactggctcttgcagcgtctgcccagggacgtgtgtatcgcgcggaagaccctcatggtgcgctccgcggcctcttcgaagtccgtggactccttgccaaagacttagctgttgttgcattgcgcgaaggtcttgatttacctccgactgatgatccaatgcttcttgcgtacctcttggacccgtcaaacacgacgcccgaaggcgtagcccgtcgttacggcggcgagtggaccgaagatgcagcgcatcgcgcgttattggccgaacgtttgcacgaaaatttattaggacgtttgcaaggcgaggaacgtctcctctggctttacgaagaagtggagaaaccattgagtcgcgtgctcgcgcatatggaagctaccggtgtcaaattagacgtggcgtatttggagaatctcagccttgaagttgctgcccacatgcgccgcttggaggaagaagtattccgtttagcaggccgttcctttcgccttaactctcgcgatcagttagaacgtgtgttgttcgatgaacttggtctccctcctatcggcaagacagagaagaccggtaaacgtagcacttcagcggcggttttagaagctcttcgcgaagtccatcccattgtggacaagatcttgcagtaccgcgaaatggcgaaattgaaaggcacctatattgaccgtcttccggcattagtccacccgaaaacgggacgcctccatacccgcttcaaccaaacagccacggcgaccggtcgtttgtcctcctctgatccaaaccttcagaatattccagtacgtaccccattgggccagaagatccgccgtgcgtttgtagctgaggagggttggcgtttagtggccctcgattatcgtcaaattgaattacgtgtccttgcccatctttctggcgatgagaacctcatccgcgtgtttcaggaaggcaaagacattcacactcaaacggcaagctggatgtttggattatcagctgaagcgatcgatcctttgatgcgtcgtgcagcgaagaccatcaatttcggtgttctctacggtatgagtgcctttcgtttgtcgcaggaattaggcattccctatgaagaagctcaggcgttcattcagaaatactttcaaagctatcccaaagttaaagcatggatcgagaagactctccgtgaaggccgcacacgtggttacgtagagaccttatttggacgtcgccgctatgttcccgatttaaacgctcgcgtgaaaggcaagcgtgaagccgccgaacgcatggcgttcaacatgcctgtacagggcacggcagctgacctcatgaaacttgcaatggtgcgcctttttccacaattgcgtgaagttggtgcccgcatgctcttgcaggtccacgatgaactcttgttagaagcgccaaaagagcgtgcggaagaggtggcagccctcgcgaaagaagttatggaaggcgtgtggcccttagcggtgcctcttgaagtcgaagttggtattggcgaggattggctggctgccaaagga

SEQ ID NO: 5346 - protein, 841 aa, synthetic construct
  REGION 1..841: note = Variant of DNA polymerase I from Thermus sp. strain 2.9
MHHHHHHGGSGVLPVFEPKGRVLLVDGHHLAYRNFFALKGLTTSLGEPVQGVYGFAKSLLKALKEDGDVVIVVFDAKAPSFRHEAYEAYKAGRAPTPEDFPRQLALMKELVDLLGLERLEVPGFEADDVLATLAKKAEREGYEVQILTADRDLFQLLSPRISVLHPEGHRITPEWLWEKYGLRPEQWVDFRALAGDPSDNIPGVKGIGEKTALKLLKEWGSLENLLKNLDQVKPESVREKILAHLEDLKLSRELSRVRTDLPLEVDFGRRREPDWEGLKAFLERLEFGSLLHEFGLLESPLLAEEAPWPPPEGAFLGYRLSRPEPMWAELLALAASAQGRVYRAEDPHGALRGLFEVRGLLAKDLAVVALREGLDLPPTDDPMLLAYLLDPSNTTPEGVARRYGGEWTEDAAHRALLAERLHENLLGRLQGEERLLWLYEEVEKPLSRVLAHMEATGVKLDVAYLENLSLEVAAHMRRLEEEVFRLAGRSFRLNSRDQLERVLFDELGLPPIGKTEKTGKRSTSAAVLEALREVHPIVDKILQYREMAKLKGTYIDRLPALVHPKTGRLHTRFNQTATATGRLSSSDPNLQNIPVRTPLGQKIRRAFVAEEGWRLVALDYRQIELRVLAHLSGDENLIRVFQEGKDIHTQTASWMFGLSAEAIDPLMRRAAKTINFGVLYGMSAFRLSQELGIPYEEAQAFIQKYFQSYPKVKAWIEKTLREGRTRGYVETLFGRRRYVPDLNARVKGKREAAERMAFNMPVQGTAADLMKLAMVRLFPQLREVGARMLLQVHDELLLEAPKERAEEVAALAKEVMEGVWPLAVPLEVEVGIGEDWLAAKG

SEQ ID NO: 5347 - DNA, 2523 bp, synthetic construct
  misc_feature 1..2523: note = Variant of DNA polymerase I from Thermus sp. strain 2.9
  source 1..2523: mol_type = other DNA
atgcaccatcatcatcatcatggcggtagcggcgtgttaccggtgttcgagcctaaaggtcgcgtgcttctggttgatggccatcatctcgcgtatcgtaacttctttgccctgaaaggattaaccaccagccgcggcgagccggtacagggtgtctacggctttgcaaagtcgctcctgaaagctctgaaagaagacggtgatgtggtgattgttgtctttgatgcgaaagcgccaagttttcgccacgaagcgtacgaagcttacaaagccgggcgtgctccaacgccggaagactttcctcgccaattggcgcttatgaaggaattagtggatttgcttggcctcgaacgcttggaagttcccggtttcgaggcagacgacgtattagcgactctcgcaaagaaagccgaacgtgagggctatgaagtccagatcttgacagcagatcgcgatcttttccagcttttatctccgcgcatctcggtgttacacccggaagggcatcgtatcaccccggaatggctctgggagaaatatggtttgcgtcccgaacaatgggtggattttcgcgccttagcaggcgatccgagcgacaatattccgggagttaaaggtatcggcgagaagacggcgctcaagctccttaaagaatgggggtcgttggagaacttgcttaagaatttagatcaggtcaaaccagagtcagtgcgtgagaagattcttgctcacctcgaagacctcaaattaagccgcgaattgtcccgtgtacgcaccgatttgccgctcgaagttgatttccgccgccgccgcgaacctgactgggagggtcttaaagcgtttttagagcgtcttgaatttggttcgctcttgcatgaattcggccttttagaaagcccgttactggccgaagaagcaccttggccaccgcccgagggcgcgtttttaggttaccgtttgagtcgcccggaaccgatgtgggccgaattactggctcttgcagcgtctgcccagggacgtgtgtatcgcgcggaagaccctcatggtgcgctccgcggcctcttcgaagtccgtggactccttgccaaagacttagctgttgttgcattgcgcgaaggtcttgatttacctccgactgatgatccaatgcttcttgcgtacctcttggacccgtcaaacacgacgcccgaaggcgtagcccgtcgttacggcggcgagtggaccgaagatgcagcgaaacgcgcgttattggccgaacgtttgcacgaaaatttattaggacgtttgcaaggcgaggaacgtctcctctggctttacgaagaagtggagaaaccattgagtcgcgtgctcgcgcatatggaagctaccggtgtcaaattagacgtggcgtatttggagaatctcagccttgaagttgctgcccacatgcgccgcttggaggaagaagtattccgtttagcaggccactcctttcgccttaactctcgcgatcagttagaacgtgtgttgttcgatgaacttggtctccctcctatcggcaagacagagaagaccggtaaacgtagcacttcagcggcggttttagaagctcttcgcgaagtccatcccattgtggacaagatcttgcagtaccgcgaaatggcgaaattgaaaggcacctatattgaccgtcttccggcattagtccacccgaaaacgggacgcctccatacccgcttcaaccaaacagccacggcgaccggtcgtttgtccagttctgatccaaaccttcagaatattccagtacgtaccccattgggccagaagatccgccgtgcgtttgtagctgaggagggttggcgtttagtggccctcgattatagtcaaattgaattacgtgtccttgcccatctttctggcgatgagaacctcatccgcgtgtttcaggaaggcaaagacattcacactcaaacggcaagctggatgtttggattatcagctgaagcgatcgatcctttgatgcgtcgtgcagcgaagaccatcaatttcggtgttctctacggtatgagtgcctttcgtttgtcgcaggaattaggcattccctatgaagaagctcaggcgttcattcagaaatactttcaaagctatcccaaagttaaagcatggatcgagaagactctccgcgaaggccgcacacgtggttacgtagagaccttatttggacgtcgccgctatgttcccgatttaaacgctcgcgtgaaaggcgtacgtgaagccgccgaacgcatggcgttcaacatgcctgtacagggcacggcagctgacctcatgaaacttgcaatggtgcgcctttttccacaattgcgtgaagttggtgcccgcatgctcttgcaggtccacgatgaactcttgttagaagcgccaaaagagcgtgcggaagaggtggcagccctcgcgaaagaagttatggaaggcgtgtggcccttagcggtgcctcttgaagtcgaagttggtattggcgaggattggctggctgccaaagga

SEQ ID NO: 5348 - protein, 841 aa, synthetic construct
  REGION 1..841: note = Variant of DNA polymerase I from Thermus sp. strain 2.9
MHHHHHHGGSGVLPVFEPKGRVLLVDGHHLAYRNFFALKGLTTSRGEPVQGVYGFAKSLLKALKEDGDVVIVVFDAKAPSFRHEAYEAYKAGRAPTPEDFPRQLALMKELVDLLGLERLEVPGFEADDVLATLAKKAEREGYEVQILTADRDLFQLLSPRISVLHPEGHRITPEWLWEKYGLRPEQWVDFRALAGDPSDNIPGVKGIGEKTALKLLKEWGSLENLLKNLDQVKPESVREKILAHLEDLKLSRELSRVRTDLPLEVDFRRRREPDWEGLKAFLERLEFGSLLHEFGLLESPLLAEEAPWPPPEGAFLGYRLSRPEPMWAELLALAASAQGRVYRAEDPHGALRGLFEVRGLLAKDLAVVALREGLDLPPTDDPMLLAYLLDPSNTTPEGVARRYGGEWTEDAAKRALLAERLHENLLGRLQGEERLLWLYEEVEKPLSRVLAHMEATGVKLDVAYLENLSLEVAAHMRRLEEEVFRLAGHSFRLNSRDQLERVLFDELGLPPIGKTEKTGKRSTSAAVLEALREVHPIVDKILQYREMAKLKGTYIDRLPALVHPKTGRLHTRFNQTATATGRLSSSDPNLQNIPVRTPLGQKIRRAFVAEEGWRLVALDYSQIELRVLAHLSGDENLIRVFQEGKDIHTQTASWMFGLSAEAIDPLMRRAAKTINFGVLYGMSAFRLSQELGIPYEEAQAFIQKYFQSYPKVKAWIEKTLREGRTRGYVETLFGRRRYVPDLNARVKGVREAAERMAFNMPVQGTAADLMKLAMVRLFPQLREVGARMLLQVHDELLLEAPKERAEEVAALAKEVMEGVWPLAVPLEVEVGIGEDWLAAKG

SEQ ID NO: 5349 - DNA, 2523 bp, synthetic construct
  misc_feature 1..2523: note = Variant of DNA polymerase I from Thermus sp. strain 2.9
  source 1..2523: mol_type = other DNA
atgcaccatcatcatcatcatggcggtagcggcgtgttaccggtgttcgagcctaaaggtcgcgtgcttctggttgatggccatcatctcgcgtatcgtaacttctttgccctgaaaggattaaccaccagcctgggcgagccggtacagggtgtctacggctttgcaaagtcgctcctgaaagctctgaaagaagacggtgatgtggtgattgttgtctttgatgcgaaagcgccaagttttcgccacgaagcgtacgaagcttacaaagccgggcgtgctccaacgccggaagactttcctcgccaattggcgcttatgaaggaattagtggatttgcttggcctcgaacgcttggaagttcccggtttcgaggcagacgacgtattagcgactctcgcaaagaaagccgaacgtgagggctatgaagtccagatcttgacagcagatcgcgatcttttccagcttttatctccgcgcatctcggtgttacacccggaagggcatcgtatcaccccggaatggctctgggagaaatatggtttgcgtcccgaacaatgggtggattttcgcgccttagcaggcgatccgagcgacaatattccgggagttaaaggtatcggcgagaagacggcgctcaagctccttaaagaatgggggtcgttggagaacttgcttaagaatttagatcaggtcaaaccagagtcagtgcgtgagaagattcttgctcacctcgaagacctcaaattaagccgcgaattgtcccgtgtacgcaccgatttgccgctcgaagttgatttcggtcgccgccgcgaacctgactgggagggtcttaaagcgtttttagagcgtcttgaatttggttcgctcttgcatgaattcggccttttagaaagcccgttactggccgaagaagcaccttggccaccgcccgagggcgcgtttttaggttaccgtttgagtcgcccggaaccgatgtgggccgaattactggctcttgcagcgtctgcccagggacgtgtgtatcgcgcggaagaccctcatggtgcgctccgcggcctcttcgaagtccgtggactccttgccaaagacttagctgttgttgcattgcgcgaaggtcttgatttacctccgactgatgatccaatgcttcttgcgtacctcttggacccgtcaaacacgacgcccgaaggcgtagcccgtcgttacggcggcgagtggaccgaagatgcagcgaaacgcgcgttattggccgaacgtttgcacgaaaatttattaggacgtttgcaaggcgaggaacgtctcctctggctttacgaagaagtggagaaaccattgagtcgcgggctcgcgcatatggaagctaccggtgtcaaattagacgtggcgtatttggagaatctcagccttgaagttgctgcccacatgcgccgcttggaggaagaagtattccgtttagcaggccgttcctttcgccttaactctcgcgatcagttagaacgtgtgttgttcgatgaacttggtctccctcctatcggcaagacagagaagaccggtaaacgtagcacttcagcggcggttttagaagctcttcgcgaagtccatcccattgtggacaagatcttgcagtaccgcgaaatggcgaaattgaaaggcacctatattgaccgtcttccggcattagtccacccgaaaacgggacgcctccatacccgcttcaaccaaacagccacggcgaccggtcgtttgtcctcctctgatccaaaccttcagaatattccagtacgtaccccattgggccagaagatccgccgtgcgtttgtagctgaggagggttggcgtttagtggccctcgattatcgtcaaattgaattacgtgtccttgcccatctttctggcgatgagaacctcatccgcgtgtttcaggaaggcaaagacattcacactcaaacggcaagctggatgtttggattatcagctgaagcgatcgatcctttgatgcgtcgtgcagcgaagaccatcaatttcggtgttctctacggtatgagtgcctttcgtttgtcgcaggaattaggcattccctatgaagaagctcaggcgttcattcagaaatactttcaaagctatcccaaagttaaagcatggatcgagaagactctccgtgaaggccgcacacgtggttacgtagagaccttatttggacgtcgccgctatgttcccgatttaaacgctcgcgtgaaaggcaagcgtgaagccgccgaacgcatggcgttcaacatgcctgtacagggcacggcagctgacctcatgaaacttgcaatggtgcgcctttttccacaattgcgtgaagttggtgcccgcatgctcttgcaggtccacgatgaactcttgttagaagcgccaaaagagcgtgcggaagaggtggcagccctcgcgaaagaagttatggaaggcgtgtggcccttagcggtgcctcttgaagtcgaagttggtattggcgaggattggctggctgccaaagga

SEQ ID NO: 5350 - protein, 841 aa, synthetic construct
  REGION 1..841: note = Variant of DNA polymerase I from Thermus sp. strain 2.9
MHHHHHHGGSGVLPVFEPKGRVLLVDGHHLAYRNFFALKGLTTSLGEPVQGVYGFAKSLLKALKEDGDVVIVVFDAKAPSFRHEAYEAYKAGRAPTPEDFPRQLALMKELVDLLGLERLEVPGFEADDVLATLAKKAEREGYEVQILTADRDLFQLLSPRISVLHPEGHRITPEWLWEKYGLRPEQWVDFRALAGDPSDNIPGVKGIGEKTALKLLKEWGSLENLLKNLDQVKPESVREKILAHLEDLKLSRELSRVRTDLPLEVDFGRRREPDWEGLKAFLERLEFGSLLHEFGLLESPLLAEEAPWPPPEGAFLGYRLSRPEPMWAELLALAASAQGRVYRAEDPHGALRGLFEVRGLLAKDLAVVALREGLDLPPTDDPMLLAYLLDPSNTTPEGVARRYGGEWTEDAAKRALLAERLHENLLGRLQGEERLLWLYEEVEKPLSRGLAHMEATGVKLDVAYLENLSLEVAAHMRRLEEEVFRLAGRSFRLNSRDQLERVLFDELGLPPIGKTEKTGKRSTSAAVLEALREVHPIVDKILQYREMAKLKGTYIDRLPALVHPKTGRLHTRFNQTATATGRLSSSDPNLQNIPVRTPLGQKIRRAFVAEEGWRLVALDYRQIELRVLAHLSGDENLIRVFQEGKDIHTQTASWMFGLSAEAIDPLMRRAAKTINFGVLYGMSAFRLSQELGIPYEEAQAFIQKYFQSYPKVKAWIEKTLREGRTRGYVETLFGRRRYVPDLNARVKGKREAAERMAFNMPVQGTAADLMKLAMVRLFPQLREVGARMLLQVHDELLLEAPKERAEEVAALAKEVMEGVWPLAVPLEVEVGIGEDWLAAKG

SEQ ID NO: 5351 - DNA, 2523 bp, synthetic construct
  misc_feature 1..2523: note = Variant of DNA polymerase I from Thermus sp. strain 2.9
  source 1..2523: mol_type = other DNA
atgcaccatcatcatcatcatggcggtagcggcgtgttaccggtgttcgagcctaaaggtcgcgtgcttctggttgatggccatcatctcgcgtatcgtaacttctttgccctgaaaggattaaccaccagcctgggcgagccggtacagggtgtctacggctttgcaaagtcgctcctgaaagctctgaaagaagacggtgatgtggtgattgttgtctttgatgcgaaagcgccaagttttcgccacgaagcgtacgaagcttacaaagccgggcgtgctccaacgccggaagactttcctcgccaattggcgcttatgaaggaattagtggatttgcttggcctcgaacgcttggaagttcccggtttcgaggcagacgacgtattagcgactctcgcaaagaaagccgaacgtgagggctatgaagtccagatcttgacagcagatcgcgatcttttccagcttttatctccgcgcatctcggtgttacacccggaagggcatcgtatcaccccggaatggctctgggagaaatatggtttgcgtcccgaacaatgggtggattttcgcgccttagcaggcgatccgagcgacaatattccgggagttaaaggtatcggcgagaagacggcgctcaagctccttaaagaatgggggtcgttggagaacttgcttaagaatttagatcaggtcaaaccagagtcagtgcgtgagaagattcttgctcacctcgaagacctcaaattaagccgcgaattgtcccgtgtacgcaccgatttgccgctcgaagttgatttcggtcgccgccgcgaacctgactgggagggtcttaaagcgtttttagagcgtcttgaatttggttcgctcttgcatgaattcggccttttagaaagcccgttactggccgaagaagcaccttggccaccgcccgagggcgcgtttttaggttaccgtttgagtcgcccggaaccgatgtgggccgaattactggctcttgcagcgtctgcccagggacgtgtgtatcgcgcggaagaccctcatggtgcgctccgcggcctcttcgaagtccgtggactccttgccaaagacttagctgttgttgcattgcgcgaaggtcttgatttacctccgactgatgatccaatgcttcttgcgtacctcttggacccgtcaaacacgacgcccgaaggcgtagcccgtcgttacggcggcgagtggaccgaagatgcagcgaaacgcgcgttattggccgaacgtttgcacgaaaatttattaggacgtttgcaaggcgaggaacgtctcctctggctttacgaagaagtggagaaaccattgagtcgcgtgctcgcgcatatggaagctaccggtgtcaaattagacgtggcgtatttggagaatctcagccttgaagttgctgcccacatgcgccgcttggaggaagaagtattccgtttagcaggccgttcctttcgccttaactctcgcgatcagttagaacgtgtgttgttcgatgaacttggtctccctcctatcggcaagacagagaagaccggtaaacgtagcacttcagcggcggttttagaagctcttcgcgaagtccatcccattgtggacaagatcttgcagtaccgcgaaatggcgaaattgaaaggcacctatattgaccgtcttccggcattagtccacccgaaaacgggacgcctccatacccgcttcaaccaaacagccacggcgaccggtcgtttgtcctcctctgatccaaaccttcagaatattccagtacgtaccccattgggccagaagatccgccgtgcgtttgtagctgaggagggttggcgtttagtggccctcgattatcgtcaaattgaattacgtgtccttgcccatctttctggcgatgagaacctcatccgcgtgtttcaggaaggcaaagacattcacactcaaacggcaagctggatgtttggattatcagctgaagcgatcgatcctttgatgcgtcgtgcagcgaagaccatcaatttcggtgttctctacggtatgagtgcctttcgtttgtcgcaggaattaggcattccctatgaagaagctcaggcgttcattcagaaatactttcaaagctatcccaaagttaaagcatggatcgagaagactctccgtgaaggccgcacacgtggttacgtagagaccttatttggacgtcgccgctatgttcccgagttaaacgctcgcgtgaaaggcaagcgtgaagccgccgaacgcatggcgttcaacatgcctgtacagggcacggcagctgacctcatgaaacttgcaatggtgcgcctttttccacaattgcgtgaagttggtgcccgcatgctcttgcaggtccacgatgaactcttgttagaagcgccaaaagagcgtgcggaagaggtggcagccctcgcgaaagaagttatggaaggcgtgtggcccttagcggtgcctcttgaagtcgaagttggtattggcgaggattggctggctgccaaagga

SEQ ID NO: 5352 - protein, 841 aa, synthetic construct
  REGION 1..841: note = Variant of DNA polymerase I from Thermus sp. strain 2.9
MHHHHHHGGSGVLPVFEPKGRVLLVDGHHLAYRNFFALKGLTTSLGEPVQGVYGFAKSLLKALKEDGDVVIVVFDAKAPSFRHEAYEAYKAGRAPTPEDFPRQLALMKELVDLLGLERLEVPGFEADDVLATLAKKAEREGYEVQILTADRDLFQLLSPRISVLHPEGHRITPEWLWEKYGLRPEQWVDFRALAGDPSDNIPGVKGIGEKTALKLLKEWGSLENLLKNLDQVKPESVREKILAHLEDLKLSRELSRVRTDLPLEVDFGRRREPDWEGLKAFLERLEFGSLLHEFGLLESPLLAEEAPWPPPEGAFLGYRLSRPEPMWAELLALAASAQGRVYRAEDPHGALRGLFEVRGLLAKDLAVVALREGLDLPPTDDPMLLAYLLDPSNTTPEGVARRYGGEWTEDAAKRALLAERLHENLLGRLQGEERLLWLYEEVEKPLSRVLAHMEATGVKLDVAYLENLSLEVAAHMRRLEEEVFRLAGRSFRLNSRDQLERVLFDELGLPPIGKTEKTGKRSTSAAVLEALREVHPIVDKILQYREMAKLKGTYIDRLPALVHPKTGRLHTRFNQTATATGRLSSSDPNLQNIPVRTPLGQKIRRAFVAEEGWRLVALDYRQIELRVLAHLSGDENLIRVFQEGKDIHTQTASWMFGLSAEAIDPLMRRAAKTINFGVLYGMSAFRLSQELGIPYEEAQAFIQKYFQSYPKVKAWIEKTLREGRTRGYVETLFGRRRYVPELNARVKGKREAAERMAFNMPVQGTAADLMKLAMVRLFPQLREVGARMLLQVHDELLLEAPKERAEEVAALAKEVMEGVWPLAVPLEVEVGIGEDWLAAKG

SEQ ID NO: 5353 - DNA, 2523 bp, synthetic construct
  misc_feature 1..2523: note = Variant of DNA polymerase I from Thermus sp. strain 2.9
  source 1..2523: mol_type = other DNA
atgcaccatcatcatcatcatggcggtagcggcgtgttaccggtgttcgagcctaaaggtcgcgtgcttctggttgatggccatcatctcgcgtatcgtaacttctttgccctgaaaggattaaccaccagcctgggcgagccggtacagggtgtctacggctttgcaaagtcgctcctgaaagctctgaaagaagacggtgatgtggtgattgttgtctttgatgcgaaagcgccaagttttcgccacgaagcgtacgaagcttacaaagccgggcgtgctccaacgccggaagactttcctcgccaattggcgcttatgaaggaattagtggatttgcttggcctcgaacgcttggaagttcccggtttcgaggcagacgacgtattagcgactctcgcaaagaaagccgaacgtgagggctatgaagtccagatcttgacagcagatcgcgatcttttccagcttttatctccgcgcatctcggtgttacacccggaagggcatcgtatcaccccggaatggctctgggagaaatatggtttgcgtcccgaacaatgggtggattttcgcgccttagcaggcgatccgagcgacaatattccgggagttaaaggtatcggcgagaagacggcgctcaagctccttaaagaatgggggtcgttggagaacttgcttaagaatttagatcaggtcaaaccagagtcagtgcgtgagaagattcttgctcacctcgaagacctcaaattaagccgcgaattgtcccgtgtacgcaccgatttgccgctcgaagttgatttcggtcgccgccgcgaacctgactgggagggtcttaaagcgtttttagagcgtcttgaatttggttcgctcttgcatgaattcggccttttagaaagcccgttactggccgaagaagcaccttggccaccgcccgagggcgcgtttttaggttaccgtttgagtcgcccggaaccgatgtgggccgaattactggctcttgcagcgtctgcccagggacgtgtgtatcgcgcggaagaccctcatggtgcgctccgcggcctcttcgaagtccgtggactccttgccaaagacttagctgttgttgcattgcgcgaaggtcttgatttacctccgactgatgatccaatgcttcttgcgtacctcttggacccgtcaaacacgacgcccgaaggcgtagcccgtcgttacggcggcgagtggaccgaagatgcagcgaaacgcgcgttattggccgaacgtttgcacgaaaatttattaggacgtttgcaaggcgaggaacgtctcctctggctttacgaagaagtggagaaaccattgagtcgcgtgctcgcgcatatggaagctaccggtgtcaaattagacgtggcgtatttggagaatctcagccttgaagttgctgcccacatgcgccgcttggaggaagaagtattccgtttagcaggccgttcctttcgccttaactctcgcgatcagttagaacgtgtgttgttcgatgaacttggtctccctcctatcggcaagacagagaagaccggtaaacgtagcacttcagcggcggttttagaagctcttcgcgaagtccatcccattgtggacaagatcttgcagtaccgcgaaatggcgaaattgaaaggcacctatattgaccgtcttccggcattagtccacccgaaaacgggacgcctccatacccgcttcaaccaaacagccacggcgaccggtcgtttgtcctcctctgatccaaaccttcagaatattccagtacgtaccccattgggccagaagatccgccgtgcgtttgtagctgaggagggttggcgtttagtggccctcgattatcgtcaaattgaattacgtgtccttgcccatctttctggcgatgagaacctcatccgcgtgtttcaggaaggcaaagacattcacactcaaacggcaagctggatgtttggattatcagctgaagcgatcgatcctttgatgcgtcgtgcagcgaagaccatcaatttcggtgttctctacggtatgagtgcctttcgtttgtcgcaggaattaggcattccctatgaagaagctcaggcgttcattcagaaatactttcaaagctatcccaaagttaaagcatggatcgagaagactctccgtgaaggccgcacacgtggttacgtagagaccttatttggacgtcgccgctatgttcccgatttaaacgctcgcgtgaaaggcaagcgtgaagccgccgaacgcatggcgttcaacatgcctgtacagggcacggcagctgacctcatgaaacttgcaatggtgcgcctttttccacaattgcgtgaagttggtgcccgcatgctcttgcaggtccacgatgaactcttgttagaagcgccaaaagagcgtgcggaagaggtggcagccctcgcgaaagaagttatggatggcgtgtggcccttagcggtgcctcttgaagtcgaagttggtattggcgaggattggctggctgccaaagga

SEQ ID NO: 5354 - protein, 841 aa, synthetic construct
  REGION 1..841: note = Variant of DNA polymerase I from Thermus sp. strain 2.9
MHHHHHHGGSGVLPVFEPKGRVLLVDGHHLAYRNFFALKGLTTSLGEPVQGVYGFAKSLLKALKEDGDVVIVVFDAKAPSFRHEAYEAYKAGRAPTPEDFPRQLALMKELVDLLGLERLEVPGFEADDVLATLAKKAEREGYEVQILTADRDLFQLLSPRISVLHPEGHRITPEWLWEKYGLRPEQWVDFRALAGDPSDNIPGVKGIGEKTALKLLKEWGSLENLLKNLDQVKPESVREKILAHLEDLKLSRELSRVRTDLPLEVDFGRRREPDWEGLKAFLERLEFGSLLHEFGLLESPLLAEEAPWPPPEGAFLGYRLSRPEPMWAELLALAASAQGRVYRAEDPHGALRGLFEVRGLLAKDLAVVALREGLDLPPTDDPMLLAYLLDPSNTTPEGVARRYGGEWTEDAAKRALLAERLHENLLGRLQGEERLLWLYEEVEKPLSRVLAHMEATGVKLDVAYLENLSLEVAAHMRRLEEEVFRLAGRSFRLNSRDQLERVLFDELGLPPIGKTEKTGKRSTSAAVLEALREVHPIVDKILQYREMAKLKGTYIDRLPALVHPKTGRLHTRFNQTATATGRLSSSDPNLQNIPVRTPLGQKIRRAFVAEEGWRLVALDYRQIELRVLAHLSGDENLIRVFQEGKDIHTQTASWMFGLSAEAIDPLMRRAAKTINFGVLYGMSAFRLSQELGIPYEEAQAFIQKYFQSYPKVKAWIEKTLREGRTRGYVETLFGRRRYVPDLNARVKGKREAAERMAFNMPVQGTAADLMKLAMVRLFPQLREVGARMLLQVHDELLLEAPKERAEEVAALAKEVMDGVWPLAVPLEVEVGIGEDWLAAKG

SEQ ID NO: 5355 - DNA, 2523 bp, synthetic construct
  misc_feature 1..2523: note = Variant of DNA polymerase I from Thermus sp. strain 2.9
  source 1..2523: mol_type = other DNA
atgcaccatcatcatcatcatggcggtagcggcgtgttaccggtgttcgagcctaaaggtcgcgtgcttctggttgatggccatcatctcgcgtatcgtaacttctttgccctgaaaggattaaccaccagcctgggcgagccggtacagggtgtctacggctttgcaaagtcgctcctgaaagctctgaaagaagacggtgatgtggtgattgttgtctttgatgcgaaagcgccaagttttcgccacgaagcgtacgaagcttacaaagccgggcgtgctccaacgccggaagactttcctcgccaattggcgcttatgaaggaattagtggatttgcttggcctcgaacgcttggaagttcccggtttcgaggcagacgacgtattagcgactctcgcaaagaaagccgaacgtgagggctatgaagtccagatcttgacagcagatcgcgatcttttccagcttttatctccgcgcatctcggtgttacacccggaagggcatcgtatcaccccggaatggctctgggagaaatatggtttgcgtcccgaacaatgggtggattttcgcgccttagcaggcgatccgagcgacaatattccgggagttaaaggtatcggcgagaagacggcgctcaagctccttaaagaatgggggtcgttggagaacttgcttaagaatttagatcaggtcaaaccagagtcagtgcgtgagaagattcttgctcacctcgaagacctcaaattaagccgcgaattgtcccgtgtacgcaccgatttgccgctcgaagttgatttcggtcgccgccgcgaacctgactgggagggtcttaaagcgtttttagagcgtcttgaatttggttcgctcttgcatgaattcggccttttagaaagcccgttactggccgaagaagcaccttggccaccgcccgagggcgcgtttttaggttaccgtttgagtcgcccggaaccgatgtgggccgaattactggctcttgcagcgtctgcccagggacgtgtgtatcgcgcggaagaccctcatggtgcgctccgcggcctcttcgaagtccgtggactccttgccaaagacttagctgttgttgcattgcgcgaaggtcttgatttacctccgactgatgatccaatgcttcttgcgtacctcttggacccgtcaaacacgacgcccgaaggcgtagcccgtcgttacggcggcgagtggaccgaagatgcagcgaaacgcgcgttattggccgaacgtttgcacgaaaatttattaggacgtttgcaaggcgaggaacgtctcctctggctttacgaagaagtggagaaaccattgagttgggtgctcgcgcatatggaagctaccggtgtcaaattagacgtggcgtatttggagaatctcagccttgaagttgctgcccacatgcgccgcttggaggaagaagtattccgtttagcaggccgttcctttcgccttaactctcgcgatcagttagaacgtgtgttgttcgatgaacttggtctccctcctatcggcaagacagagaagaccggtaaacgtagcacttcagcggcggttttagaagctcttcgcgaagtccatcccattgtggacaagatcttgcagtaccgcgaaatggcgaaattgaaaggcacctatattgaccgtcttccggcattagtccacccgaaaacgggacgcctccatacccgcttcaaccaaacagccacggcgaccggtcgtttgtcctcctctgatccaaaccttcagaatattccagtacgtaccccattgggccagaagatccgccgtgcgtttgtagctgaggagggttggcgtttagtggccctcgattatcgtcaaattgaattacgtgtccttgcccatctttctggcgatgagaacctcatccgcgtgtttcaggaaggcaaagacattcacactcaaacggcaagctggatgtttggattatcagctgaagcgatcgatcctttgatgcgtcgtgcagcgaagaccatcaatttcggtgttctctacggtatgagtgcctttcgtttgtcgcaggaattaggcattccctatgaagaagctcaggcgttcattcagaaatactttcaaagctatcccaaagttaaagcatggatcgagaagactctccgtgaaggccgcacacgtggttacgtagagaccttatttggacgtcgccgctatgttcccgatttaaacgctcgcgtgaaaggcaagcgtgaagccgccgaacgcatggcgttcaacatgcctgtacagggcacggcagctgacctcatgaaacttgcaatggtgcgcctttttccacaattgcgtgaagttggtgcccgcatgctcttgcaggtccacgatgaactcttgttagaagcgccaaaagagcgtgcggaagaggtggcagccctcgcgaaagaagttatggaaggcgtgtggcccttagcggtgcctcttgaagtcgaagttggtattggcgaggattggctggctgccaaagga

SEQ ID NO: 5356 - protein, 841 aa, synthetic construct
  REGION 1..841: note = Variant of DNA polymerase I from Thermus sp. strain 2.9
MHHHHHHGGSGVLPVFEPKGRVLLVDGHHLAYRNFFALKGLTTSLGEPVQGVYGFAKSLLKALKEDGDVVIVVFDAKAPSFRHEAYEAYKAGRAPTPEDFPRQLALMKELVDLLGLERLEVPGFEADDVLATLAKKAEREGYEVQILTADRDLFQLLSPRISVLHPEGHRITPEWLWEKYGLRPEQWVDFRALAGDPSDNIPGVKGIGEKTALKLLKEWGSLENLLKNLDQVKPESVREKILAHLEDLKLSRELSRVRTDLPLEVDFGRRREPDWEGLKAFLERLEFGSLLHEFGLLESPLLAEEAPWPPPEGAFLGYRLSRPEPMWAELLALAASAQGRVYRAEDPHGALRGLFEVRGLLAKDLAVVALREGLDLPPTDDPMLLAYLLDPSNTTPEGVARRYGGEWTEDAAKRALLAERLHENLLGRLQGEERLLWLYEEVEKPLSWVLAHMEATGVKLDVAYLENLSLEVAAHMRRLEEEVFRLAGRSFRLNSRDQLERVLFDELGLPPIGKTEKTGKRSTSAAVLEALREVHPIVDKILQYREMAKLKGTYIDRLPALVHPKTGRLHTRFNQTATATGRLSSSDPNLQNIPVRTPLGQKIRRAFVAEEGWRLVALDYRQIELRVLAHLSGDENLIRVFQEGKDIHTQTASWMFGLSAEAIDPLMRRAAKTINFGVLYGMSAFRLSQELGIPYEEAQAFIQKYFQSYPKVKAWIEKTLREGRTRGYVETLFGRRRYVPDLNARVKGKREAAERMAFNMPVQGTAADLMKLAMVRLFPQLREVGARMLLQVHDELLLEAPKERAEEVAALAKEVMEGVWPLAVPLEVEVGIGEDWLAAKG

SEQ ID NO: 5357 - DNA, 2523 bp, synthetic construct
  misc_feature 1..2523: note = Variant of DNA polymerase I from Thermus sp. strain 2.9
  source 1..2523: mol_type = other DNA
atgcaccatcatcatcatcatggcggtagcggcgtgttaccggtgttcgagcctaaaggtcgcgtgcttctggttgatggccatcatctcgcgtatcgtaacttctttgccctgaaaggattaaccaccagcctgggcgagccggtacagggtgtctacggctttgcaaagtcgctcctgaaagctctgaaagaagacggtgatgtggtgattgttgtctttgatgcgaaagcgccaagttttcgccacgaagcgtacgaagcttacaaagccgggcgtgctccaacgccggaagactttcctcgccaattggcgcttatgaaggaattagtggatttgcttggcctcgaacgcttggaagttcccggtttcgaggcagacgacgtattagcgactctcgcaaagaaagccgaacgtgagggctatgaagtccagatcttgacagcagatcgcgatcttttccagcttttatctccgcgcatctcggtgttacacccggaagggcatcgtatcaccccggaatggctctgggagaaatatggtttgcgtcccgaacaatgggtggattttcgcgccttagcaggcgatccgagcgacaatattccgggagttaaaggtatcggcgagaagacggcgctcaagctccttaaagaatgggggtcgttggagaacttgcttaagaatttagatcaggtcaaaccagagtcagtgcgtgagaagattcttgctcacctcgaagacctcaaattaagccgcgaattgtcccgtgtacgcaccgatttgccgctcgaagttgatttcggtcgccgccgcgaacctgactgggagggtcttaaagcgtttttagagcgtcttgaatttggttcgctcttgcatgaattcggccttttagaaagcccgttactggccgaagaagcaccttggccaccgcccgagggcgcgtttttaggttaccgtttgagtcgcccggaaccgatgtgggccgaattactggctcttgcagcgtctgcccagggacgtgtgtatcgcgcggaagaccctcatggtgcgctccgcggcctcttcgaagtccgtggactccttgccaaagacttagctgttgttgcattgcgcgaaggtcttgatttacctccgactgatgatccaatgcttcttgcgtacctcttggacccgtcaaacacgacgcccgaaggcgtagcccgtcgttacggcggcgagtggaccgaagatgcagcgaaacgcgcgttattggccgaacgtttgcacgaaaattctttaggacgtttgcaaggcgaggaacgtctcctctggctttacgaagaagtggagaaaccattgagtcgcgtgctcgcgcatatggaagctaccggtgtcaaattagacgtggcgtatttggagaatctcagccttgaagttgctgcccacatgcgccgcttggaggaagaagtattccgtttagcaggccgttcctttcgccttaactctcgcgatcagttagaacgtgtgttgttcgatgaacttggtctccctcctatcggcaagacagagaagaccggtaaacgtagcacttcagcggcggttttagaagctcttcgcgaagtccatcccattgtggacaagatcttgcagtaccgcgaaatggcgaaattgaaaggcacctatattgaccgtcttccggcattagtccacccgaaaacgggacgcctccatacccgcttcaaccaaacagccacggcgaccggtcgtttgtcctcctctgatccaaaccttcagaatattccagtacgtaccccattgggccagaagatccgccgtgcgtttgtagctgaggagggttggcgtttagtggccctcgattatcgtcaaattgaattacgtgtccttgcccatctttctggcgatgagaacctcatccgcgtgtttcaggaaggcaaagacattcacactcaaacggcaagctggatgtttggattatcagctgaagcgatcgatcctttgatgcgtcgtgcagcgaagaccatcaatttcggtgttctctacggtatgagtgcctttcgtttgtcgcaggaattaggcattccctatgaagaagctcaggcgttcattcagaaatactttcaaagctatcccaaagttaaagcatggatcgagaagactctccgtgaaggccgcacacgtggttacgtagagaccttatttggacgtcgccgctatgttcccgatttaaacgctcgcgtgaaaggcaagcgtgaagccgccgaacgcatggcgttcaacatgcctgtacagggcacggcagctgacctcatgaaacttgcaatggtgcgcctttttccacaattgcgtgaagttggtgcccgcatgctcttgcaggtccacgatgaactcttgttagaagcgccaaaagagcgtgcggaagaggtggcagccctcgcgaaagaagttatggaaggcgtgtggcccttagcggtgcctcttgaagtcgaagttggtattggcgaggattggctggctgccaaagga

SEQ ID NO: 5358 - protein, 841 aa, synthetic construct
  REGION 1..841: note = Variant of DNA polymerase I from Thermus sp. strain 2.9
MHHHHHHGGSGVLPVFEPKGRVLLVDGHHLAYRNFFALKGLTTSLGEPVQGVYGFAKSLLKALKEDGDVVIVVFDAKAPSFRHEAYEAYKAGRAPTPEDFPRQLALMKELVDLLGLERLEVPGFEADDVLATLAKKAEREGYEVQILTADRDLFQLLSPRISVLHPEGHRITPEWLWEKYGLRPEQWVDFRALAGDPSDNIPGVKGIGEKTALKLLKEWGSLENLLKNLDQVKPESVREKILAHLEDLKLSRELSRVRTDLPLEVDFGRRREPDWEGLKAFLERLEFGSLLHEFGLLESPLLAEEAPWPPPEGAFLGYRLSRPEPMWAELLALAASAQGRVYRAEDPHGALRGLFEVRGLLAKDLAVVALREGLDLPPTDDPMLLAYLLDPSNTTPEGVARRYGGEWTEDAAKRALLAERLHENSLGRLQGEERLLWLYEEVEKPLSRVLAHMEATGVKLDVAYLENLSLEVAAHMRRLEEEVFRLAGRSFRLNSRDQLERVLFDELGLPPIGKTEKTGKRSTSAAVLEALREVHPIVDKILQYREMAKLKGTYIDRLPALVHPKTGRLHTRFNQTATATGRLSSSDPNLQNIPVRTPLGQKIRRAFVAEEGWRLVALDYRQIELRVLAHLSGDENLIRVFQEGKDIHTQTASWMFGLSAEAIDPLMRRAAKTINFGVLYGMSAFRLSQELGIPYEEAQAFIQKYFQSYPKVKAWIEKTLREGRTRGYVETLFGRRRYVPDLNARVKGKREAAERMAFNMPVQGTAADLMKLAMVRLFPQLREVGARMLLQVHDELLLEAPKERAEEVAALAKEVMEGVWPLAVPLEVEVGIGEDWLAAKG

SEQ ID NO: 5359 - DNA, 2523 bp, synthetic construct
  misc_feature 1..2523: note = Variant of DNA polymerase I from Thermus sp. strain 2.9
  source 1..2523: mol_type = other DNA
atgcaccatcatcatcatcatggcggtagcggcgtgttaccggtgttcgagcctaaaggtcgcgtgcttctggttgatggccatcatctcgcgtatcgtaacttctttgccctgaaaggattaaccaccagccgcggcgagccggtacagggtgtctacggctttgcaaagtcgctcctgaaagctctgaaagaagacggtgatgtggtgattgttgtctttgatgcgaaagcgccaagttttcgccacgaagcgtacgaagcttacaaagccgggcgtgctccaacgccggaagactttcctcgccaattggcgcttatgaaggaattagtggatttgcttggcctcgaacgcttggaagttcccggtttcgaggcagacgacgtattagcgactctcgcaaagaaagccgaacgtgagggctatgaagtccagatcttgacagcagatcgcgatcttttccagcttttatctccgcgcatctcggtgttacacccggaagggcatcgtatcaccccggaatggctctgggagaaatatggtttgcgtcccgaacaatgggtggattttcgcgccttagcaggcgatccgagcgacaatattccgggagttaaaggtatcggcgagaagacggcgctcaagctccttaaagaatgggggtcgttggagaacttgcttaagaatttagatcaggtcaaaccagagtcagtgcgtgagaagattcttgctcacctcgaagacctcaaattaagccgcgaattgtcccgtgtacgcaccgatttgccgctcgaagttgatttcggccgccgccgcgaacctgactgggagggtcttaaagcgtttttagagcgtcttgaatttggttcgctcttgcatgaattcggccttttagaaagcccgttactggccgaagaagcaccttggccaccgcccgagggcgcgtttttaggttaccgtttgagtcgcccggaaccgatgtgggccgaattactggctcttgcagcgtctgcccagggacgtgtgtatcgcgcggaagaccctcatggtgcgctccgcggcctcttcgaagtccgtggactccttgccaaagacttagctgttgttgcattgcgcgaaggtcttgatttacctccgactgatgatccaatgcttcttgcgtacctcttggacccgtcaaacacgacgcccgaaggcgtagcccgtcgttacggcggcgagtggaccgaagatgcagcgaaacgcgcgttattggccgaacgtttgcacgaaaatttattaggacgtttgcaaggcgaggaacgtctcctctggctttacgaagaagtggagaaaccattgagtcgcgtgctcgcgcatatggaagctaccggtgtcaaattagacgtggcgtatttggagaatctcagccttgaagttgctgcccacatgcgccgcttggaggaagaagtattccgtttagcaggccgttcctttcgccttaactctcgcgatcagttagaacgtgtgttgttcgatgaacttggtctccctcctatcggcaagacagagaagaccggtaaacgtagcacttcagcggcggttttagaagctcttcgcgaagtccatcccattgtggacaagatcttgcagtaccgcgaaatggcgaaattgaaaggcacctatattgaccgtcttccggcattagtccacccgaaaacgggacgcctccatacccgcttcaaccaaacagccacggcgaccggtcgtttgtcctcctctgatccaaaccttcagaatattccagtacgtaccccattgggccagaagatccgccgtgcgtttgtagctgaggagggttggcgtttagtggccctcgattatcgtcaaattgaattacgtgtccttgcccatctttctggcgatgagaacctcatccgcgtgtttcaggaaggcaaagacattcacactcaaacggcaagctggatgtttggattatcagctgaagcgatcgatcctttgatgcgtcgtgcagcgaagaccatcaatttcggtgttctctacggtatgagtgcctttcgtttgtcgcaggaattaggcattccctatgaagaagctcaggcgttcattcagaaatactttcaaagctatcccaaagttaaagcatggatcgagaagactctccgcgaaggccgcacacgtggttacgtagagaccttatttggacgtcgccgctatgttcccgatttaaacgctcgcgtgaaaggcaagcgtgaagccgccgaacgcatggcgttcaacatgcctgtacagggcacggcagctgacctcatgaaacttgcaatggtgcgcctttttccacaattgcgtgaagttggtgcccgcatgctcttgcaggtccacgatgaactcttgttagaagcgccaaaagagcgtgcggaagaggtggcagccctcgcgaaagaagttatggaaggcgtgtggcccttagcggtgcctcttgaagtcgaagttggtattggcgaggattggctggctgccaaagga

SEQ ID NO: 5360 - protein, 841 aa, synthetic construct
  REGION 1..841: note = Variant of DNA polymerase I from Thermus sp. strain 2.9
MHHHHHHGGSGVLPVFEPKGRVLLVDGHHLAYRNFFALKGLTTSRGEPVQGVYGFAKSLLKALKEDGDVVIVVFDAKAPSFRHEAYEAYKAGRAPTPEDFPRQLALMKELVDLLGLERLEVPGFEADDVLATLAKKAEREGYEVQILTADRDLFQLLSPRISVLHPEGHRITPEWLWEKYGLRPEQWVDFRALAGDPSDNIPGVKGIGEKTALKLLKEWGSLENLLKNLDQVKPESVREKILAHLEDLKLSRELSRVRTDLPLEVDFGRRREPDWEGLKAFLERLEFGSLLHEFGLLESPLLAEEAPWPPPEGAFLGYRLSRPEPMWAELLALAASAQGRVYRAEDPHGALRGLFEVRGLLAKDLAVVALREGLDLPPTDDPMLLAYLLDPSNTTPEGVARRYGGEWTEDAAKRALLAERLHENLLGRLQGEERLLWLYEEVEKPLSRVLAHMEATGVKLDVAYLENLSLEVAAHMRRLEEEVFRLAGRSFRLNSRDQLERVLFDELGLPPIGKTEKTGKRSTSAAVLEALREVHPIVDKILQYREMAKLKGTYIDRLPALVHPKTGRLHTRFNQTATATGRLSSSDPNLQNIPVRTPLGQKIRRAFVAEEGWRLVALDYRQIELRVLAHLSGDENLIRVFQEGKDIHTQTASWMFGLSAEAIDPLMRRAAKTINFGVLYGMSAFRLSQELGIPYEEAQAFIQKYFQSYPKVKAWIEKTLREGRTRGYVETLFGRRRYVPDLNARVKGKREAAERMAFNMPVQGTAADLMKLAMVRLFPQLREVGARMLLQVHDELLLEAPKERAEEVAALAKEVMEGVWPLAVPLEVEVGIGEDWLAAKG

SEQ ID NO: 5361 - DNA, 2523 bp, synthetic construct
  misc_feature 1..2523: note = Variant of DNA polymerase I from Thermus sp. strain 2.9
  source 1..2523: mol_type = other DNA
atgcaccatcatcatcatcatggcggtagcggcgtgttaccggtgttcgagcctaaaggtcgcgtgcttctggttgatggccatcatctcgcgtatcgtaacttctttgccctgaaaggattaaccaccagcctgggcgagccggtacagggtgtctacggctttgcaaagtcgctcctgaaagctctgaaagaagacggtgatgtggtgattgttgtctttgatgcgaaagcgccaagttttcgccacgaagcgtacgaagcttacaaagccgggcgtgctccaacgccggaagactttcctcgccaattggcgcttatgaaggaattagtggatttgcttggcctcgaacgcttggaagttcccggtttcgaggcagacgacgtattagcgactctcgcaaagaaagccgaacgtgagggctatgaagtccagatcttgacagcagatcgcgatcttttccagcttttatctccgcgcatctcggtgttacacccggaagggcatcgtatcaccccggaatggctctgggagaaatatggtttgcgtcccgaacaatgggtggattttcgcgccttagcaggcgatccgagcgacaatattccgggagttaaaggtatcggcgagaagacggcgctcaagctccttaaagaatgggggtcgttggagaacttgcttaagaatttagatcaggtcaaaccagagtcagtgcgtgagaagattcttgctcacctcgaagacctcaaattaagccgcgaattgtcccgtgtacgcaccgatttgccgctcgaagttgatttcggtcgccgccgcgaacctgactgggagggtcttaaagcgtttttagagcgtcttgaatttggttcgctcttgcatgaattcggccttttagaaagcccgttactggccgaagaagcaccttggccaccgcccgagggcgcgtttttaggttaccgtttgagtcgcccggaaccgatgtgggccgaattactggctcttgcagcgtctgcccagggacgtgtgtatcgcgcggaagaccctcatggtgcgctccgcggcctcttcgaagtccgtggactccttgccaaagacttagctgttgttgcattgcgcgaaggtcttgatttacctccgactgatgatccaatgcttcttgcgtacctcttggacccgtcaaacacgacgcccgaaggcgtagcccgtcgttacggcggcgagtggaccgaagatgcagcgaaacgcgcgttattggccgaacgtttgcacgaaaatttattaggacgtttgcaaggcgaggaacgtctcctctggctttacgaagaagtggagaaaccattgagtcgcgtgctcgcgcatatggaagctaccggtgtcaaattagacgtggcgtatttggagaatctcagccttgaagttgctgcccacatgcgccgcttggaggaagaagtattccgtttagcaggccgttcctttcgccttaactctcgcgatcagttagaacgtgtgttgttcgatgaacttggtctccctcctatcggcaagacagagaagaccggtaaacgtagcacttcagcggcggttttagaagctcttcgcgaagtccatcccattgtggacaagatcttgcagtaccgcgaaatggcgaaattgaaaggcacctatattgaccgtcttccggcattagtccacccgaaaacgggacgcctccatacccgcttcaaccaaacagccacggcgaccggtcgtttgtcctcctctgatccaaaccttcagaatattccagtacgtaccccattgggccagaagatccgccgtgcgtttgtagctgaggagggttggcgtttagtggccctcgattatcgtcaaattgaattacgtgtccttgcccatctttctggcgatgagaacctcatccgcgtgtttcaggaaggcaaagacattcacactcaaacggcaagctggatgtttggattatcagctgaagcgatcgatcctttgatgcgtcgtgcagcgaagaccatcaatttcggtgttctctacggtatgagtgcctttcgtttgtcgcaggaattaggcattccctatgaagaagctcaggcgttcattcagaaatactttcaaagctatcccaaagttaaagcatggatcgagaagactctccgtgaaggccgcacacgtggttacgtagagaccttatttggacgtcgccgctatgttcccgatttaaacgctcgcgtgaaaggcaagcgtgaagccgccgaacgcatggcgttcaacatgcctgtacagggcacggcagctgacctcatgaaacttgcaatggtgcgcctttttccacaattgcgtgaagttggtgcccgcatgctcttgcaggtccacgatgaactcttgttagaagcgccaaaagagcgtgcggaagaggtggcagccctcgcgaaagaagttatggaaggcgtgtggcccttagcggtgcctcttgaagtcgaagttggtattggcgaggattggctgcgggccaaagga

SEQ ID NO: 5362 - protein, 841 aa, synthetic construct
  REGION 1..841: note = Variant of DNA polymerase I from Thermus sp. strain 2.9
MHHHHHHGGSGVLPVFEPKGRVLLVDGHHLAYRNFFALKGLTTSLGEPVQGVYGFAKSLLKALKEDGDVVIVVFDAKAPSFRHEAYEAYKAGRAPTPEDFPRQLALMKELVDLLGLERLEVPGFEADDVLATLAKKAEREGYEVQILTADRDLFQLLSPRISVLHPEGHRITPEWLWEKYGLRPEQWVDFRALAGDPSDNIPGVKGIGEKTALKLLKEWGSLENLLKNLDQVKPESVREKILAHLEDLKLSRELSRVRTDLPLEVDFGRRREPDWEGLKAFLERLEFGSLLHEFGLLESPLLAEEAPWPPPEGAFLGYRLSRPEPMWAELLALAASAQGRVYRAEDPHGALRGLFEVRGLLAKDLAVVALREGLDLPPTDDPMLLAYLLDPSNTTPEGVARRYGGEWTEDAAKRALLAERLHENLLGRLQGEERLLWLYEEVEKPLSRVLAHMEATGVKLDVAYLENLSLEVAAHMRRLEEEVFRLAGRSFRLNSRDQLERVLFDELGLPPIGKTEKTGKRSTSAAVLEALREVHPIVDKILQYREMAKLKGTYIDRLPALVHPKTGRLHTRFNQTATATGRLSSSDPNLQNIPVRTPLGQKIRRAFVAEEGWRLVALDYRQIELRVLAHLSGDENLIRVFQEGKDIHTQTASWMFGLSAEAIDPLMRRAAKTINFGVLYGMSAFRLSQELGIPYEEAQAFIQKYFQSYPKVKAWIEKTLREGRTRGYVETLFGRRRYVPDLNARVKGKREAAERMAFNMPVQGTAADLMKLAMVRLFPQLREVGARMLLQVHDELLLEAPKERAEEVAALAKEVMEGVWPLAVPLEVEVGIGEDWLRAKG

SEQ ID NO: 5363 - DNA, 2523 bp, synthetic construct
  misc_feature 1..2523: note = Variant of DNA polymerase I from Thermus sp. strain 2.9
  source 1..2523: mol_type = other DNA
atgcaccatcatcatcatcatggcggtagcggcgtgttaccggtgttcgagcctaaaggtcgcgtgcttctggttgatggccatcatctcgcgtatcgtaacttctttgccctgaaaggattaaccaccagcctgggcgagccggtacagggtgtctacggctttgcaaagtcgctcctgaaagctctgaaagaagacggtgatgtggtgattgttgtctttgatgcgaaagcgccaagttttcgccacgaagcgtacgaagcttacaaagccgggcgtgctccaacgccggaagactttcctcgccaattggcgcttatgaaggaattagtggatttgcttggcctcgaacgcttggaagttcccggtttcgaggcagacgacgtattagcgactctcgcaaagaaagccgaacgtgagggctatgaagtccagatcttgacagcagatcgcgatcttttccagcttttatctccgcgcatctcggtgttacacccggaagggcatcgtatcaccccggaatggctctgggagaaatatggtttgcgtcccgaacaatgggtggattttcgcgccttagcaggcgatccgagcgacaatattccgggagttaaaggtatcggcgagaagacggcgctcaagctccttaaagaatgggggtcgttggagaacttgcttaagaatttagatcaggtcaaaccagagtcagtgcgtgagaagattcttgctcacctcgaagacctcaaattaagccgcgaattgtcccgtgtacgcaccgatttgccgctcgaagttgatttcggtcgccgccgcgaacctgactgggagggtcttaaagcgtttttagagcgtcttgaatttggttcgctcttgcatgaattcggccttttagaaagcccgttactggccgaagaagcaccttggccaccgcccgagggcgcgtttttaggttaccgtttgagtcgcccggaaccgatgtgggccgaattactggctcttgcagcgtctgcccagggacgtgtgtatcgcgcggaagaccctcatggtgcgctccgcggcctcttcgaagtccgtggactccttgccaaagacttagctgttgttgcattgcgcgaaggtcttgatttacctccgactgatgatccaatgcttcttgcgtacctcttggacccgtcaaacacgacgcccgaaggcgtagcccgtcgttacggcggcgagtggaccgaagatgcagcgaaacgcgcgttattggccgaacgtttgcacgaaaatttagtgggacgtttgcaaggcgaggaacgtctcctctggctttacgaagaagtggagaaaccattgagtcgcgtgctcgcgcatatggaagctaccggtgtcaaattagacgtggcgtatttggagaatctcagccttgaagttgctgcccacatgcgccgcttggaggaagaagtattccgtttagcaggccgttcctttcgccttaactctcgcgatcagttagaacgtgtgttgttcgatgaacttggtctccctcctatcggcaagacagagaagaccggtaaacgtagcacttcagcggcggttttagaagctcttcgcgaagtccatcccattgtggacaagatcttgcagtaccgcgaaatggcgaaattgaaaggcacctatattgaccgtcttccggcattagtccacccgaaaacgggacgcctccatacccgcttcaaccaaacagccacggcgaccggtcgtttgtcctcctctgatccaaaccttcagaatattccagtacgtaccccattgggccagaagatccgccgtgcgtttgtagctgaggagggttggcgtttagtggccctcgattatcgtcaaattgaattacgtgtccttgcccatctttctggcgatgagaacctcatccgcgtgtttcaggaaggcaaagacattcacactcaaacggcaagctggatgtttggattatcagctgaagcgatcgatcctttgatgcgtcgtgcagcgaagaccatcaatttcggtgttctctacggtatgagtgcctttcgtttgtcgcaggaattaggcattccctatgaagaagctcaggcgttcattcagaaatactttcaaagctatcccaaagttaaagcatggatcgagaagactctccgtgaaggccgcacacgtggttacgtagagaccttatttggacgtcgccgctatgttcccgatttaaacgctcgcgtgaaaggcaagcgtgaagccgccgaacgcatggcgttcaacatgcctgtacagggcacggcagctgacctcatgaaacttgcaatggtgcgcctttttccacaattgcgtgaagttggtgcccgcatgctcttgcaggtccacgatgaactcttgttagaagcgccaaaagagcgtgcggaagaggtggcagccctcgcgaaagaagttatggaaggcgtgtggcccttagcggtgcctcttgaagtcgaagttggtattggcgaggattggctggctgccaaagga

SEQ ID NO: 5364 - protein, 841 aa, synthetic construct
  REGION 1..841: note = Variant of DNA polymerase I from Thermus sp. strain 2.9
MHHHHHHGGSGVLPVFEPKGRVLLVDGHHLAYRNFFALKGLTTSLGEPVQGVYGFAKSLLKALKEDGDVVIVVFDAKAPSFRHEAYEAYKAGRAPTPEDFPRQLALMKELVDLLGLERLEVPGFEADDVLATLAKKAEREGYEVQILTADRDLFQLLSPRISVLHPEGHRITPEWLWEKYGLRPEQWVDFRALAGDPSDNIPGVKGIGEKTALKLLKEWGSLENLLKNLDQVKPESVREKILAHLEDLKLSRELSRVRTDLPLEVDFGRRREPDWEGLKAFLERLEFGSLLHEFGLLESPLLAEEAPWPPPEGAFLGYRLSRPEPMWAELLALAASAQGRVYRAEDPHGALRGLFEVRGLLAKDLAVVALREGLDLPPTDDPMLLAYLLDPSNTTPEGVARRYGGEWTEDAAKRALLAERLHENLVGRLQGEERLLWLYEEVEKPLSRVLAHMEATGVKLDVAYLENLSLEVAAHMRRLEEEVFRLAGRSFRLNSRDQLERVLFDELGLPPIGKTEKTGKRSTSAAVLEALREVHPIVDKILQYREMAKLKGTYIDRLPALVHPKTGRLHTRFNQTATATGRLSSSDPNLQNIPVRTPLGQKIRRAFVAEEGWRLVALDYRQIELRVLAHLSGDENLIRVFQEGKDIHTQTASWMFGLSAEAIDPLMRRAAKTINFGVLYGMSAFRLSQELGIPYEEAQAFIQKYFQSYPKVKAWIEKTLREGRTRGYVETLFGRRRYVPDLNARVKGKREAAERMAFNMPVQGTAADLMKLAMVRLFPQLREVGARMLLQVHDELLLEAPKERAEEVAALAKEVMEGVWPLAVPLEVEVGIGEDWLAAKG

SEQ ID NO: 5365 - DNA, 2523 bp, synthetic construct
  misc_feature 1..2523: note = Variant of DNA polymerase I from Thermus sp. strain 2.9
  source 1..2523: mol_type = other DNA
atgcaccatcatcatcatcatggcggtagcggcgtgttaccggtgttcgagcctaaaggtcgcgtgcttctggttgatggccatcatctcgcgtatcgtaacttctttgccctgaaaggattaaccaccagcctgggcgagccggtacagggtgtctacggctttgcaaagtcgctcctgaaagctctgaaagaagacggtgatgtggtgattgttgtctttgatgcgaaagcgccaagttttcgccacgaagcgtacgaagcttacaaagccgggcgtgctccaacgccggaagactttcctcgccaattggcgcttatgaaggaattagtggatttgcttggcctcgaacgcttggaagttcccggtttcgaggcagacgacgtattagcgactctcgcaaagaaagccgaacgtgagggctatgaagtccagatcttgacagcagatcgcgatcttttccagcttttatctccgcgcatctcggtgttacacccggaagggcatcgtatcaccccggaatggctctgggagaaatatggtttgcgtcccgaacaatgggtggattttcgcgccttagcaggcgatccgagcgacaatattccgggagttaaaggtatcggcgagaagacggcgctcaagctccttaaagaatgggggtcgttggagaacttgcttaagaatttagatcaggtcaaaccagagtcagtgcgtgagaagattcttgctcacctcgaagacctcaaattaagccgcgaattgtcccgtgtacgcaccgatttgccgctcgaagttgatttcggtcgccgccgcgaacctgactgggagggtcttaaagcgtttttagagcgtcttgaatttggttcgctcttgcatgaattcggccttttagaaagcccgttactggccgaagaagcaccttggccaccgcccgagggcgcgtttttaggttaccgtttgagtcgcccggaaccgatgtgggccgaattactggctcttgcagcgtctgcccagggacgtgtgtatcgcgcggaagaccctcatggtgcgctccgcggcctcttcgaagtccgtggactccttgccaaagacttagctgttgttgcattgcgcgaaggtcttgatttacctccgactgatgatccaatgcttcttgcgtacctcttggacccgtcaaacacgacgcccgaaggcgtagcccgtcgttacggcggcgagtggaccgaagatgcaacgaaacgcgcgttattggccgaacgtttgcacgaaaatttattaggacgtttgcaaggcgaggaacgtctcctctggctttacgaagaagtggagaaaccattgagtcgcgtgctcgcgcatatggaagctaccggtgtcaaattagacgtggcgtatttggagaatctcagccttgaagttgctgcccacatgcgccgcttggaggaagaagtattccgtttagcaggccgttcctttcgccttaactctcgcgatcagttagaacgtgtgttgttcgatgaacttggtctccctcctatcggcaagacagagaagaccggtaaacgtagcacttcagcggcggttttagaagctcttcgcgaagtccatcccattgtggacaagatcttgcagtaccgcgaaatggcgaaattgaaaggcacctatattgaccgtcttccggcattagtccacccgaaaacgggacgcctccatacccgcttcaaccaaacagccacggcgaccggtcgtttgtcctcctctgatccaaaccttcagaatattccagtacgtaccccattgggccagaagatccgccgtgcgtttgtagctgaggagggttggcgtttagtggccctcgattatcgtcaaattgaattacgtgtccttgcccatctttctggcgatgagaacctcatccgcgtgtttcaggaaggcaaagacattcacactcaaacggcaagctggatgtttggattatcagctgaagcgatcgatcctttgatgcgtcgtgcagcgaagaccatcaatttcggtgttctctacggtatgagtgcctttcgtttgtcggtggaattaggcattccctatgaagaagctcaggcgttcattcagaaatactttcaaagctatcccaaagttaaagcatggatcgagaagactctccgtgaaggccgcacacgtggttacgtagagaccttatttggacgtcgccgctatgttcccgatttaaacgctcgcgtgaaaggcaagcgtgaagccgccgaacgcatggcgttcaacatgcctgtacagggcacggcagctgacctcatgaaacttgcaatggtgcgcctttttccacaattgcgtgaagttggtgcccgcatgctcttgcaggtccacgatgaactcttgttagaagcgccaaaagagcgtgcggaagaggtggcagccctcgcgaaagaagttatggaaggcgtgtggcccttagcggtgcctcttgaagtcgaagttggtattggcgaggattggctggctgccaaagga

SEQ ID NO: 5366 - protein, 841 aa, synthetic construct
  REGION 1..841: note = Variant of DNA polymerase I from Thermus sp. strain 2.9
MHHHHHHGGSGVLPVFEPKGRVLLVDGHHLAYRNFFALKGLTTSLGEPVQGVYGFAKSLLKALKEDGDVVIVVFDAKAPSFRHEAYEAYKAGRAPTPEDFPRQLALMKELVDLLGLERLEVPGFEADDVLATLAKKAEREGYEVQILTADRDLFQLLSPRISVLHPEGHRITPEWLWEKYGLRPEQWVDFRALAGDPSDNIPGVKGIGEKTALKLLKEWGSLENLLKNLDQVKPESVREKILAHLEDLKLSRELSRVRTDLPLEVDFGRRREPDWEGLKAFLERLEFGSLLHEFGLLESPLLAEEAPWPPPEGAFLGYRLSRPEPMWAELLALAASAQGRVYRAEDPHGALRGLFEVRGLLAKDLAVVALREGLDLPPTDDPMLLAYLLDPSNTTPEGVARRYGGEWTEDATKRALLAERLHENLLGRLQGEERLLWLYEEVEKPLSRVLAHMEATGVKLDVAYLENLSLEVAAHMRRLEEEVFRLAGRSFRLNSRDQLERVLFDELGLPPIGKTEKTGKRSTSAAVLEALREVHPIVDKILQYREMAKLKGTYIDRLPALVHPKTGRLHTRFNQTATATGRLSSSDPNLQNIPVRTPLGQKIRRAFVAEEGWRLVALDYRQIELRVLAHLSGDENLIRVFQEGKDIHTQTASWMFGLSAEAIDPLMRRAAKTINFGVLYGMSAFRLSVELGIPYEEAQAFIQKYFQSYPKVKAWIEKTLREGRTRGYVETLFGRRRYVPDLNARVKGKREAAERMAFNMPVQGTAADLMKLAMVRLFPQLREVGARMLLQVHDELLLEAPKERAEEVAALAKEVMEGVWPLAVPLEVEVGIGEDWLAAKG

SEQ ID NO: 5367 - DNA, 2523 bp, synthetic construct
  misc_feature 1..2523: note = Variant of DNA polymerase I from Thermus sp. strain 2.9
  source 1..2523: mol_type = other DNA
atgcaccatcatcatcatcatggcggtagcggcgtgttaccggtgttcgagcctaaaggtcgcgtgcttctggttgatggccatcatctcgcgtatcgtaacttctttgccctgaaaggattaaccaccagcctgggcgagccggtacagggtgtctacggctttgcaaagtcgctcctgaaagctctgaaagaagacggtgatgtggtgattgttgtctttgatgcgaaagcgccaagttttcgccacgaagcgtacgaagcttacaaagccgggcgtgctccaacgccggaagactttcctcgccaattggcgcttatgaaggaattagtggatttgcttggcctcgaacgcttggaagttcccggtttcgaggcagacgacgtattagcgactctcgcaaagaaagccgaacgtgagggctatgaagtccagatcttgacagcagatcgcgatcttttccagcttttatctccgcgcatctcggtgttacacccggaagggcatcgtatcaccccggaatggctctgggagaaatatggtttgcgtcccgaacaatgggtggattttcgcgccttagcaggcgatccgagcgacaatattccgggagttaaaggtatcggcgagaagacggcgctcaagctccttaaagaatgggggtcgttggagaacttgcttaagaatttagatcaggtcaaaccagagtcagtgcgtgagaagattcttgctcacctcgaagacctcaaattaagccgcgaattgtcccgtgtacgcaccgatttgccgctcgaagttgatttcggtcgccgccgcgaacctgactgggagggtcttaaagcgtttttagagcgtcttgaatttggttcgctcttgcatgaattcggccttttagaaagcccgttactggccgaagaagcaccttggccaccgcccgagggcgcgtttttaggttaccgtttgagtcgcccggaaccgatgtgggccgaattactggctcttgcagcgtctgcccagggacgtgtgtatcgcgcggaagaccctcatggtgcgctccgcggcctcttcgaagtccgtggactccttgccaaagacttagctgttgttgcattgcgcgaaggtcttgatttacctccgactgatgatccaatgcttcttgcgtacctcttggacccgtcaaacacgacgcccgaaggcgtagcccgtcgttacggcggcgagtggaccgaagatgcagcgaaacgcgcgttattggccgaacgtttgcacgaaaatttattaggacgtttgcaaggcgaggaacgtctcctctggctttacgaagaagtggagaaaccattgagtcgcgtgctcgcgcatatggaagctaccggtgtcaaattagacgtggcgtatttggagaatctcagccttgaagttgctgcccacatgcgccgcttggaggaagaagtattccgtttagcaggccgttcctttcgccttaactctcgcgatcagttagaacgtgtgttgttcgatgaacttggtctccctcctatcggcaagacagagaagaccggtaaacgtagcacttcagcggcggttttagaagctcttcgcgaagtccatcccattgtggacaagatcttgcagtaccgcgaaatggcgaaattgaaaggcacctatattgaccgtcttccggcattagtccacccgaaaacgggacgcctccatacccgcttcaaccaaacagccacggcgaccggtcgtttgtcctcctctgatccaaaccttcagaatattccagtacgtaccccattgggccagaagatccgccgtgcgtttgtagctgaggagggttggcgtttagtggccctcgattatcgtcaaattgaattacgtgtccttgcccatctttctggcgatgagaacctcatccgcgtgtttcaggaaggcaaagacattcacactcaaacggcaagctggatgtttggattatcagctgaagcgatcgatcctttgatgcgtcgtgcagcgaagaccatcaatttcggtgttctctacggtatgagtgcctttcgtttgtcgcaggaattaggcattccctatgaagaagctcaggcgttcattcagaaatactttcaaagctatcccaaagttaaagcatggatcgagaagactctccgtgaaggccgcacacgtggttacgtagagaccttatttggacgtcgccgctatgttcccgatttaaacgctcgcgtgaaaggcaagcgtgaagccgccgaacgcatggcgttcaacatgcctgtacagggcacggcagctgacctcatgaaacttgcaatggtgcgcctttttccacaattgcgtgaagttggtgcccgcatgctcttgcaggtccacgatgaactcttgttagaagcgccaaaagagcgtgcggaagaggtggcagccctcgcgaaagaagttatggttggcgtgtggcccttagcggtgcctcttgaagtcgaagttggtattggcgaggattggctggctgccaaagga

SEQ ID NO: 5368 - protein, 841 aa, synthetic construct
  REGION 1..841: note = Variant of DNA polymerase I from Thermus sp. strain 2.9
MHHHHHHGGSGVLPVFEPKGRVLLVDGHHLAYRNFFALKGLTTSLGEPVQGVYGFAKSLLKALKEDGDVVIVVFDAKAPSFRHEAYEAYKAGRAPTPEDFPRQLALMKELVDLLGLERLEVPGFEADDVLATLAKKAEREGYEVQILTADRDLFQLLSPRISVLHPEGHRITPEWLWEKYGLRPEQWVDFRALAGDPSDNIPGVKGIGEKTALKLLKEWGSLENLLKNLDQVKPESVREKILAHLEDLKLSRELSRVRTDLPLEVDFGRRREPDWEGLKAFLERLEFGSLLHEFGLLESPLLAEEAPWPPPEGAFLGYRLSRPEPMWAELLALAASAQGRVYRAEDPHGALRGLFEVRGLLAKDLAVVALREGLDLPPTDDPMLLAYLLDPSNTTPEGVARRYGGEWTEDAAKRALLAERLHENLLGRLQGEERLLWLYEEVEKPLSRVLAHMEATGVKLDVAYLENLSLEVAAHMRRLEEEVFRLAGRSFRLNSRDQLERVLFDELGLPPIGKTEKTGKRSTSAAVLEALREVHPIVDKILQYREMAKLKGTYIDRLPALVHPKTGRLHTRFNQTATATGRLSSSDPNLQNIPVRTPLGQKIRRAFVAEEGWRLVALDYRQIELRVLAHLSGDENLIRVFQEGKDIHTQTASWMFGLSAEAIDPLMRRAAKTINFGVLYGMSAFRLSQELGIPYEEAQAFIQKYFQSYPKVKAWIEKTLREGRTRGYVETLFGRRRYVPDLNARVKGKREAAERMAFNMPVQGTAADLMKLAMVRLFPQLREVGARMLLQVHDELLLEAPKERAEEVAALAKEVMVGVWPLAVPLEVEVGIGEDWLAAKG

SEQ ID NO: 5369 - DNA, 2523 bp, synthetic construct
  misc_feature 1..2523: note = Variant of DNA polymerase I from Thermus sp. strain 2.9
  source 1..2523: mol_type = other DNA
atgcaccatcatcatcatcatggcggtagcggcgtgttaccggtgttcgagcctaaaggtcgcgtgcttctggttgatggccatcatctcgcgtatcgtaacttctttgccctgaaaggattaaccaccagcctgggcgagccggtacagggtgtctacggctttgcaaagtcgctcctgaaagctctgaaagaagacggtgatgtggtgattgttgtctttgatgcgaaagcgccaagttttcgccacgaagcgtacgaagcttacaaagccgggcgtgctccaacgccggaagactttcctcgccaattggcgcttatgaaggaattagtggatttgcttggcctcgaacgcttggaagttcccggtttcgaggcagacgacgtattagcgactctcgcaaagaaagccgaacgtgagggctatgaagtccagatcttgacagcagatcgcgatcttttccagcttttatctccgcgcatctcggtgttacacccggaagggcatcgtatcaccccggaatggctctgggagaaatatggtttgcgtcccgaacaatgggtggattttcgcgccttagcaggcgatccgagcgacaatattccgggagttaaaggtatcggcgagaagacggcgctcaagctccttaaagaatgggggtcgttggagaacttgcttaagaatttagatcaggtcaaaccagagtcagtgcgtgagaagattcttgctcacctcgaagacctcaaattaagccgcgaattgtcccgtgtacgcaccgatttgccgctcgaagttgatttccgccgccgccgcgaacctgactgggagggtcttaaagcgtttttagagcgtcttgaatttggttcgctcttgcatgaattcggccttttagaaagcccgttactggccgaagaagcaccttggccaccgcccgagggcgcgtttttaggttaccgtttgagtcgcccggaaccgatgtgggccgaattactggctcttgcagcgtctgcccagggacgtgtgtatcgcgcggaagaccctcatggtgcgctccgcggcctcttcgaagtccgtggactccttgccaaagacttagctgttgttgcattgcgcgaaggtcttgatttacctccgactgatgatccaatgcttcttgcgtacctcttggacccgtcaaacacgacgcccgaaggcgtagcccgtcgttacggcggcgagtggaccgaagatgcagcgaaacgcgcgttattggccgaacgtttgcacgaaaatttattaggacgtttgcaaggcgaggaacgtctcctctggctttacgaagaagtggagaaaccattgagtcgcgtgctcgcgcatatggaagctaccggtgtcaaattagacgtggcgtatttggaggcccttagccttgaagttgctgcccacatgcgccgcttggaggaagaagtattccgtttagcaggccgttcctttcgccttaactctcgcgatcagttagaacgtgtgttgttcgatgaacttggtctccctcctatcggcaagacagagaagaccggtaaacgtagcacttcagcggcggttttagaagctcttcgcgaagtccatcccattgtggacaagatcttgcagtaccgcgaaatggcgaaattgaaaggcacctatattgaccgtcttccggcattagtccacccgaaaacgggacgcctccatacccgcttcaaccaaacagccacggcgaccggtcgtttgtcctcctctgatccaaaccttcagaatattccagtacgtaccccattgggccagaagatccgccgtgcgtttgtagctgaggagggttggcgtttagtggccctcgattatcgtcaaattgaattacgtgtccttgcccatctttctggcgatgagaacctcatccgcgtgtttcaggaaggcaaagacattcacactcaaacggcaagctggatgtttggattatcagctgaagcgatcgatcctttgatgcgtcgtgcagcgaagaccatcaatttcggtgttctctacggtatgagtgcctttcgtttgtcgcaggaattaggcattccctatgaagaagctcaggcgttcattcagaaatactttcaaagctatcccaaagttaaagcatggatcgagaagactctccgtgaaggccgcacacgtggttacgtagagaccttatttggacgtcgccgctatgttcccgatttaaacgctcgcgtgaaaagcaaacgtgaagccgccgaacgcatggcgttcaacatgcctgtacagggcacggcagctgacctcatgaaacttgcaatggtgcgcctttttccacaattgcgtgaagttggtgcccgcatgctcttgcaggtccacgatgaactcttgttagaagcgccaaaagagcgtgcggaagaggtggcagccctcgcgaaagaagttatggaaggcgtgtggcccttagcggtgcctcttgaagtcgaagttggtattggcgaggattggctggctgccaaagga

SEQ ID NO: 5370 - protein, 841 aa, synthetic construct
  REGION 1..841: note = Variant of DNA polymerase I from Thermus sp. strain 2.9
MHHHHHHGGSGVLPVFEPKGRVLLVDGHHLAYRNFFALKGLTTSLGEPVQGVYGFAKSLLKALKEDGDVVIVVFDAKAPSFRHEAYEAYKAGRAPTPEDFPRQLALMKELVDLLGLERLEVPGFEADDVLATLAKKAEREGYEVQILTADRDLFQLLSPRISVLHPEGHRITPEWLWEKYGLRPEQWVDFRALAGDPSDNIPGVKGIGEKTALKLLKEWGSLENLLKNLDQVKPESVREKILAHLEDLKLSRELSRVRTDLPLEVDFRRRREPDWEGLKAFLERLEFGSLLHEFGLLESPLLAEEAPWPPPEGAFLGYRLSRPEPMWAELLALAASAQGRVYRAEDPHGALRGLFEVRGLLAKDLAVVALREGLDLPPTDDPMLLAYLLDPSNTTPEGVARRYGGEWTEDAAKRALLAERLHENLLGRLQGEERLLWLYEEVEKPLSRVLAHMEATGVKLDVAYLEALSLEVAAHMRRLEEEVFRLAGRSFRLNSRDQLERVLFDELGLPPIGKTEKTGKRSTSAAVLEALREVHPIVDKILQYREMAKLKGTYIDRLPALVHPKTGRLHTRFNQTATATGRLSSSDPNLQNIPVRTPLGQKIRRAFVAEEGWRLVALDYRQIELRVLAHLSGDENLIRVFQEGKDIHTQTASWMFGLSAEAIDPLMRRAAKTINFGVLYGMSAFRLSQELGIPYEEAQAFIQKYFQSYPKVKAWIEKTLREGRTRGYVETLFGRRRYVPDLNARVKSKREAAERMAFNMPVQGTAADLMKLAMVRLFPQLREVGARMLLQVHDELLLEAPKERAEEVAALAKEVMEGVWPLAVPLEVEVGIGEDWLAAKG

SEQ ID NO: 5371 - DNA, 2523 bp, synthetic construct
  misc_feature 1..2523: note = Variant of DNA polymerase I from Thermus sp. strain 2.9
  source 1..2523: mol_type = other DNA
atgcaccatcatcatcatcatggcggtagcggcgtgttaccggtgttcgagcctaaaggtcgcgtgcttctggttgatggccatcatctcgcgtatcgtaacttctttgccctgaaaggattaaccaccagcctgggcgagccggtacagggtgtctacggctttgcaaagtcgctcctgaaagctctgaaagaagacggtgatgtggtgattgttgtctttgatgcgaaagcgccaagttttcgccacgaagcgtacgaagcttacaaagccgggcgtgctccaacgccggaagactttcctcgccaattggcgcttatgaaggaattagtggatttgcttggcctcgaacgcttggaagttcccggtttcgaggcagacgacgtattagcgactctcgcaaagaaagccgaacgtgagggctatgaagtccagatcttgacagcagatcgcgatcttttccagcttttatctccgcgcatctcggtgttacacccggaagggcatcgtatcaccccggaatggctctgggagaaatatggtttgcgtcccgaacaatgggtggattttcgcgccttagcaggcgatccgagcgacaatattccgggagttaaaggtatcggcgagaagacggcgctcaagctccttaaagaatgggggtcgttggagaacttgcttaagaatttagatcaggtcaaaccagagtcagtgcgtgagaagattcttgctcacctcgaagacctcaaattaagccgcgaattgtcccgtgtacgcaccgatttgccgctcgaagttgatttcggtcgccgccgcgaacctgactgggagggtcttaaagcgtttttagagcgtcttgaatttggttcgctcttgcatgaattcggccttttagaaagcccgttactggccgaagaagcaccttggccaccgcccgagggcgcgtttttaggttaccgtttgagtcgcccggaaccgatgtgggccgaattactggctcttgcagcgtctgcccagggacgtgtgtatcgcgcggaagaccctcatggtgcgctccgcggcctcttcgaagtccgtggactccttgccaaagacttagctgttgttgcattgcgcgaaggtcttgatttacctccgactgatgatccaatgcttcttgcgtacctcttggacccgtcaaacacgacgcccgaaggcgtagcccgtcgttacggcggcgagtggaccgaagatgcagcgaaacgcgcgttattggccgaacgtttgcacgaaaatttattaggacgtttgcaaggcgaggaacgtctcctctggctttacgaagaagtggagaaaccattgagtcgcgtgctcgcgcatatggaagctaccggtgtcaaattagacgtggcgtatttggagaatcttcaccttcatgttgctgcccacatgcgccgcttggaggaagaagtattccgtttagcaggccgttcctttcgccttaactctcgcgatcagttagaacgtgtgttgttcgatgaacttggtctccctcctatcggcaagacagagaagaccggtaaacgtagcacttcagcggcggttttagaagctcttcgcgaagtccatcccattgtggacaagatcttgcagtaccgcgaaatggcgaaattgaaaggcacctatattgaccgtcttccggcattagtccacccgaaaacgggacgcctccatacccgcttcaaccaaacagccacggcgaccggtcgtttgtcctcctctgatccaaaccttcagaatattccagtacgtaccccattgggccagaagatccgccgtgcgtttgtagctgaggagggttggcgtttagtggccctcgattatcgtcaaattgaattacgtgtccttgcccatctttctggcgatgagaacctcatccgcgtgtttcaggaaggcaaagacattcacactcaaacggcaagctggatgtttggattatcagctgaagcgatcgatcctttgatgcgtcgtgcagcgaagaccatcaatttcggtgttctctacggtatgagtgcctttcgtttgtcgcaggaattaggcattccctatgaagaagctcaggcgttcattcagaaatactttcaaagctatcccaaagttaaagcatggatcgagaagactctccgtgaaggccgcacacgtggttacgtagagaccttatttggacgtcgccgctatgttcccgatttaaacgctcgcgtgaaaggcaagcgtgaagccgccgaacgcatggcgttcaacatgcctgtacagggcacggcagctgacctcatgaaacttgcaatggtgcgcctttttccacaattgcgtgaagttggtgcccgcatgctcttgcaggtccacgatgaactcttgttagaagcgccaaaagagcgtgcggaagaggtggcagccctcgcgaaagaagttatggaaggcgtgtggcccttagcggtgcctcttgaagtcgaagttggtattggcgaggattggctggctgccaaagga

SEQ ID NO: 5372 - protein, 841 aa, synthetic construct
  REGION 1..841: note = Variant of DNA polymerase I from Thermus sp. strain 2.9
MHHHHHHGGSGVLPVFEPKGRVLLVDGHHLAYRNFFALKGLTTSLGEPVQGVYGFAKSLLKALKEDGDVVIVVFDAKAPSFRHEAYEAYKAGRAPTPEDFPRQLALMKELVDLLGLERLEVPGFEADDVLATLAKKAEREGYEVQILTADRDLFQLLSPRISVLHPEGHRITPEWLWEKYGLRPEQWVDFRALAGDPSDNIPGVKGIGEKTALKLLKEWGSLENLLKNLDQVKPESVREKILAHLEDLKLSRELSRVRTDLPLEVDFGRRREPDWEGLKAFLERLEFGSLLHEFGLLESPLLAEEAPWPPPEGAFLGYRLSRPEPMWAELLALAASAQGRVYRAEDPHGALRGLFEVRGLLAKDLAVVALREGLDLPPTDDPMLLAYLLDPSNTTPEGVARRYGGEWTEDAAKRALLAERLHENLLGRLQGEERLLWLYEEVEKPLSRVLAHMEATGVKLDVAYLENLHLHVAAHMRRLEEEVFRLAGRSFRLNSRDQLERVLFDELGLPPIGKTEKTGKRSTSAAVLEALREVHPIVDKILQYREMAKLKGTYIDRLPALVHPKTGRLHTRFNQTATATGRLSSSDPNLQNIPVRTPLGQKIRRAFVAEEGWRLVALDYRQIELRVLAHLSGDENLIRVFQEGKDIHTQTASWMFGLSAEAIDPLMRRAAKTINFGVLYGMSAFRLSQELGIPYEEAQAFIQKYFQSYPKVKAWIEKTLREGRTRGYVETLFGRRRYVPDLNARVKGKREAAERMAFNMPVQGTAADLMKLAMVRLFPQLREVGARMLLQVHDELLLEAPKERAEEVAALAKEVMEGVWPLAVPLEVEVGIGEDWLAAKG

SEQ ID NO: 5373 - DNA, 2523 bp, synthetic construct
  misc_feature 1..2523: note = Variant of DNA polymerase I from Thermus sp. strain 2.9
  source 1..2523: mol_type = other DNA
atgcaccatcatcatcatcatggcggtagcggcgtgttaccggtgttcgagcctaaaggtcgcgtgcttctggttgatggccatcatctcgcgtatcgtaacttctttgccctgaaaggattaaccaccagcctgggcgagccggtacagggtgtctacggctttgcaaagtcgctcctgaaagctctgaaagaagacggtgatgtggtgattgttgtctttgatgcgaaagcgccaagttttcgccacgaagcgtacgaagcttacaaagccgggcgtgctccaacgccggaagactttcctcgccaattggcgcttatgaaggaattagtggatttgcttggcctcgaacgcttggaagttcccggtttcgaggcagacgacgtattagcgactctcgcaaagaaagccgaacgtgagggctatgaagtccagatcttgacagcagatcgcgatcttttccagcttttatctccgcgcatctcggtgttacacccggaagggcatcgtatcaccccggaatggctctgggagaaatatggtttgcgtcccgaacaatgggtggattttcgcgccttagcaggcgatccgagcgacaatattccgggagttaaaggtatcggcgagaagacggcgctcaagctccttaaagaatgggggtcgttggagaacttgcttaagaatttagatcaggtcaaaccagagtcagtgcgtgagaagattcttgctcacctcgaagacctcaaattaagccgcgaattgtcccgtgtacgcaccgatttgccgctcgaagttgatttcggtcgccgccgcgaacctgactgggagggtcttaaagcgtttttagagcgtcttgaatttggttcgctcttgcatgaattcggccttttagaaagcccgttactggccgaagaagcaccttggccaccgcccgagggcgcgtttttaggttaccgtttgagtcgcccggaaccgatgtgggccgaattactggctcttgcagcgtctgcccagggacgtgtgtatcgcgcggaagaccctcatggtgcgctccgcggcctcttcgaagtccgtggactccttgccaaagacttagctgttgttgcattgcgcgaaggtcttgatttacctccgactgatgatccaatgcttcttgcgtacctcttggacccgtcaaacacgacgcccgaaggcgtagcccgtcgttacggcggcgagtggaccgaagatgcagcgaaacgcgcgttattggccgaacgtttgcacgaaaatttattaggacgtttgcaaggcgaggaacgtctcctctggctttacgaagaagtggagaaaccattgagtcgcgtgctcgcgcatatggaagctaccggtgtcaaattagacgtggcgtatttggagaatctcagccttgaagttgctgcccacatgcgccgcttggaggaagaagtattccgtttagcaggccgttcctttcgccttaactctcgcgatcagttagaacgtgtgttgttcgatgaacttggtctccctcctatcggcaagacagagaagaccggtaaacgtagcacttcagcggcggttttagaagctcttcgcgaagtccatcccattgtggacaagatcttgcagtaccgcgaaatggcgaaattgaaaggcacctatattgaccgtcttccggcattagtccacccgaaaacgggacgcctccatacccgcttcaaccaaacagccacggcgaccggtcgtttgtcctcctctgatccaaaccttcagaatattccagtacgtaccccattgggccagaagatccgccgtgcgtttgtagctgaggagggttggcgtttagtggccctcgattatcgtcaaattgaattacgtgtccttgcccatctttctggcgatgagaacctcatccgcgtgtttcaggaaggcaaagacattcacactcaaacggcaagctggatgtttggattatcagctgaagcgatcgatcctttgatgcgtcgtgcagcgaagaccatcaatttcggtgttctctacggtatgagtgcctttcgtttgtcgcaggaattaggcattccctatgaagaagctcaggcgttcattcagaaatactttcaaagctatcccaaagttaaagcatggatcgagaagactctccgtgaaggccgcacacgtggttacgtagagaccttatttggacgtcgccgctatgttcccgatttaaacgctcgcgtgaaaggcaagcgtgaagccgccgaacgcatggcgttcaacatgcctgtacagggcacggcagctgacctcatgaaacttgcaatggtgcgcctttttccagctttgcgtgaagttggtgcccgcatgctcttgcaggtccacgatgaactcttgttagaagcgccaaaagagcgtgcggaagaggtggcagccctcgcgaaagaagttatggaaggcgtgtggcccttagcggtgcctcttgaagtcgaagttggtattggcgaggattggctggctgccaaagga

SEQ ID NO: 5374 - protein, 841 aa, synthetic construct
  REGION 1..841: note = Variant of DNA polymerase I from Thermus sp. strain 2.9
MHHHHHHGGSGVLPVFEPKGRVLLVDGHHLAYRNFFALKGLTTSLGEPVQGVYGFAKSLLKALKEDGDVVIVVFDAKAPSFRHEAYEAYKAGRAPTPEDFPRQLALMKELVDLLGLERLEVPGFEADDVLATLAKKAEREGYEVQILTADRDLFQLLSPRISVLHPEGHRITPEWLWEKYGLRPEQWVDFRALAGDPSDNIPGVKGIGEKTALKLLKEWGSLENLLKNLDQVKPESVREKILAHLEDLKLSRELSRVRTDLPLEVDFGRRREPDWEGLKAFLERLEFGSLLHEFGLLESPLLAEEAPWPPPEGAFLGYRLSRPEPMWAELLALAASAQGRVYRAEDPHGALRGLFEVRGLLAKDLAVVALREGLDLPPTDDPMLLAYLLDPSNTTPEGVARRYGGEWTEDAAKRALLAERLHENLLGRLQGEERLLWLYEEVEKPLSRVLAHMEATGVKLDVAYLENLSLEVAAHMRRLEEEVFRLAGRSFRLNSRDQLERVLFDELGLPPIGKTEKTGKRSTSAAVLEALREVHPIVDKILQYREMAKLKGTYIDRLPALVHPKTGRLHTRFNQTATATGRLSSSDPNLQNIPVRTPLGQKIRRAFVAEEGWRLVALDYRQIELRVLAHLSGDENLIRVFQEGKDIHTQTASWMFGLSAEAIDPLMRRAAKTINFGVLYGMSAFRLSQELGIPYEEAQAFIQKYFQSYPKVKAWIEKTLREGRTRGYVETLFGRRRYVPDLNARVKGKREAAERMAFNMPVQGTAADLMKLAMVRLFPALREVGARMLLQVHDELLLEAPKERAEEVAALAKEVMEGVWPLAVPLEVEVGIGEDWLAAKG

SEQ ID NO: 5375 - DNA, 2523 bp, synthetic construct
  misc_feature 1..2523: note = Variant of DNA polymerase I from Thermus sp. strain 2.9
  source 1..2523: mol_type = other DNA
atgcaccatcatcatcatcatggcggtagcggcgtgttaccggtgttcgagcctaaaggtcgcgtgcttctggttgatggccatcatctcgcgtatcgtaacttctttgccctgaaaggattaaccaccagcctgggcgagccggtacagggtgtctacggctttgcaaagtcgctcctgaaagctctgaaagaagacggtgatgtggtgattgttgtctttgatgcgaaagcgccaagttttcgccacgaagcgtacgaagcttacaaagccgggcgtgctccaacgccggaagactttcctcgccaattggcgcttatgaaggaattagtggatttgcttggcctcgaacgcttggaagttcccggtttcgaggcagacgacgtattagcgactctcgcaaagaaagccgaacgtgagggctatgaagtccagatcttgacagcagatcgcgatcttttccagcttttatctccgcgcatctcggtgttacacccggaagggcatcgtatcaccccggaatggctctgggagaaatatggtttgcgtcccgaacaatgggtggattttcgcgccttagcaggcgatccgagcgacaatattccgggagttaaaggtatcggcgagaagacggcgctcaagctccttaaagaatgggggtcgttggagaacttgcttaagaatttagatcaggtcaaaccagagtcagtgcgtgagaagattcttgctcacctcgaagacctcaaattaagccgcgaattgtcccgtgtacgcaccgatttgccgctcgaagttgatttcggtcgccgccgcgaacctgactgggagggtcttaaagcgtttttagagcgtcttgaatttggttcgctcttgcatgaattcggccttttagaaagcccgttactggccgaagaagcaccttggccaccgcccgagggcgcgtttttaggttaccgtttgagtcgcccggaaccgatgtgggccgaattactggctcttgcagcgtctgcccagggacgtgtgtatcgcgcggaagaccctcatggtgcgctccgcggcctcttcgaagtccgtggactccttgccaaagacttagctgttgttgcattgcgcgaaggtcttgatttacctccgactgatgatccaatgcttcttgcgtacctcttggacccgtcaaacacgacgcccgaaggcgtagcccgtcgttacggcggcgagtggaccgaagatgcagcgaaacgcgcgttattggccgaacgtttgcacgaaaatttattaggacgtttgcaaggcgaggaacgtctcctctggctttacgaagaagtggagaaaccattgagtcgcgtgctcgcgcatatggaagctaccggtgtcaaattagacgtggcgtatttggagaatctcagccttgaagttgctgcccacatgcgccgcttggaggaagaagtattccgtttagcaggccgttcctttcgccttaactctcgcgatcagttagaacgtgtgttgttcgatgaacttggtctccctcctatcggcaagacagagaagaccggtaaacgtagcacttcagcggcggttttagaagctcttcgcgaagtccatcccattgtggacaagatcttgcagtaccgcgaaatggcgaaattgaaaggcacctatattgaccgtcttccggcattagtccacccgaaaacgggacgcctccatacccgcttcaaccaaacagccacggcgaccggtcgtttgtcctcctctgatccaaaccttcagaatattccagtacgtaccccattgggccagaagatccgccgtgcgtttgtagctgaggagggttggcgtttagtggccctcgattatcgtcaaattgaattacgtgtccttgcccatctttctggcgatgagaacctcatccgcgtgtttcaggaaggcaaagacattcacactcaaacggcaagctggatgtttggattatcagctgaagcgatcgatcctttgatgcgtcgtgcagcgaagaccatcaatttcggtgttctctacggtatgagtgcctttcgtttgtcgcaggaattaggcattccctatgaagaagctcaggcgttcattcagaaatactttcaaagctatcccaaagttaaatattggatcgagaagactctccgtgaaggccgcacacgtggttacgtagagaccttatttggacgtcgccgctatgttcccgatttaaacgctcgcgtgaaaggcaagcgtgaagccgccgaacgcatggcgttcaacatgcctgtacagggcacggcagctgacctcatgaaacttgcaatggtgcgcctttttccacaattgcgtgaagttggtgcccgcatgctcttgcaggtccacgatgaactcttgttagaagcgccaaaagagcgtgcggaagaggtggcagccctcgcgaaagaagttatggaaggcgtgtggcccttagcggtgcctcttgaagtcgaagttggtattggcgaggattggctggctgccaaagga

SEQ ID NO: 5376 - protein, 841 aa, synthetic construct
  REGION 1..841: note = Variant of DNA polymerase I from Thermus sp. strain 2.9
MHHHHHHGGSGVLPVFEPKGRVLLVDGHHLAYRNFFALKGLTTSLGEPVQGVYGFAKSLLKALKEDGDVVIVVFDAKAPSFRHEAYEAYKAGRAPTPEDFPRQLALMKELVDLLGLERLEVPGFEADDVLATLAKKAEREGYEVQILTADRDLFQLLSPRISVLHPEGHRITPEWLWEKYGLRPEQWVDFRALAGDPSDNIPGVKGIGEKTALKLLKEWGSLENLLKNLDQVKPESVREKILAHLEDLKLSRELSRVRTDLPLEVDFGRRREPDWEGLKAFLERLEFGSLLHEFGLLESPLLAEEAPWPPPEGAFLGYRLSRPEPMWAELLALAASAQGRVYRAEDPHGALRGLFEVRGLLAKDLAVVALREGLDLPPTDDPMLLAYLLDPSNTTPEGVARRYGGEWTEDAAKRALLAERLHENLLGRLQGEERLLWLYEEVEKPLSRVLAHMEATGVKLDVAYLENLSLEVAAHMRRLEEEVFRLAGRSFRLNSRDQLERVLFDELGLPPIGKTEKTGKRSTSAAVLEALREVHPIVDKILQYREMAKLKGTYIDRLPALVHPKTGRLHTRFNQTATATGRLSSSDPNLQNIPVRTPLGQKIRRAFVAEEGWRLVALDYRQIELRVLAHLSGDENLIRVFQEGKDIHTQTASWMFGLSAEAIDPLMRRAAKTINFGVLYGMSAFRLSQELGIPYEEAQAFIQKYFQSYPKVKYWIEKTLREGRTRGYVETLFGRRRYVPDLNARVKGKREAAERMAFNMPVQGTAADLMKLAMVRLFPQLREVGARMLLQVHDELLLEAPKERAEEVAALAKEVMEGVWPLAVPLEVEVGIGEDWLAAKG

SEQ ID NO: 5377 - DNA, 2523 bp, synthetic construct
  misc_feature 1..2523: note = Variant of DNA polymerase I from Thermus sp. strain 2.9
  source 1..2523: mol_type = other DNA
atgcaccatcatcatcatcatggcggtagcggcgtgttaccggtgttcgagcctaaaggtcgcgtgcttctggttgatggccatcatctcgcgtatcgtaacttctttgccctgaaaggattaaccaccagccgcggcgagccggtacagggtgtctacggctttgcaaagtcgctcctgaaagctctgaaagaagacggtgatgtggtgattgttgtctttgatgcgaaagcgccaagttttcgccacgaagcgtacgaagcttacaaagccgggcgtgctccaacgccggaagactttcctcgccaattggcgcttatgaaggaattagtggatttgcttggcctcgaacgcttggaagttcccggtttcgaggcagacgacgtattagcgactctcgcaaagaaagccgaacgtgagggctatgaagtccagatcttgacagcagatcgcgatcttttccagcttttatctccgcgcatctcggtgttacacccggaagggcatcgtatcaccccggaatggctctgggagaaatatggtttgcgtcccgaacaatgggtggattttcgcgccttagcaggcgatccgagcgacaatattccgggagttaaaggtatcggcgagaagacggcgctcaagctccttaaagaatgggggtcgttggagaacttgcttaagaatttagatcaggtcaaaccagagtcagtgcgtgagaagattcttgctcacctcgaagacctcaaattaagccgcgaattgtcccgtgtacgcaccgatttgccgctcgaagttgatttccgccgccgccgcgaacctgactgggagggtcttaaagcgtttttagagcgtcttgaatttggttcgctcttgcatgaattcggccttttagaaagcccgttactggccgaagaagcaccttggccaccgcccgagggcgcgtttttaggttaccgtttgagtcgcccggaaccgatgtgggccgaattactggctcttgcagcgtctgcccagggacgtgtgtatcgcgcggaagaccctcatggtgcgctccgcggcctcttcgaagtccgtggactccttgccaaagacttagctgttgttgcattgcgcgaaggtcttgatttacctccgactgatgatccaatgcttcttgcgtacctcttggacccgtcaaacacgacgcccgaaggcgtagcccgtcgttacggcggcgagtggaccgaagatgcagcgaaacgcgcgttattggccgaacgtttgcacgaaaatttattaggacgtttgcaaggcgaggaacgtctcctctggctttacgaagaagtggagaaaccattgagtcgcgtgctcgcgcatatggaagctaccggtgtcaaattagacgtggcgtatttggagaatctcagccttgaagttgctgcccacatgcgccgcttggaggaagaagtattccgtttagcaggccgttcctttcgccttaactctcgcgatcagttagaacgtgtgttgttcgatgaacttggtctccctcctatcggcaagacagagaagaccggtaaacgtagcacttcagcggcggttttagaagctcttcgcgaagtccatcccattgtggacaagatcttgcagtaccgcgaaatggcgaaattgaaaggcacctatattgaccgtcttccggcattagtccacccgaaaacgggacgcctccatacccgcttcaaccaaacagccacggcgaccggtcgtttgtccagttctgatccaaaccttcagaatattccagtacgtaccccattgggccagaagatccgccgtgcgtttgtagctgaggagggttggcgtttagtggccctcgattatagtcaaattgaattacgtgtccttgcccatctttctggcgatgagaacctcatccgcgtgtttcaggaaggcaaagacattcacactcaaacggcaagctggatgtttggattatcagctgaagcgatcgatcctttgatgcgtcgtgcagcgaagaccatcaatttcggtgttctctacggtatgagtgcctttcgtttgtcgcaggaattaggcattccctatgaagaagctcaggcgttcattcagaaatactttcaaagctatcccaaagttaaagcatggatcgagaagactctcgaggaaggccgcacacgtggttacgtagagaccttatttggacgtcgccgctatgttcccgatttaaacgctcgcgtgaaaggcaaacgtgaagccgccgaacgcatggcgttcaacatgcctgtacagggcacggcagctgacctcatgaaacttgcaatggtgcgcctttttccacaattgcgtgaagttggtgcccgcatgctcttgcaggtccacgatgaactcttgttagaagcgccaaaagagcgtgcggaagaggtggcagccctcgcgaaagaagttatggaaggcgtgtggcccttagcggtgcctcttgaagtcgaagttggtattggcgaggattggctggctgccaaagga

SEQ ID NO: 5378 - protein, 841 aa, synthetic construct
  REGION 1..841: note = Variant of DNA polymerase I from Thermus sp. strain 2.9
MHHHHHHGGSGVLPVFEPKGRVLLVDGHHLAYRNFFALKGLTTSRGEPVQGVYGFAKSLLKALKEDGDVVIVVFDAKAPSFRHEAYEAYKAGRAPTPEDFPRQLALMKELVDLLGLERLEVPGFEADDVLATLAKKAEREGYEVQILTADRDLFQLLSPRISVLHPEGHRITPEWLWEKYGLRPEQWVDFRALAGDPSDNIPGVKGIGEKTALKLLKEWGSLENLLKNLDQVKPESVREKILAHLEDLKLSRELSRVRTDLPLEVDFRRRREPDWEGLKAFLERLEFGSLLHEFGLLESPLLAEEAPWPPPEGAFLGYRLSRPEPMWAELLALAASAQGRVYRAEDPHGALRGLFEVRGLLAKDLAVVALREGLDLPPTDDPMLLAYLLDPSNTTPEGVARRYGGEWTEDAAKRALLAERLHENLLGRLQGEERLLWLYEEVEKPLSRVLAHMEATGVKLDVAYLENLSLEVAAHMRRLEEEVFRLAGRSFRLNSRDQLERVLFDELGLPPIGKTEKTGKRSTSAAVLEALREVHPIVDKILQYREMAKLKGTYIDRLPALVHPKTGRLHTRFNQTATATGRLSSSDPNLQNIPVRTPLGQKIRRAFVAEEGWRLVALDYSQIELRVLAHLSGDENLIRVFQEGKDIHTQTASWMFGLSAEAIDPLMRRAAKTINFGVLYGMSAFRLSQELGIPYEEAQAFIQKYFQSYPKVKAWIEKTLEEGRTRGYVETLFGRRRYVPDLNARVKGKREAAERMAFNMPVQGTAADLMKLAMVRLFPQLREVGARMLLQVHDELLLEAPKERAEEVAALAKEVMEGVWPLAVPLEVEVGIGEDWLAAKG

SEQ ID NO: 5379 - DNA, 2523 bp, synthetic construct
  misc_feature 1..2523: note = Variant of DNA polymerase I from Thermus sp. strain 2.9
  source 1..2523: mol_type = other DNA
atgcaccatcatcatcatcatggcggtagcggcgtgttaccggtgttcgagcctaaaggtcgcgtgcttctggttgatggccatcatctcgcgtatcgtaacttctttgccctgaaaggattaaccaccagcctgggcgagccggtacagggtgtctacggctttgcaaagtcgctcctgaaagctctgaaagaagacggtgatgtggtgattgttgtctttgatgcgaaagcgccaagttttcgccacgaagcgtacgaagcttacaaagccgggcgtgctccaacgccggaagactttcctcgccaattggcgcttatgaaggaattagtggatttgcttggcctcgaacgcttggaagttcccggtttcgaggcagacgacgtattagcgactctcgcaaagaaagccgaacgtgagggctatgaagtccagatcttgacagcagatcgcgatcttttccagcttttatctccgcgcatctcggtgttacacccggaagggcatcgtatcaccccggaatggctctgggagaaatatggtttgcgtcccgaacaatgggtggattttcgcgccttagcaggcgatccgagcgacaatattccgggagttaaaggtatcggcgagaagacggcgctcaagctccttaaagaatgggggtcgttggagaacttgcttaagaatttagatcaggtcaaaccagagtcagtgcgtgagaagattcttgctcacctcgaagacctcaaattaagccgcgaattgtcccgtgtacgcaccgatttgccgctcgaagttgatttcggtcgccgccgcgaacctgactgggagggtcttaaagcgtttttagagcgtcttgaatttggttcgctcttgcatgaattcggccttttagaaagcccgttactggccgaagaagcaccttggccaccgcccgagggcgcgtttttaggttaccgtttgagtcgcccggaaccgatgtgggccgaattactggctcttgcagcgtctgcccagggacgtgtgtatcgcgcggaagaccctcatggtgcgctccgcggcctcttcgaagtccgtggactccttgccaaagacttagctgttgttgcattgcgcgaaggtcttgatttacctccgactgatgatccaatgcttcttgcgtacctcttggacccgtcaaacacgacgcccgaaggcgtagcccgtcgttacggcggcgagtggaccgaagatgcagcgaaacgcgcgttattggccgaacgtttgcacgaaaatttattaggacgtttgcaaggcgaggaacgtctcctctggctttacgaagaagtggagaaaccattgagtcgcgtgctcgcgcatatggaagctaccggtgtcaaattagacgtggcgtatttggagaatcttcaccttgaagtttttgcccacatgcgccgcttggaggaagaagtattccgtttagcaggccgttcctttcgccttaactctcgcgatcagttagaacgtgtgttgttcgatgaacttggtctccctcctatcggcaagacagagaagaccggtaaacgtagcacttcagcggcggttttagaagctcttcgcgaagtccatcccattgtggacaagatcttgcagtaccgcgaaatggcgaaattgaaaggcacctatattgaccgtcttccggcattagtccacccgaaaacgggacgcctccatacccgcttcaaccaaacagccacggcgaccggtcgtttgtcctcctctgatccaaaccttcagaatattccagtacgtaccccattgggccagaagatccgccgtgcgtttgtagctgaggagggttggcgtttagtggccctcgattatcgtcaaattgaattacgtgtccttgcccatctttctggcgatgagaacctcatccgcgtgtttcaggaaggcaaagacattcacactcaaacggcaagctggatgtttggattatcagctgaagcgatcgatcctttgatgcgtcgtgcagcgaagaccatcaatttcggtgttctctacggtatgagtgcctttcgtttgtcgcaggaattaggcattccctatgaagaagctcaggcgttcattcagaaatactttcaaagctatcccaaagttaaagcatggatcgagaagactctccgtgaaggccgcacacgtggttacgtagagaccttatttggacgtcgccgctatgttcccgatttaaacgctcgcgtgaaaggcaagcgtgaagccgccgaacgcatggcgttcaacatgcctgtacagggcacggcagctgacctcatgaaacttgcaatggtgcgcctttttccacaattgcgtgaagttggtgcccgcatgctcttgcaggtccacgatgaactcttgttagaagcgccaaaagagcgtgcggaagaggtggcagccctcgcgaaagaagttatggaaggcgtgtggcccttagcggtgcctcttgaagtcgaagttggtattggcgaggattggctggctgccaaagga

SEQ ID NO: 5380 - protein, 841 aa, synthetic construct
  REGION 1..841: note = Variant of DNA polymerase I from Thermus sp. strain 2.9
MHHHHHHGGSGVLPVFEPKGRVLLVDGHHLAYRNFFALKGLTTSLGEPVQGVYGFAKSLLKALKEDGDVVIVVFDAKAPSFRHEAYEAYKAGRAPTPEDFPRQLALMKELVDLLGLERLEVPGFEADDVLATLAKKAEREGYEVQILTADRDLFQLLSPRISVLHPEGHRITPEWLWEKYGLRPEQWVDFRALAGDPSDNIPGVKGIGEKTALKLLKEWGSLENLLKNLDQVKPESVREKILAHLEDLKLSRELSRVRTDLPLEVDFGRRREPDWEGLKAFLERLEFGSLLHEFGLLESPLLAEEAPWPPPEGAFLGYRLSRPEPMWAELLALAASAQGRVYRAEDPHGALRGLFEVRGLLAKDLAVVALREGLDLPPTDDPMLLAYLLDPSNTTPEGVARRYGGEWTEDAAKRALLAERLHENLLGRLQGEERLLWLYEEVEKPLSRVLAHMEATGVKLDVAYLENLHLEVFAHMRRLEEEVFRLAGRSFRLNSRDQLERVLFDELGLPPIGKTEKTGKRSTSAAVLEALREVHPIVDKILQYREMAKLKGTYIDRLPALVHPKTGRLHTRFNQTATATGRLSSSDPNLQNIPVRTPLGQKIRRAFVAEEGWRLVALDYRQIELRVLAHLSGDENLIRVFQEGKDIHTQTASWMFGLSAEAIDPLMRRAAKTINFGVLYGMSAFRLSQELGIPYEEAQAFIQKYFQSYPKVKAWIEKTLREGRTRGYVETLFGRRRYVPDLNARVKGKREAAERMAFNMPVQGTAADLMKLAMVRLFPQLREVGARMLLQVHDELLLEAPKERAEEVAALAKEVMEGVWPLAVPLEVEVGIGEDWLAAKG

SEQ ID NO: 5381 - DNA, 2523 bp, synthetic construct
  misc_feature 1..2523: note = Variant of DNA polymerase I from Thermus sp. strain 2.9
  source 1..2523: mol_type = other DNA
atgcaccatcatcatcatcatggcggtagcggcgtgttaccggtgttcgagcctaaaggtcgcgtgcttctggttgatggccatcatctcgcgtatcgtaacttctttgccctgaaaggattaaccaccagcctgggcgagccggtacagggtgtctacggctttgcaaagtcgctcctgaaagctctgaaagaagacggtgatgtggtgattgttgtctttgatgcgaaagcgccaagttttcgccacgaagcgtacgaagcttacaaagccgggcgtgctccaacgccggaagactttcctcgccaattggcgcttatgaaggaattagtggatttgcttggcctcgaacgcttggaagttcccggtttcgaggcagacgacgtattagcgactctcgcaaagaaagccgaacgtgagggctatgaagtccagatcttgacagcagatcgcgatcttttccagcttttatctccgcgcatctcggtgttacacccggaagggcatcgtatcaccccggaatggctctgggagaaatatggtttgcgtcccgaacaatgggtggattttcgcgccttagcaggcgatccgagcgacaatattccgggagttaaaggtatcggcgagaagacggcgctcaagctccttaaagaatgggggtcgttggagaacttgcttaagaatttagatcaggtcaaaccagagtcagtgcgtgagaagattcttgctcacctcgaagacctcaaattaagccgcgaattgtcccgtgtacgcaccgatttgccgctcgaagttgatttcggtcgccgccgcgaacctgactgggagggtcttaaagcgtttttagagcgtcttgaatttggttcgctcttgcatgaattcggccttttagaaagcccgttactggccgaagaagcaccttggccaccgcccgagggcgcgtttttaggttaccgtttgagtcgcccggaaccgatgtgggccgaattactggctcttgcagcgtctgcccagggacgtgtgtatcgcgcggaagaccctcatggtgcgctccgcggcctcttcgaagtccgtggactccttgccaaagacttagctgttgttgcattgcgcgaaggtcttgatttacctccgactgatgatccaatgcttcttgcgtacctcttggacccgtcaaacacgacgcccgaaggcgtagcccgtcgttacggcggcgagtggaccgaagatgcagcgaaacgcgcgttattggccgaacgtttgcacgaaaatttattaggacgtttgcaaggcgaggaacgtctcctctggctttacgaagaagtggagaaaccattgagtcgcgtgctcgcgcatatggaagctaccggtgtcaaattagacgtggcgtatttggagaatctcagccttgaagttgctgcccacatgcgccgcttggaggaagaagtattccgtttagcaggccgttcctttcgccttaactctcgcgatcagttagaacgtgtgttgttcgatgaacttggtctccctcctatcggcaagacagagaagaccggtaaacgtagcacttcagcggcggttttagaagctcttcgcgaagtccatcccattgtggacaagatcttgcagtaccgcgaaatggcgaaattgaaaggcacctatattgaccgtcttccggcattagtccacccgaaaacgggacgcctccatacccgcttcaaccaaacagccacggcgaccggtcgtttgtcctcctctgatccaaaccttcagaatattccagtacgtaccccattgggccagaagatccgccgtgcgtttgtagctgaggagggttggcgtttagtggccctcgattatcgtcaaattgaattacgtgtccttgcccatctttctggcgatgagaacctcatccgcgtgtttcaggaaggcaaagacattcacactcaaacggcaagctggatgtttggattatcagctgaagcgatcgatcctttgatgcgtcgtgcagcgaagaccatcaatttcggtgttctctacggtatgagtgcctttcgtttgtcgcaggaattaggcattccctatgaagaagctcaggcgttcattcagaaatactttcaaagctatcccaaagttaaagcatggatcgagaagactctccgtgaaggccgcacacgtggttacgtagagaccttatttggacgtcgccgctatgttcccgatttaaacgctcgcgtgaaaggcaagcgtgaagccgccgaacgcatggcgttcaacatgcctgtacagggcacggcagctgacctcatgaaacttgcaatggtgcgcctttttccacaattgcgtgaagttggtgcccgcatgctcttgcaggtccacgatgaactcttgttagaagcgccaaaagagcgtgcggaagaggtggcagccctcgcgaaagaagttatgaatggcgtgtggcccttagcggtgcctcttgaagtcgaagttggtattggcgaggattggctggctgccaaagga

SEQ ID NO: 5382 - protein, 841 aa, synthetic construct
  REGION 1..841: note = Variant of DNA polymerase I from Thermus sp. strain 2.9
MHHHHHHGGSGVLPVFEPKGRVLLVDGHHLAYRNFFALKGLTTSLGEPVQGVYGFAKSLLKALKEDGDVVIVVFDAKAPSFRHEAYEAYKAGRAPTPEDFPRQLALMKELVDLLGLERLEVPGFEADDVLATLAKKAEREGYEVQILTADRDLFQLLSPRISVLHPEGHRITPEWLWEKYGLRPEQWVDFRALAGDPSDNIPGVKGIGEKTALKLLKEWGSLENLLKNLDQVKPESVREKILAHLEDLKLSRELSRVRTDLPLEVDFGRRREPDWEGLKAFLERLEFGSLLHEFGLLESPLLAEEAPWPPPEGAFLGYRLSRPEPMWAELLALAASAQGRVYRAEDPHGALRGLFEVRGLLAKDLAVVALREGLDLPPTDDPMLLAYLLDPSNTTPEGVARRYGGEWTEDAAKRALLAERLHENLLGRLQGEERLLWLYEEVEKPLSRVLAHMEATGVKLDVAYLENLSLEVAAHMRRLEEEVFRLAGRSFRLNSRDQLERVLFDELGLPPIGKTEKTGKRSTSAAVLEALREVHPIVDKILQYREMAKLKGTYIDRLPALVHPKTGRLHTRFNQTATATGRLSSSDPNLQNIPVRTPLGQKIRRAFVAEEGWRLVALDYRQIELRVLAHLSGDENLIRVFQEGKDIHTQTASWMFGLSAEAIDPLMRRAAKTINFGVLYGMSAFRLSQELGIPYEEAQAFIQKYFQSYPKVKAWIEKTLREGRTRGYVETLFGRRRYVPDLNARVKGKREAAERMAFNMPVQGTAADLMKLAMVRLFPQLREVGARMLLQVHDELLLEAPKERAEEVAALAKEVMNGVWPLAVPLEVEVGIGEDWLAAKG

SEQ ID NO: 5383 - DNA, 2523 bp, synthetic construct
  misc_feature 1..2523: note = Variant of DNA polymerase I from Thermus sp. strain 2.9
  source 1..2523: mol_type = other DNA
atgcaccatcatcatcatcatggcggtagcggcgtgttaccggtgttcgagcctaaaggtcgcgtgcttctggttgatggccatcatctcgcgtatcgtaacttctttgccctgaaaggattaaccaccagcctgggcgagccggtacagggtgtctacggctttgcaaagtcgctcctgaaagctctgaaagaagacggtgatgtggtgattgttgtctttgatgcgaaagcgccaagttttcgccacgaagcgtacgaagcttacaaagccgggcgtgctccaacgccggaagactttcctcgccaattggcgcttatgaaggaattagtggatttgcttggcctcgaacgcttggaagttcccggtttcgaggcagacgacgtattagcgactctcgcaaagaaagccgaacgtgagggctatgaagtccagatcttgacagcagatcgcgatcttttccagcttttatctccgcgcatctcggtgttacacccggaagggcatcgtatcaccccggaatggctctgggagaaatatggtttgcgtcccgaacaatgggtggattttcgcgccttagcaggcgatccgagcgacaatattccgggagttaaaggtatcggcgagaagacggcgctcaagctccttaaagaatgggggtcgttggagaacttgcttaagaatttagatcaggtcaaaccagagtcagtgcgtgagaagattcttgctcacctcgaagacctcaaattaagccgcgaattgtcccgtgtacgcaccgatttgccgctcgaagttgatttcggtcgccgccgcgaacctgactgggagggtcttaaagcgtttttagagcgtcttgaatttggttcgctcttgcatgaattcggccttttagaaagcccgttactggccgaagaaaatccttggccaccgcccgagggcgcgtttttaggttaccgtttgagtcgcccggaaccgatgtgggccgaattactggctcttgcagcgtctgcccagggacgtgtgtatcgcgcggaagaccctcatggtgcgctccgcggcctcttcgaagtccgtggactccttgccaaagacttagctgttgttgcattgcgcgaaggtcttgatttacctccgactgatgatccaatgcttcttgcgtacctcttggacccgtcaaacacgacgcccgaaggcgtagcccgtcgttacggcggcgagtggaccgaagatgcagcgaaacgcgcgttattggccgaacgtttgcacgaaaatttattaggacgtttgcaaggcgaggaacgtctcctctggctttacgaagaagtggagaaaccattgagtcgcgtgctcgcgcatatggaagctaccggtgtcaaattagacgtggcgtatttggagaatctcagccttgaagttgctgcccacatgcgccgcttggaggaagaagtattccgtttagcaggccgttcctttcgccttaactctcgcgatcagttagaacgtgtgttgttcgatgaacttggtctccctcctatcggcaagacagagaagaccggtaaacgtagcacttcagcggcggttttagaagctcttcgcgaagtccatcccattgtggacaagatcttgcagtaccgcgaaatggcgaaattgaaaggcacctatattgaccgtcttccggcattagtccacccgaaaacgggacgcctccatacccgcttcaaccaaacagccacggcgaccggtcgtttgtcctcctctgatccaaaccttcagaatattccagtacgtaccccattgggccagaagatccgccgtgcgtttgtagctgaggagggttggcgtttagtggccctcgattatcgtcaaattgaattacgtgtccttgcccatctttctggcgatgagaacctcatccgcgtgtttcaggaaggcaaagacattcacactcaaacggcaagctggatgtttggattatcagctgaagcgatcgatcctttgatgcgtcgtgcagcgaagaccatcaatttcggtgttctctacggtatgagtgcctttcgtttgtcgcaggaattaggcattccctatgaagaagctcaggcgttcattcagaaatactttcaaagctatcccaaagttaaagcatggatcgagaagactctccgtgaaggccgcacacgtggttacgtagagaccttatttggacgtcgccgctatgttcccgatttaaacgctcgcgtgaaaggcaagcgtgaagccgccgaacgcatggcgttcaacatgcctgtacagggcacggcagctgacctcatgaaacttgcaatggtgcgcctttttccacaattgcgtgaagttggtgcccgcatgctcttgcaggtccacgatgaactcttgttagaagcgccaaaagagcgtgcggaagaggtggcagccctcgcgaaagaagttatggaaggcgtgtggcccttagcggtgcctcttgaagtcgaagttggtattggcgaggattggctggctgccaaagga

SEQ ID NO: 5384 - protein, 841 aa, synthetic construct
  REGION 1..841: note = Variant of DNA polymerase I from Thermus sp. strain 2.9
MHHHHHHGGSGVLPVFEPKGRVLLVDGHHLAYRNFFALKGLTTSLGEPVQGVYGFAKSLLKALKEDGDVVIVVFDAKAPSFRHEAYEAYKAGRAPTPEDFPRQLALMKELVDLLGLERLEVPGFEADDVLATLAKKAEREGYEVQILTADRDLFQLLSPRISVLHPEGHRITPEWLWEKYGLRPEQWVDFRALAGDPSDNIPGVKGIGEKTALKLLKEWGSLENLLKNLDQVKPESVREKILAHLEDLKLSRELSRVRTDLPLEVDFGRRREPDWEGLKAFLERLEFGSLLHEFGLLESPLLAEENPWPPPEGAFLGYRLSRPEPMWAELLALAASAQGRVYRAEDPHGALRGLFEVRGLLAKDLAVVALREGLDLPPTDDPMLLAYLLDPSNTTPEGVARRYGGEWTEDAAKRALLAERLHENLLGRLQGEERLLWLYEEVEKPLSRVLAHMEATGVKLDVAYLENLSLEVAAHMRRLEEEVFRLAGRSFRLNSRDQLERVLFDELGLPPIGKTEKTGKRSTSAAVLEALREVHPIVDKILQYREMAKLKGTYIDRLPALVHPKTGRLHTRFNQTATATGRLSSSDPNLQNIPVRTPLGQKIRRAFVAEEGWRLVALDYRQIELRVLAHLSGDENLIRVFQEGKDIHTQTASWMFGLSAEAIDPLMRRAAKTINFGVLYGMSAFRLSQELGIPYEEAQAFIQKYFQSYPKVKAWIEKTLREGRTRGYVETLFGRRRYVPDLNARVKGKREAAERMAFNMPVQGTAADLMKLAMVRLFPQLREVGARMLLQVHDELLLEAPKERAEEVAALAKEVMEGVWPLAVPLEVEVGIGEDWLAAKG

SEQ ID NO: 5385 - DNA, 2523 bp, synthetic construct
  misc_feature 1..2523: note = Variant of DNA polymerase I from Thermus sp. strain 2.9
  source 1..2523: mol_type = other DNA
atgcaccatcatcatcatcatggcggtagcggcgtgttaccggtgttcgagcctaaaggtcgcgtgcttctggttgatggccatcatctcgcgtatcgtaacttctttgccctgaaaggattaaccaccagccgcggcgagccggtacagggtgtctacggctttgcaaagtcgctcctgaaagctctgaaagaagacggtgatgtggtgattgttgtctttgatgcgaaagcgccaagttttcgccacgaagcgtacgaagcttacaaagccgggcgtgctccaacgccggaagactttcctcgccaattggcgcttatgaaggaattagtggatttgcttggcctcgaacgcttggaagttcccggtttcgaggcagacgacgtattagcgactctcgcaaagaaagccgaacgtgagggctatgaagtccagatcttgacagcagatcgcgatcttttccagcttttatctccgcgcatctcggtgttacacccggaagggcatcgtatcaccccggaatggctctgggagaaatatggtttgcgtcccgaacaatgggtggattttcgcgccttagcaggcgatccgagcgacaatattccgggagttaaaggtatcggcgagaagacggcgctcaagctccttaaagaatgggggtcgttggagaacttgcttaagaatttagatcaggtcaaaccagagtcagtgcgtgagaagattcttgctcacctcgaagacctcaaattaagccgcgaattgtcccgtgtacgcaccgatttgccgctcgaagttgatttcggtcgccgccgcgaacctgactgggagggtcttaaagcgtttttagagcgtcttgaatttggttcgctcttgcatgaattcggccttttagaaagcccgttactggccgaagaagcaccttggccaccgcccgagggcgcgtttttaggttaccgtttgagtcgcccggaaccgatgtgggccgaattactggctcttgcagcgtctgcccagggacgtgtgtatcgcgcggaagaccctcatggtgcgctccgcggcctcttcgaagtccgtggactccttgccaaagacttagctgttgttgcattgcgcgaaggtcttgatttacctccgactgatgatccaatgcttcttgcgtacctcttggacccgtcaaacacgacgcccgaaggcgtagcccgtcgttacggcggcgagtggaccgaagatgcagcgaaacgcgcgttattggccgaacgtttgcacgaaaatttattaggacgtttgcaaggcgaggaacgtctcctctggctttacgaagaagtggagaaaccattgagtcgcgtgctcgcgcatatggaagctaccggtgtcaaattagacgtggcgtatttggagaatctcagccttgaagttgctgcccacatgcgccgcttggaggaagaagtattccgtttagcaggccgttcctttcgccttaactctcgcgatcagttagaacgtgtgttgttcgatgaacttggtctccctcctatcggcaagacagagaagaccggtaaacgtagcacttcagcggcggttttagaagctcttcgcgaagtccatcccattgtggacaagatcttgcagtaccgcgaaatggcgaaattgaaaggcacctatattgaccgtcttccggcattagtccacccgaaaacgggacgcctccatacccgcttcaaccaaacagccacggcgaccggtcgtttgtcctcctctgatccaaaccttcagaatattccagtacgtaccccattgggccagaagatccgccgtgcgtttgtagctgaggagggttggcgtttagtggccctcgattatcgtcaaattgaattacgtgtccttgcccatctttctggcgatgagaacctcatccgcgtgtttcaggaaggcaaagacattcacactcaaacggcaagctggatgtttggattatcagctgaagcgatcgatcctttgatgcgtcgtgcagcgaagaccatcaatttcggtgttctctacggtatgagtgcctttcgtttgtcgcaggaattaggcattccctatgaagaagctcaggcgttcattcagaaatactttcaaagctatcccaaagttaaagcatggatcgagaagactctcgaggaaggccgcacacgtggttacgtagagaccttatttggacgtcgccgctatgttcccgatttaaacgctcgcgtgaaaggcaagcgtgaagccgccgaacgcatggcgttcaacatgcctgtacagggcacggcagctgacctcatgaaacttgcaatggtgcgcctttttccacaattgcgtgaagttggtgcccgcatgctcttgcaggtccacgatgaactcttgttagaagcgccaaaagagcgtgcggaagaggtggcagccctcgcgaaagaagttatggaaggcgtgtggcccttagcggtgcctcttgaagtcgaagttggtattggcgaggattggctggctgccaaagga

SEQ ID NO: 5386 - protein, 841 aa, synthetic construct
  REGION 1..841: note = Variant of DNA polymerase I from Thermus sp. strain 2.9
MHHHHHHGGSGVLPVFEPKGRVLLVDGHHLAYRNFFALKGLTTSRGEPVQGVYGFAKSLLKALKEDGDVVIVVFDAKAPSFRHEAYEAYKAGRAPTPEDFPRQLALMKELVDLLGLERLEVPGFEADDVLATLAKKAEREGYEVQILTADRDLFQLLSPRISVLHPEGHRITPEWLWEKYGLRPEQWVDFRALAGDPSDNIPGVKGIGEKTALKLLKEWGSLENLLKNLDQVKPESVREKILAHLEDLKLSRELSRVRTDLPLEVDFGRRREPDWEGLKAFLERLEFGSLLHEFGLLESPLLAEEAPWPPPEGAFLGYRLSRPEPMWAELLALAASAQGRVYRAEDPHGALRGLFEVRGLLAKDLAVVALREGLDLPPTDDPMLLAYLLDPSNTTPEGVARRYGGEWTEDAAKRALLAERLHENLLGRLQGEERLLWLYEEVEKPLSRVLAHMEATGVKLDVAYLENLSLEVAAHMRRLEEEVFRLAGRSFRLNSRDQLERVLFDELGLPPIGKTEKTGKRSTSAAVLEALREVHPIVDKILQYREMAKLKGTYIDRLPALVHPKTGRLHTRFNQTATATGRLSSSDPNLQNIPVRTPLGQKIRRAFVAEEGWRLVALDYRQIELRVLAHLSGDENLIRVFQEGKDIHTQTASWMFGLSAEAIDPLMRRAAKTINFGVLYGMSAFRLSQELGIPYEEAQAFIQKYFQSYPKVKAWIEKTLEEGRTRGYVETLFGRRRYVPDLNARVKGKREAAERMAFNMPVQGTAADLMKLAMVRLFPQLREVGARMLLQVHDELLLEAPKERAEEVAALAKEVMEGVWPLAVPLEVEVGIGEDWLAAKG

SEQ ID NO: 5387 - DNA, 2523 bp, synthetic construct
  misc_feature 1..2523: note = Variant of DNA polymerase I from Thermus sp. strain 2.9
  source 1..2523: mol_type = other DNA
atgcaccatcatcatcatcatggcggtagcggcgtgttaccggtgttcgagcctaaaggtcgcgtgcttctggttgatggccatcatctcgcgtatcgtaacttctttgccctgaaaggattaaccaccagccgcggcgagccggtacagggtgtctacggctttgcaaagtcgctcctgaaagctctgaaagaagacggtgatgtggtgattgttgtctttgatgcgaaagcgccaagttttcgccacgaagcgtacgaagcttacaaagccgggcgtgctccaacgccggaagactttcctcgccaattggcgcttatgaaggaattagtggatttgcttggcctcgaacgcttggaagttcccggtttcgaggcagacgacgtattagcgactctcgcaaagaaagccgaacgtgagggctatgaagtccagatcttgacagcagatcgcgatcttttccagcttttatctccgcgcatctcggtgttacacccggaagggcatcgtatcaccccggaatggctctgggagaaatatggtttgcgtcccgaacaatgggtggattttcgcgccttagcaggcgatccgagcgacaatattccgggagttaaaggtatcggcgagaagacggcgctcaagctccttaaagaatgggggtcgttggagaacttgcttaagaatttagatcaggtcaaaccagagtcagtgcgtgagaagattcttgctcacctcgaagacctcaaattaagccgcgaattgtcccgtgtacgcaccgatttgccgctcgaagttgatttccgccgccgccgcgaacctgactgggagggtcttaaagcgtttttagagcgtcttgaatttggttcgctcttgcatgaattcggccttttagaaagcccgttaccggccgaagaagcaccttggccaccgcccgagggcgcgtttttaggttaccgtttgagtcgcccggaaccgatgtgggccgaattactggctcttgcagcgtctgcccagggacgtgtgtatcgcgcggaagaccctcatggtgcgctccgcggcctcttcgaagtccgtggactccttgccaaagacttagctgttgttgcattgcgcgaaggtcttgatttacctccgactgatgatccaatgcttcttgcgtacctcttggacccgtcaaacacgacgcccgaaggcgtagcccgtcgttacggcggcgagtggaccgaagatgcagcgaaacgcgcgttattggccgaacgtttgcacgaaaatttattaggacgtttgcaaggcgaggaacgtctcctctggctttacgaagaagtggagaaaccattgagtcgcgtgctcgcgcatatggaagctaccggtgtcaaattagacgtggcgtatttggagaatctcagccttgaagttgctgcccacatgcgccgcttggaggaagaagtattccgtttagcaggccgctcctttcgccttaactctcgcgatcagttagaacgtgtgttgttcgatgaacttggtctccctcctatcggcaagacagagaagaccggtaaacgtagcacttcagcggcggttttagaagctcttcgcgaagtccatcccattgtggacaagatcttgcagtaccgcgaactggcgaaattgaaaggcacctatattgaccctcttccggcattagtccacccgaaaacgggacgcctccatacccgcttcaaccaaacagccacggcgaccggtcgtttgtcctcctctgatccaaaccttcagaatattccagtacgtaccccattgggccagaagatccgccgtgcgtttgtagctgaggagggttggcgtttagtggccctcgattatagtcaaattgaattacgtgtccttgcccatctttctggcgatgagaacctcatccgcgtgtttcaggaaggcaaagacattcacactcaaacggcaagctggatgtttggattatcagctgaagcgatcgatcctttgatgcgtcgtgcagcgaagaccatcaatttcggtgttctctacggtatgagtgcctttcgtttgtcgcaggaattaggcattccctatgaagaagctcaggcgttcattcagaaatactttcaaagctatcccaaagttaaagcatggatcgagaagactctccgcgaaggccgcacacgtggttacgtagagaccttatttggacgtcgccgctatgttcccgatttaaacgctcgcgtgaaaagcgtacgtgaagccgccgaacgcatggcgttcaacatgcctgtacagggcacggcagctgacctcatgaaacttgcaatggtgcgcctttttccacaattgcgtgaagttggtgcccgcatgctcttgcaggtccacgatgaactcttgttagaagcgccaaaagagcgtgcggaagaggtggcagccctcgcgaaagaagttatggaaggcgtgtggcccttagcggtgcctcttgaagtcgaagttggtattggcgaggattggctggctgccaaagga

SEQ ID NO: 5388 - protein, 841 aa, synthetic construct
  REGION 1..841: note = Variant of DNA polymerase I from Thermus sp. strain 2.9
MHHHHHHGGSGVLPVFEPKGRVLLVDGHHLAYRNFFALKGLTTSRGEPVQGVYGFAKSLLKALKEDGDVVIVVFDAKAPSFRHEAYEAYKAGRAPTPEDFPRQLALMKELVDLLGLERLEVPGFEADDVLATLAKKAEREGYEVQILTADRDLFQLLSPRISVLHPEGHRITPEWLWEKYGLRPEQWVDFRALAGDPSDNIPGVKGIGEKTALKLLKEWGSLENLLKNLDQVKPESVREKILAHLEDLKLSRELSRVRTDLPLEVDFRRRREPDWEGLKAFLERLEFGSLLHEFGLLESPLPAEEAPWPPPEGAFLGYRLSRPEPMWAELLALAASAQGRVYRAEDPHGALRGLFEVRGLLAKDLAVVALREGLDLPPTDDPMLLAYLLDPSNTTPEGVARRYGGEWTEDAAKRALLAERLHENLLGRLQGEERLLWLYEEVEKPLSRVLAHMEATGVKLDVAYLENLSLEVAAHMRRLEEEVFRLAGRSFRLNSRDQLERVLFDELGLPPIGKTEKTGKRSTSAAVLEALREVHPIVDKILQYRELAKLKGTYIDPLPALVHPKTGRLHTRFNQTATATGRLSSSDPNLQNIPVRTPLGQKIRRAFVAEEGWRLVALDYSQIELRVLAHLSGDENLIRVFQEGKDIHTQTASWMFGLSAEAIDPLMRRAAKTINFGVLYGMSAFRLSQELGIPYEEAQAFIQKYFQSYPKVKAWIEKTLREGRTRGYVETLFGRRRYVPDLNARVKSVREAAERMAFNMPVQGTAADLMKLAMVRLFPQLREVGARMLLQVHDELLLEAPKERAEEVAALAKEVMEGVWPLAVPLEVEVGIGEDWLAAKG

SEQ ID NO: 5389 - DNA, 2523 bp, synthetic construct
  misc_feature 1..2523: note = Variant of DNA polymerase I from Thermus sp. strain 2.9
  source 1..2523: mol_type = other DNA
atgcaccatcatcatcatcatggcggtagcggcgtgttaccggtgttcgagcctaaaggtcgcgtgcttctggttgatggccatcatctcgcgtatcgtaacttctttgccctgaaaggattaaccaccagcctgggcgagccggtacagggtgtctacggctttgcaaagtcgctcctgaaagctctgaaagaagacggtgatgtggtgattgttgtctttgatgcgaaagcgccaagttttcgccacgaagcgtacgaagcttacaaagccgggcgtgctccaacgccggaagactttcctcgccaattggcgcttatgaaggaattagtggatttgcttggcctcgaacgcttggaagttcccggtttcgaggcagacgacgtattagcgactctcgcaaagaaagccgaacgtgagggctatgaagtccagatcttgacagcagatcgcgatcttttccagcttttatctccgcgcatctcggtgttacacccggaagggcatcgtatcaccccggaatggctctgggagaaatatggtttgcgtcccgaacaatgggtggattttcgcgccttagcaggcgatccgagcgacaatattccgggagttaaaggtatcggcgagaagacggcgctcaagctccttaaagaatgggggtcgttggagaacttgcttaagaatttagatcaggtcaaaccagagtcagtgcgtgagaagattcttgctcacctcgaagacctcaaattaagccgcgaattgtcccgtgtacgcaccgatttgccgctcgaagttgatttcggtcgccgccgcgaacctgactgggagggtcttaaagcgtttttagagcgtcttgaatttggttcgctcttgcatgaattcggccttttagaaagcccgttactggccgaagaagcaccttggccaccgcccgagggcgcgtttttaggttaccgtttgagtcgcccggaaccgatgtgggccgaattactggctcttgcagcgtctgcccagggacgtgtgtatcgcgcggaagaccctcatggtgcgctccgcggcctcttcgaagtccgtggactccttgccaaagacttagctgttgttgcattgcgcgaaggtcttgatttacctccgactgatgatccaatgcttcttgcgtacctcttggacccgtcaaacacgacgcccgaaggcgtagcccgtcgttacggcggcgagtggaccgaagatgcagcgaaacgcgcgttattggccgaacgtttgcacgaaaatttattaggacgtttgcaaggcgaggaacgtctcctctggctttacgaagaagtggagaaaccattgagtcgcgtgctcgcgcatatggaagctaccggtgtcaaattagacgtggcgtatttggagaatctcagccttgaagttgctgcccacatgcgccgcttggaggaagaagtattccgtttagcaggccgttcctttcgccttaactctcgcgatcagttagaacgtgtgttgttcgatgaacttggtctccctcctatcggcaagacagagaagaccggtaaacgtagcacttcagcggcggttttagaagctcttcgcgaagtccatcccattgtggacaagatcttgcagtaccgcgaaatggcgaaattgaaaggcacctatattgaccgtcttccggcattagtccacccgaaaacgggacgcctccatacccgcttcaaccaaacagccacggcgaccggtcgtttgtcctcctctgatccaaaccttcagaatattccagtacgtaccccattgggccagaagatccgccgtgcgtttgtagctgaggagggttggcgtttagtggccctcgattatcgtcaaattgaattacgtgtccttgcccatctttctggcgatgagaacctcatccgcgtgtttcaggaaggcaaagacattcacactcaaacggcaagctggatgtttggattatcagctgaagcgatcgatcctttgatgcgtcgtgcagcgaagaccatcaatttcggtgttctctacggtatgagtgcctttcgtttgtcgcaggaacagggcattccctatgaagaagctcaggcgttcattcagaaatactttcaaagctatcccaaagttaaagcatggatcgagaagactctccgtgaaggccgcacacgtggttacgtagagaccttatttggacgtcgccgctatgttcccgatttaaacgctcgcgtgaaaggcaagcgtgaagccgccgaacgcatggcgttcaacatgcctgtacagggcacggcagctgacctcatgaaacttgcaatggtgcgcctttttccacaattgcgtgaagttggtgcccgcatgctcttgcaggtccacgatgaactcttgttagaagcgccaaaagagcgtgcggaagaggtggcagccctcgcgaaagaagttatggaaggcgtgtggcccttagcggtgcctcttgaagtcgaagttggtattggcgaggattggctggctgccaaagga

SEQ ID NO: 5390 - protein, 841 aa, synthetic construct
  REGION 1..841: note = Variant of DNA polymerase I from Thermus sp. strain 2.9
MHHHHHHGGSGVLPVFEPKGRVLLVDGHHLAYRNFFALKGLTTSLGEPVQGVYGFAKSLLKALKEDGDVVIVVFDAKAPSFRHEAYEAYKAGRAPTPEDFPRQLALMKELVDLLGLERLEVPGFEADDVLATLAKKAEREGYEVQILTADRDLFQLLSPRISVLHPEGHRITPEWLWEKYGLRPEQWVDFRALAGDPSDNIPGVKGIGEKTALKLLKEWGSLENLLKNLDQVKPESVREKILAHLEDLKLSRELSRVRTDLPLEVDFGRRREPDWEGLKAFLERLEFGSLLHEFGLLESPLLAEEAPWPPPEGAFLGYRLSRPEPMWAELLALAASAQGRVYRAEDPHGALRGLFEVRGLLAKDLAVVALREGLDLPPTDDPMLLAYLLDPSNTTPEGVARRYGGEWTEDAAKRALLAERLHENLLGRLQGEERLLWLYEEVEKPLSRVLAHMEATGVKLDVAYLENLSLEVAAHMRRLEEEVFRLAGRSFRLNSRDQLERVLFDELGLPPIGKTEKTGKRSTSAAVLEALREVHPIVDKILQYREMAKLKGTYIDRLPALVHPKTGRLHTRFNQTATATGRLSSSDPNLQNIPVRTPLGQKIRRAFVAEEGWRLVALDYRQIELRVLAHLSGDENLIRVFQEGKDIHTQTASWMFGLSAEAIDPLMRRAAKTINFGVLYGMSAFRLSQEQGIPYEEAQAFIQKYFQSYPKVKAWIEKTLREGRTRGYVETLFGRRRYVPDLNARVKGKREAAERMAFNMPVQGTAADLMKLAMVRLFPQLREVGARMLLQVHDELLLEAPKERAEEVAALAKEVMEGVWPLAVPLEVEVGIGEDWLAAKG

SEQ ID NO: 5391 - DNA, 2523 bp, synthetic construct
  misc_feature 1..2523: note = Variant of DNA polymerase I from Thermus sp. strain 2.9
  source 1..2523: mol_type = other DNA
atgcaccatcatcatcatcatggcggtagcggcgtgttaccggtgttcgagcctaaaggtcgcgtgcttctggttgatggccatcatctcgcgtatcgtaacttctttgccctgaaaggattaaccaccagcctgggcgagccggtacagggtgtctacggctttgcaaagtcgctcctgaaagctctgaaagaagacggtgatgtggtgattgttgtctttgatgcgaaagcgccaagttttcgccacgaagcgtacgaagcttacaaagccgggcgtgctccaacgccggaagactttcctcgccaattggcgcttatgaaggaattagtggatttgcttggcctcgaacgcttggaagttcccggtttcgaggcagacgacgtattagcgactctcgcaaagaaagccgaacgtgagggctatgaagtccagatcttgacagcagatcgcgatcttttccagcttttatctccgcgcatctcggtgttacacccggaagggcatcgtatcaccccggaatggctctgggagaaatatggtttgcgtcccgaacaatgggtggattttcgcgccttagcaggcgatccgagcgacaatattccgggagttaaaggtatcggcgagaagacggcgctcaagctccttaaagaatgggggtcgttggagaacttgcttaagaatttagatcaggtcaaaccagagtcagtgcgtgagaagattcttgctcacctcgaagacctcaaattaagccgcgaattgtcccgtgtacgcaccgatttgccgctcgaagttgatttcggtcgccgccgcgaacctgactgggagggtcttaaagcgtttttagagcgtcttgaatttggttcgctcttgcatgaattcggccttttagaaagcccgttactggccgaagaagcaccttggccaccgcccgagggcgcgtttttaggttaccgtttgagtgatccggaaccgatgtgggccgaattactggctcttgcagcgtctgcccagggacgtgtgtatcgcgcggaagaccctcatggtgcgctccgcggcctcttcgaagtccgtggactccttgccaaagacttagctgttgttgcattgcgcgaaggtcttgatttacctccgactgatgatccaatgcttcttgcgtacctcttggacccgtcaaacacgacgcccgaaggcgtagcccgtcgttacggcggcgagtggaccgaagatgcagcgaaacgcgcgttattggccgaacgtttgcacgaaaatttattaggacgtttgcaaggcgaggaacgtctcctctggctttacgaagaagtggagaaaccattgagtcgcgtgctcgcgcatatggaagctaccggtgtcaaattagacgtggcgtatttggagaatctcagccttgaagttgctgcccacatgcgccgcttggaggaagaagtattccgtttagcaggccgttcctttcgccttaactctcgcgatcagttagaacgtgtgttgttcgatgaacttggtctccctcctatcggcaagacagagaagaccggtaaacgtagcacttcagcggcggttttagaagctcttcgcgaagtccatcccattgtggacaagatcttgcagtaccgcgaaatggcgaaattgaaaggcacctatattgaccgtcttccggcattagtccacccgaaaacgggacgcctccatacccgcttcaaccaaacagccacggcgaccggtcgtttgtcctcctctgatccaaaccttcagaatattccagtacgtaccccattgggccagaagatccgccgtgcgtttgtagctgaggagggttggcgtttagtggccctcgattatcgtcaaattgaattacgtgtccttgcccatctttctggcgatgagaacctcatccgcgtgtttcaggaaggcaaagacattcacactcaaacggcaagctggatgtttggattatcagctgaagcgatcgatcctttgatgcgtcgtgcagcgaagaccatcaatttcggtgttctctacggtatgagtgcctttcgtttgtcgcaggaattaggcattccctatgaagaagctcaggcgttcattcagaaatactttcaaagctatcccaaagttaaagcatggatcgagaagactctccgtgaaggccgcacacgtggttacgtagagaccttatttggacgtcgccgctatgttcccgatttaaacgctcgcgtgaaaggcaagcgtgaagccgccgaacgcatggcgttcaacatgcctgtacagggcacggcagctgacctcatgaaacttgcaatggtgcgcctttttccacaattgcgtgaagttggtgcccgcatgctcttgcaggtccacgatgaactcttgttagaagcgccaaaagagcgtgcggaagaggtggcagccctcgcgaaagaagttatggaaggcgtgtggcccttagcggtgcctcttgaagtcgaagttggtattggcgaggattggctggctgccaaagga

SEQ ID NO: 5392 - protein, 841 aa, synthetic construct
  REGION 1..841: note = Variant of DNA polymerase I from Thermus sp. strain 2.9
MHHHHHHGGSGVLPVFEPKGRVLLVDGHHLAYRNFFALKGLTTSLGEPVQGVYGFAKSLLKALKEDGDVVIVVFDAKAPSFRHEAYEAYKAGRAPTPEDFPRQLALMKELVDLLGLERLEVPGFEADDVLATLAKKAEREGYEVQILTADRDLFQLLSPRISVLHPEGHRITPEWLWEKYGLRPEQWVDFRALAGDPSDNIPGVKGIGEKTALKLLKEWGSLENLLKNLDQVKPESVREKILAHLEDLKLSRELSRVRTDLPLEVDFGRRREPDWEGLKAFLERLEFGSLLHEFGLLESPLLAEEAPWPPPEGAFLGYRLSDPEPMWAELLALAASAQGRVYRAEDPHGALRGLFEVRGLLAKDLAVVALREGLDLPPTDDPMLLAYLLDPSNTTPEGVARRYGGEWTEDAAKRALLAERLHENLLGRLQGEERLLWLYEEVEKPLSRVLAHMEATGVKLDVAYLENLSLEVAAHMRRLEEEVFRLAGRSFRLNSRDQLERVLFDELGLPPIGKTEKTGKRSTSAAVLEALREVHPIVDKILQYREMAKLKGTYIDRLPALVHPKTGRLHTRFNQTATATGRLSSSDPNLQNIPVRTPLGQKIRRAFVAEEGWRLVALDYRQIELRVLAHLSGDENLIRVFQEGKDIHTQTASWMFGLSAEAIDPLMRRAAKTINFGVLYGMSAFRLSQELGIPYEEAQAFIQKYFQSYPKVKAWIEKTLREGRTRGYVETLFGRRRYVPDLNARVKGKREAAERMAFNMPVQGTAADLMKLAMVRLFPQLREVGARMLLQVHDELLLEAPKERAEEVAALAKEVMEGVWPLAVPLEVEVGIGEDWLAAKG

SEQ ID NO: 5393 - DNA, 2523 bp, synthetic construct
  misc_feature 1..2523: note = Variant of DNA polymerase I from Thermus sp. strain 2.9
  source 1..2523: mol_type = other DNA
atgcaccatcatcatcatcatggcggtagcggcgtgttaccggtgttcgagcctaaaggtcgcgtgcttctggttgatggccatcatctcgcgtatcgtaacttctttgccctgaaaggattaaccaccagcctgggcgagccggtacagggtgtctacggctttgcaaagtcgctcctgaaagctctgaaagaagacggtgatgtggtgattgttgtctttgatgcgaaagcgccaagttttcgccacgaagcgtacgaagcttacaaagccgggcgtgctccaacgccggaagactttcctcgccaattggcgcttatgaaggaattagtggatttgcttggcctcgaacgcttggaagttcccggtttcgaggcagacgacgtattagcgactctcgcaaagaaagccgaacgtgagggctatgaagtccagatcttgacagcagatcgcgatcttttccagcttttatctccgcgcatctcggtgttacacccggaagggcatcgtatcaccccggaatggctctgggagaaatatggtttgcgtcccgaacaatgggtggattttcgcgccttagcaggcgatccgagcgacaatattccgggagttaaaggtatcggcgagaagacggcgctcaagctccttaaagaatgggggtcgttggagaacttgcttaagaatttagatcaggtcaaaccagagtcagtgcgtgagaagattcttgctcacctcgaagacctcaaattaagccgcgaattgtcccgtgtacgcaccgatttgccgctcgaagttgatttcggccgccgccgcgaacctgactgggagggtcttaaagcgtttttagagcgtcttgaatttggttcgctcttgcatgaattcggccttttagaaagcccgttaccggccgaagaagcaccttggccaccgcccgagggcgcgtttttaggttaccgtttgagtcgcccggaaccgatgtgggccgaattactggctcttgcagcgtctgcccagggacgtgtgtatcgcgcggaagaccctcatggtgcgctccgcggcctcttcgaagtccgtggactccttgccaaagacttagctgttgttgcattgcgcgaaggtcttgatttacctccgactgatgatccaatgcttcttgcgtacctcttggacccgtcaaacacgacgcccgaaggcgtagcccgtcgttacggcggcgagtggaccgaagatgcagcgaaacgcgcgttattggccgaacgtttgcacgcaaatttattaggacgtttgcaaggcgaggaacgtctcctctggctttacgaagaagtggagaaaccattgagtcgcgtgctcgcgcatatggaagctaccggtgtcaaattagacgtggcgtatttggagaatcttagccttgaagttgctgcccacatgcgccgcttggaggaagaagtattccgtttagcaggccgctcctttcgccttaactctcgcgatcagttagaacgtgtgttgttcgatgaacttggtctccctcctatcggcaagacagagaagaccggtaaacgtagcacttcagcggcggttttagaagctcttcgcgaagtccatcccattgtggacaagatcttgcagtaccgcgaaatggcgaaattgaaaggcacctatattgaccctcttccggcattagtccacccgaaaacgggacgcctccatacccgcttcaaccaaacagccacggcgaccggtcgtttgtccagttctgatccaaaccttcagaatattccagtacgtaccccattgggccagaagatccgccgtgcgtttgtagctgaggagggttggcgtttagtggccctcgattatcgtcaaattgaattacgtgtccttgcccatctttctggcgatgagaacctcatccgcgtgtttcaggaaggcaaagacattcacactcaaacggcaagctggatgtttggattatcagctgaagcgatcgatcctttgatgcgtcgtgcagcgaagaccatcaatttcggtgttctctacggtatgagtgcctttcgtttgtcgcaggaattaggcattccctatgaagaagctcaggcgttcattcagaaatactttcaaagctatcccaaagttaaagcatggatcgagaagactctccgcgaaggccgcacacgtggttacgtagagaccttatttggacgtcgccgctatgttcccgatttaaacgctcgcgtgaaaggcaagcgtgaagccgccgaacgcatggcgttcaacatgcctgtacagggcacggcagctgacctcatgaaacttgcaatggtgcgcctttttccacaattgcgtgaagttggtgcccgcatgctcttgcaggtccacgatgaactcttgttagaagcgccaaaagagcgtgcggaagaggtggcagccctcgcgaaagaagttatggaaggcgtgtggcccttagcggtgcctcttgaagtcgaagttggtattggcgaggattggctggctgccaaagga

SEQ ID NO: 5394 - protein, 841 aa, synthetic construct
  REGION 1..841: note = Variant of DNA polymerase I from Thermus sp. strain 2.9
MHHHHHHGGSGVLPVFEPKGRVLLVDGHHLAYRNFFALKGLTTSLGEPVQGVYGFAKSLLKALKEDGDVVIVVFDAKAPSFRHEAYEAYKAGRAPTPEDFPRQLALMKELVDLLGLERLEVPGFEADDVLATLAKKAEREGYEVQILTADRDLFQLLSPRISVLHPEGHRITPEWLWEKYGLRPEQWVDFRALAGDPSDNIPGVKGIGEKTALKLLKEWGSLENLLKNLDQVKPESVREKILAHLEDLKLSRELSRVRTDLPLEVDFGRRREPDWEGLKAFLERLEFGSLLHEFGLLESPLPAEEAPWPPPEGAFLGYRLSRPEPMWAELLALAASAQGRVYRAEDPHGALRGLFEVRGLLAKDLAVVALREGLDLPPTDDPMLLAYLLDPSNTTPEGVARRYGGEWTEDAAKRALLAERLHANLLGRLQGEERLLWLYEEVEKPLSRVLAHMEATGVKLDVAYLENLSLEVAAHMRRLEEEVFRLAGRSFRLNSRDQLERVLFDELGLPPIGKTEKTGKRSTSAAVLEALREVHPIVDKILQYREMAKLKGTYIDPLPALVHPKTGRLHTRFNQTATATGRLSSSDPNLQNIPVRTPLGQKIRRAFVAEEGWRLVALDYRQIELRVLAHLSGDENLIRVFQEGKDIHTQTASWMFGLSAEAIDPLMRRAAKTINFGVLYGMSAFRLSQELGIPYEEAQAFIQKYFQSYPKVKAWIEKTLREGRTRGYVETLFGRRRYVPDLNARVKGKREAAERMAFNMPVQGTAADLMKLAMVRLFPQLREVGARMLLQVHDELLLEAPKERAEEVAALAKEVMEGVWPLAVPLEVEVGIGEDWLAAKG

SEQ ID NO: 5395 - DNA, 2523 bp, synthetic construct
  misc_feature 1..2523: note = Variant of DNA polymerase I from Thermus sp. strain 2.9
  source 1..2523: mol_type = other DNA
atgcaccatcatcatcatcatggcggtagcggcgtgttaccggtgttcgagcctaaaggtcgcgtgcttctggttgatggccatcatctcgcgtatcgtaacttctttgccctgaaaggattaaccaccagcctgggcgagccggtacagggtgtctacggctttgcaaagtcgctcctgaaagctctgaaagaagacggtgatgtggtgattgttgtctttgatgcgaaagcgccaagttttcgccacgaagcgtacgaagcttacaaagccgggcgtgctccaacgccggaagactttcctcgccaattggcgcttatgaaggaattagtggatttgcttggcctcgaacgcttggaagttcccggtttcgaggcagacgacgtattagcgactctcgcaaagaaagccgaacgtgagggctatgaagtccagatcttgacagcagatcgcgatcttttccagcttttatctccgcgcatctcggtgttacacccggaagggcatcgtatcaccccggaatggctctgggagaaatatggtttgcgtcccgaacaatgggtggattttcgcgccttagcaggcgatccgagcgacaatattccgggagttaaaggtatcggcgagaagacggcgctcaagctccttaaagaatgggggtcgttggagaacttgcttaagaatttagatcaggtcaaaccagagtcagtgcgtgagaagattcttgctcacctcgaagacctcaaattaagccgcgaattgtcccgtgtacgcaccgatttgccgctcgaagttgatttcggtcgccgccgcgaacctgactgggagggtcttaaagcgtttttagagcgtcttgaatttggttcgctcttgcatgaattcggccttttagaaagcccgttactggccgaagaagcaccttggccaccgcccgagggcgcgtttttaggttaccgtttgagtcgcccggaaccgatgtgggccgaattactggctcttgcagcgtctgcccagggacgtgtgtatcgcgcggaagaccctcatggtgcgctccgcggcctcttcgaagtccgtggactccttgccaaagacttagctgttgttgcattgcgcgaaggtcttgatttacctccgactgatgatccaatgcttcttgcgtacctcttggacccgtcaaacacgacgcccgaaggcgtagcccgtcgttacggcggcgagtggaccgaagatgcagcgaaacgcgcgttattggccgaacgtttgcacgaaaatttattaggacgtttgcaaggcgaggaacgtctcctctggctttacgaagaagtggagaaaccattgagtcgcgtgctcgcgcatatggaagctaccggtgtcaaattagacgtggcgtatttggagaatctcagccttgaagttgctgcccacatgcgccgcttggaggaagaagtattccgtttagcaggccgttcctttcgccttaactctcgcgatcagttagaacgtgtgttgttcgatgaacttggtctccctgttatcggcaagacagagaagaccggtaaacgtagcacttcagcggcggttttagaagctcttcgcgaagtccatcccattgtggacaagatcttgcagtaccgcgaaatggcgaaattgaaaggcacctatattgaccgtcttccggcattagtccacccgaaaacgggacgcctccatacccgcttcaaccaaacagccacggcgaccggtcgtttgtcctcctctgatccaaaccttcagaatattccagtacgtaccccattgggccagaagatccgccgtgcgtttgtagctgaggagggttggcgtttagtggccctcgattatcgtcaaattgaattacgtgtccttgcccatctttctggcgatgagaacctcatccgcgtgtttcaggaaggcaaagacattcacactcaaacggcaagctggatgtttggattatcagctgaagcgatcgatcctttgatgcgtcgtgcagcgaagaccatcaatttcggtgttctctacggtatgagtgcctttcgtttgtcgcaggaattaggcattccctatgaagaagctcaggcgttcattcagaaatactttcaaagctatcccaaagttaaagcatggatcgagaagactctccgtgaaggccgcacacgtggttacgtagagaccttatttggacgtcgccgctatgttcccgatttaaacgctcgcgtgaaaggcaagcgtgaagccgccgaacgcatggcgttcaacatgcctgtacagggcacggcagctgacctcatgaaacttgcaatggtgcgcctttttccacaattgcgtgaagttggtgcccgcatgctcttgcaggtccacgatgaactcttgttagaagcgccaaaagagcgtgcggaagaggtggcagccctcgcgaaagaagttatggaaggcgtgtggcccttagcggtgcctcttgaagtcgaagttggtattggcgaggattggctggctgccaaagga

SEQ ID NO: 5396 - protein, 841 aa, synthetic construct
  REGION 1..841: note = Variant of DNA polymerase I from Thermus sp. strain 2.9
MHHHHHHGGSGVLPVFEPKGRVLLVDGHHLAYRNFFALKGLTTSLGEPVQGVYGFAKSLLKALKEDGDVVIVVFDAKAPSFRHEAYEAYKAGRAPTPEDFPRQLALMKELVDLLGLERLEVPGFEADDVLATLAKKAEREGYEVQILTADRDLFQLLSPRISVLHPEGHRITPEWLWEKYGLRPEQWVDFRALAGDPSDNIPGVKGIGEKTALKLLKEWGSLENLLKNLDQVKPESVREKILAHLEDLKLSRELSRVRTDLPLEVDFGRRREPDWEGLKAFLERLEFGSLLHEFGLLESPLLAEEAPWPPPEGAFLGYRLSRPEPMWAELLALAASAQGRVYRAEDPHGALRGLFEVRGLLAKDLAVVALREGLDLPPTDDPMLLAYLLDPSNTTPEGVARRYGGEWTEDAAKRALLAERLHENLLGRLQGEERLLWLYEEVEKPLSRVLAHMEATGVKLDVAYLENLSLEVAAHMRRLEEEVFRLAGRSFRLNSRDQLERVLFDELGLPVIGKTEKTGKRSTSAAVLEALREVHPIVDKILQYREMAKLKGTYIDRLPALVHPKTGRLHTRFNQTATATGRLSSSDPNLQNIPVRTPLGQKIRRAFVAEEGWRLVALDYRQIELRVLAHLSGDENLIRVFQEGKDIHTQTASWMFGLSAEAIDPLMRRAAKTINFGVLYGMSAFRLSQELGIPYEEAQAFIQKYFQSYPKVKAWIEKTLREGRTRGYVETLFGRRRYVPDLNARVKGKREAAERMAFNMPVQGTAADLMKLAMVRLFPQLREVGARMLLQVHDELLLEAPKERAEEVAALAKEVMEGVWPLAVPLEVEVGIGEDWLAAKG

SEQ ID NO: 5397 - DNA, 2523 bp, synthetic construct
  misc_feature 1..2523: note = Variant of DNA polymerase I from Thermus sp. strain 2.9
  source 1..2523: mol_type = other DNA
atgcaccatcatcatcatcatggcggtagcggcgtgttaccggtgttcgagcctaaaggtcgcgtgcttctggttgatggccatcatctcgcgtatcgtaacttctttgccctgaaaggattaaccaccagcctgggcgagccggtacagggtgtctacggctttgcaaagtcgctcctgaaagctctgaaagaagacggtgatgtggtgattgttgtctttgatgcgaaagcgccaagttttcgccacgaagcgtacgaagcttacaaagccgggcgtgctccaacgccggaagactttcctcgccaattggcgcttatgaaggaattagtggatttgcttggcctcgaacgcttggaagttcccggtttcgaggcagacgacgtattagcgactctcgcaaagaaagccgaacgtgagggctatgaagtccagatcttgacagcagatcgcgatcttttccagcttttatctccgcgcatctcggtgttacacccggaagggcatcgtatcaccccggaatggctctgggagaaatatggtttgcgtcccgaacaatgggtggattttcgcgccttagcaggcgatccgagcgacaatattccgggagttaaaggtatcggcgagaagacggcgctcaagctccttaaagaatgggggtcgttggagaacttgcttaagaatttagatcaggtcaaaccagagtcagtgcgtgagaagattcttgctcacctcgaagacctcaaattaagccgcgaattgtcccgtgtacgcaccgatttgccgctcgaagttgatttcggtcgccgccgcgaacctgactgggagggtcttaaagcgtttttagagcgtcttgaatttggttcgctcttgcatgaattcggccttttagaaagcccgttactggccgaagaagcaccttggccaccgcccgagggcgcgtttttaggttaccgtttgagtcgcccggaaccgatgtgggccgaattactggctcttgcagcgtctgcccagggacgtgtgtatcgcgcggaagaccctcatggtgcgctccgcggcctcttcgaagtccgtggactccttgccaaagacttagctgttgttgcattgcgcgaaggtcttgatttacctccgactgatgatccaatgcttcttgcgtacctcttggacccgtcaaacacgacgcccgaaggcgtagcccgtcgttacggcggcgagtggaccgaagatgcagcgaaacgcgcgttattggccgaacgtttgcacgaaaatttattaggacgtttgcaaggcgaggaacgtctcctctggctttacgaagaagtggagaaaccattgagtcgcgtgctcgcgcatatggaagctaccggtgtcaaattagacgtggcgtatttggagaatctcagccttgaagttgctgcccacatgcgccgcttggaggaagaagtattccgtttagcaggccgttcctttcgccttaactctcgcgatcagttagaacgtgtgttgttcgatgaacttggtctccctcctatcggcaagacagagaagaccggtaaacgtagcacttcagcggcggttttagaagctcttcgcgaagtccatcccattgtggacaagatcttgcagtaccgcgaaatggcgaaattgaaaggcacctatattgaccgtcttccggcattagtccacccgaaaacgggacgcctccatacccgcttcaaccaaacagccacggcgaccggtcgtttgtcctcctctgatccaaaccttcagaatattccagtacgtaccccattgggccagaagatccgccgtgcgtttgtagctgaggagggttggcgtttagtggccctcgattatcgtcaaattgaattacgtgtccttgcccatctttctggcgatgagaacctcatccgcgtgtttcaggaaggcaaagacattcacactcaaacggcaagctggatgtttggattatcagctgaagcgatcgatcctttgatgcgtcgtgcagcgaagaccatcaatttcggtgttctctacggtatgagtgcctttcgtttgtcgcaggaattaggcattccctatgaagaagctcaggcgttcattcagaaatactttcaaagctatcccaaagttaaagcatggatcgagaagactctccgtgaaggccgcacacgtggttacgtagagaccttatttggacgtcgccgctatgttcccgatttaaaccctcgcgtgaaaggcaagcgtgaagccgccgaacgcatggcgttcaacatgcctgtacagggcacggcagctgacctcatgaaacttgcaatggtgcgcctttttccacaattgcgtgaagttggtgcccgcatgctcttgcaggtccacgatgaactcttgttagaagcgccaaaagagcgtgcggaagaggtggcagccctcgcgaaagaagttatggaaggcgtgtggcccttagcggtgcctcttgaagtcgaagttggtattggcgaggattggctggctgccaaagga

SEQ ID NO: 5398 - protein, 841 aa, synthetic construct
  REGION 1..841: note = Variant of DNA polymerase I from Thermus sp. strain 2.9
MHHHHHHGGSGVLPVFEPKGRVLLVDGHHLAYRNFFALKGLTTSLGEPVQGVYGFAKSLLKALKEDGDVVIVVFDAKAPSFRHEAYEAYKAGRAPTPEDFPRQLALMKELVDLLGLERLEVPGFEADDVLATLAKKAEREGYEVQILTADRDLFQLLSPRISVLHPEGHRITPEWLWEKYGLRPEQWVDFRALAGDPSDNIPGVKGIGEKTALKLLKEWGSLENLLKNLDQVKPESVREKILAHLEDLKLSRELSRVRTDLPLEVDFGRRREPDWEGLKAFLERLEFGSLLHEFGLLESPLLAEEAPWPPPEGAFLGYRLSRPEPMWAELLALAASAQGRVYRAEDPHGALRGLFEVRGLLAKDLAVVALREGLDLPPTDDPMLLAYLLDPSNTTPEGVARRYGGEWTEDAAKRALLAERLHENLLGRLQGEERLLWLYEEVEKPLSRVLAHMEATGVKLDVAYLENLSLEVAAHMRRLEEEVFRLAGRSFRLNSRDQLERVLFDELGLPPIGKTEKTGKRSTSAAVLEALREVHPIVDKILQYREMAKLKGTYIDRLPALVHPKTGRLHTRFNQTATATGRLSSSDPNLQNIPVRTPLGQKIRRAFVAEEGWRLVALDYRQIELRVLAHLSGDENLIRVFQEGKDIHTQTASWMFGLSAEAIDPLMRRAAKTINFGVLYGMSAFRLSQELGIPYEEAQAFIQKYFQSYPKVKAWIEKTLREGRTRGYVETLFGRRRYVPDLNPRVKGKREAAERMAFNMPVQGTAADLMKLAMVRLFPQLREVGARMLLQVHDELLLEAPKERAEEVAALAKEVMEGVWPLAVPLEVEVGIGEDWLAAKG

SEQ ID NO: 5399 - DNA, 2523 bp, synthetic construct
  misc_feature 1..2523: note = Variant of DNA polymerase I from Thermus sp. strain 2.9
  source 1..2523: mol_type = other DNA
atgcaccatcatcatcatcatggcggtagcggcgtgttaccggtgttcgagcctaaaggtcgcgtgcttctggttgatggccatcatctcgcgtatcgtaacttctttgccctgaaaggattaaccaccagcctgggcgagccggtacagggtgtctacggctttgcaaagtcgctcctgaaagctctgaaagaagacggtgatgtggtgattgttgtctttgatgcgaaagcgccaagttttcgccacgaagcgtacgaagcttacaaagccgggcgtgctccaacgccggaagactttcctcgccaattggcgcttatgaaggaattagtggatttgcttggcctcgaacgcttggaagttcccggtttcgaggcagacgacgtattagcgactctcgcaaagaaagccgaacgtgagggctatgaagtccagatcttgacagcagatcgcgatcttttccagcttttatctccgcgcatctcggtgttacacccggaagggcatcgtatcaccccggaatggctctgggagaaatatggtttgcgtcccgaacaatgggtggattttcgcgccttagcaggcgatccgagcgacaatattccgggagttaaaggtatcggcgagaagacggcgctcaagctccttaaagaatgggggtcgttggagaacttgcttaagaatttagatcaggtcaaaccagagtcagtgcgtgagaagattcttgctcacctcgaagacctcaaattaagccgcgaattgtcccgtgtacgcaccgatttgccgctcgaagttgatttcggccgccgccgcgaacctgactgggagggtcttaaagcgtttttagagcgtcttgaatttggttcgctcttgcatgaattcggccttttagaaagcccgttactggccgaagaagcaccttggccaccgcccgagggcgcgtttttaggttaccgtttgagtcgcccggaaccgatgtgggccgaattactggctcttgcagcgtctgcccagggacgtgtgtatcgcgcggaagaccctcatggtgcgctccgcggcctcttcgaagtccgtggactccttgccaaagacttagctgttgttgcattgcgcgaaggtcttgatttacctccgactgatgatccaatgcttcttgcgtacctcttggacccgtcaaacacgacgcccgaaggcgtagcccgtcgttacggcggcgagtggaccgaagatgcagcgaaacgcgcgttattggccgaacgtttgcacgcaaatttattaggacgtttgcaaggcgaggaacgtctcctctggctttacgaagaagtggagaaaccattgagtcgcgtgctcgcgcatatggaagctaccggtgtcaaattagacgtggcgtatttggagaatcttcaccttgaagttgctgccgaaatgcgccgcttggaggaagaagtattccgtttagcaggccactcctttcgccttaactctcgcgatcagttagaacgtgtgttgttcgatgaacttggtctccctcctatcggcaagacagagaagaccggtaaacgtagcacttcagcggcggttttagaagctcttcgcgaagtccatcccattgtggacaagatcttgcagtaccgcgaaatggcgaaattgaaaggcacctatattgaccgtcttccggcattagtccacccgaaaacgggacgcctccatacccgcttcaaccaaacagccacggcgaccggtcgtttgtccagttctgatccaaaccttcagaatattccagtacgtaccccattgggccagaagatccgccgtgcgtttgtagctgaggagggttggcgtttagtggccctcgattatcgtcaaattgaattacgtgtccttgcccatctttctggcgatgagaacctcatccgcgtgtttcaggaaggcaaagacattcacactcaaacggcaagctggatgtttggattatcagctgaagcgatcgatcctttgatgcgtcgtgcagcgaagaccatcaatttcggtgttctctacggtatgagtgcctttcgtttgtcgcaggaattaggcattccctatgaagaagctcaggcgttcattcagaaatactttcaaagctatcccaaagttaaagcatggatcgagaagactctcgaggaaggccgcacacgtggttacgtagagaccttatttggacgtcgccgctatgttcccgatttaaacgctcgcgtgaaaagcgtacgtgaagccgccgaacgcatggcgttcaacatgcctgtacagggcacggcagctgacctcatgaaacttgcaatggtgcgcctttttccacaattgcgtgaagttggtgcccgcatgctcttgcaggtccacgatgaactcttgttagaagcgccaaaagagcgtgcggaagaggtggcagccctcgcgaaagaagttatggaaggcgtgtggcccttagcggtgcctcttgaagtcgaagttggtattggcgaggattggctggctgccaaagga

SEQ ID NO: 5400 - protein, 841 aa, synthetic construct
  REGION 1..841: note = Variant of DNA polymerase I from Thermus sp. strain 2.9
MHHHHHHGGSGVLPVFEPKGRVLLVDGHHLAYRNFFALKGLTTSLGEPVQGVYGFAKSLLKALKEDGDVVIVVFDAKAPSFRHEAYEAYKAGRAPTPEDFPRQLALMKELVDLLGLERLEVPGFEADDVLATLAKKAEREGYEVQILTADRDLFQLLSPRISVLHPEGHRITPEWLWEKYGLRPEQWVDFRALAGDPSDNIPGVKGIGEKTALKLLKEWGSLENLLKNLDQVKPESVREKILAHLEDLKLSRELSRVRTDLPLEVDFGRRREPDWEGLKAFLERLEFGSLLHEFGLLESPLLAEEAPWPPPEGAFLGYRLSRPEPMWAELLALAASAQGRVYRAEDPHGALRGLFEVRGLLAKDLAVVALREGLDLPPTDDPMLLAYLLDPSNTTPEGVARRYGGEWTEDAAKRALLAERLHANLLGRLQGEERLLWLYEEVEKPLSRVLAHMEATGVKLDVAYLENLHLEVAAEMRRLEEEVFRLAGHSFRLNSRDQLERVLFDELGLPPIGKTEKTGKRSTSAAVLEALREVHPIVDKILQYREMAKLKGTYIDRLPALVHPKTGRLHTRFNQTATATGRLSSSDPNLQNIPVRTPLGQKIRRAFVAEEGWRLVALDYRQIELRVLAHLSGDENLIRVFQEGKDIHTQTASWMFGLSAEAIDPLMRRAAKTINFGVLYGMSAFRLSQELGIPYEEAQAFIQKYFQSYPKVKAWIEKTLEEGRTRGYVETLFGRRRYVPDLNARVKSVREAAERMAFNMPVQGTAADLMKLAMVRLFPQLREVGARMLLQVHDELLLEAPKERAEEVAALAKEVMEGVWPLAVPLEVEVGIGEDWLAAKG

SEQ ID NO: 5401 - DNA, 2523 bp, synthetic construct
  misc_feature 1..2523: note = Variant of DNA polymerase I from Thermus sp. strain 2.9
  source 1..2523: mol_type = other DNA
atgcaccatcatcatcatcatggcggtagcggcgtgttaccggtgttcgagcctaaaggtcgcgtgcttctggttgatggccatcatctcgcgtatcgtaacttctttgccctgaaaggattaaccaccagcctgggcgagccggtacagggtgtctacggctttgcaaagtcgctcctgaaagctctgaaagaagacggtgatgtggtgattgttgtctttgatgcgaaagcgccaagttttcgccacgaagcgtacgaagcttacaaagccgggcgtgctccaacgccggaagactttcctcgccaattggcgcttatgaaggaattagtggatttgcttggcctcgaacgcttggaagttcccggtttcgaggcagacgacgtattagcgactctcgcaaagaaagccgaacgtgagggctatgaagtccagatcttgacagcagatcgcgatcttttccagcttttatctccgcgcatctcggtgttacacccggaagggcatcgtatcaccccggaatggctctgggagaaatatggtttgcgtcccgaacaatgggtggattttcgcgccttagcaggcgatccgagcgacaatattccgggagttaaaggtatcggcgagaagacggcgctcaagctccttaaagaatgggggtcgttggagaacttgcttaagaatttagatcaggtcaaaccagagtcagtgcgtgagaagattcttgctcacctcgaagacctcaaattaagccgcgaattgtcccgtgtacgcaccgatttgccgctcgaagttgatttcggtcgccgccgcgaacctgactgggagggtcttaaagcgtttttagagcgtcttgaatttggttcgctcttgcatgaattcggccttttagaaagcccgttaccagccgaagaagcaccttggccaccgcccgagggcgcgtttttaggttaccgtttgagtcgcccggaaccgatgtgggccgaattactggctcttgcagcgtctgcccagggacgtgtgtatcgcgcggaagaccctcatggtgcgctccgcggcctcttcgaagtccgtggactccttgccaaagacttagctgttgttgcattgcgcgaaggtcttgatttacctccgactgatgatccaatgcttcttgcgtacctcttggacccgtcaaacacgacgcccgaaggcgtagcccgtcgttacggcggcgagtggaccgaagatgcagcgaaacgcgcgttattggccgaacgtttgcacgaaaatttattaggacgtttgcaaggcgaggaacgtctcctctggctttacgaagaagtggagaaaccattgagtcgcgtgctcgcgcatatggaagctaccggtgtcaaattagacgtggcgtatttggagaatctcagccttgaagttgctgcccacatgcgccgcttggaggaagaagtattccgtttagcaggccgttcctttcgccttaactctcgcgatcagttagaacgtgtgttgttcgatgaacttggtctccctcctatcggcaagacagagaagaccggtaaacgtagcacttcagcggcggttttagaagctcttcgcgaagtccatcccattgtggacaagatcttgcagtaccgcgaaatggcgaaattgaaaggcacctatattgaccgtcttccggcattagtccacccgaaaacgggacgcctccatacccgcttcaaccaaacagccacggcgaccggtcgtttgtcctcctctgatccaaaccttcagaatattccagtacgtaccccattgggccagaagatccgccgtgcgtttgtagctgaggagggttggcgtttagtggccctcgattatcgtcaaattgaattacgtgtccttgcccatctttctggcgatgagaacctcatccgcgtgtttcaggaaggcaaagacattcacactcaaacggcaagctggatgtttggattatcagctgaagcgatcgatcctttgatgcgtcgtgcagcgaagaccatcaatttcggtgttctctacggtatgagtgcctttcgtttgtcgcaggaattaggcattccctatgaagaagctcaggcgttcattcagaaatactttcaaagctatcccaaagttaaagcatggatcgagaagactctccgtgaaggccgcacacgtggttacgtagagaccttatttggacgtcgccgctatgttcccgatttaaacgctcgcgtgaaaggcaagcgtgaagccgccgaacgcatggcgttcaacatgcctgtacagggcacggcagctgacctcatgaaacttgcaatggtgcgcctttttccacaattgcgtgaagttggtgcccgcatgctcttgcaggtccacgatgaactcttgttagaagcgccaaaagagcgtgcggaagaggtggcagccctcgcgaaagaagttatggaaggcgtgtggcccttagcggtgcctcttgaagtcgaagttggtattggcgaggattggctggctgccaaagga

SEQ ID NO: 5402 - protein, 841 aa, synthetic construct
  REGION 1..841: note = Variant of DNA polymerase I from Thermus sp. strain 2.9
MHHHHHHGGSGVLPVFEPKGRVLLVDGHHLAYRNFFALKGLTTSLGEPVQGVYGFAKSLLKALKEDGDVVIVVFDAKAPSFRHEAYEAYKAGRAPTPEDFPRQLALMKELVDLLGLERLEVPGFEADDVLATLAKKAEREGYEVQILTADRDLFQLLSPRISVLHPEGHRITPEWLWEKYGLRPEQWVDFRALAGDPSDNIPGVKGIGEKTALKLLKEWGSLENLLKNLDQVKPESVREKILAHLEDLKLSRELSRVRTDLPLEVDFGRRREPDWEGLKAFLERLEFGSLLHEFGLLESPLPAEEAPWPPPEGAFLGYRLSRPEPMWAELLALAASAQGRVYRAEDPHGALRGLFEVRGLLAKDLAVVALREGLDLPPTDDPMLLAYLLDPSNTTPEGVARRYGGEWTEDAAKRALLAERLHENLLGRLQGEERLLWLYEEVEKPLSRVLAHMEATGVKLDVAYLENLSLEVAAHMRRLEEEVFRLAGRSFRLNSRDQLERVLFDELGLPPIGKTEKTGKRSTSAAVLEALREVHPIVDKILQYREMAKLKGTYIDRLPALVHPKTGRLHTRFNQTATATGRLSSSDPNLQNIPVRTPLGQKIRRAFVAEEGWRLVALDYRQIELRVLAHLSGDENLIRVFQEGKDIHTQTASWMFGLSAEAIDPLMRRAAKTINFGVLYGMSAFRLSQELGIPYEEAQAFIQKYFQSYPKVKAWIEKTLREGRTRGYVETLFGRRRYVPDLNARVKGKREAAERMAFNMPVQGTAADLMKLAMVRLFPQLREVGARMLLQVHDELLLEAPKERAEEVAALAKEVMEGVWPLAVPLEVEVGIGEDWLAAKG

SEQ ID NO: 5403 - DNA, 2523 bp, synthetic construct
  misc_feature 1..2523: note = Variant of DNA polymerase I from Thermus sp. strain 2.9
  source 1..2523: mol_type = other DNA
atgcaccatcatcatcatcatggcggtagcggcgtgttaccggtgttcgagcctaaaggtcgcgtgcttctggttgatggccatcatctcgcgtatcgtaacttctttgccctgaaaggattaaccaccagcctgggcgagccggtacagggtgtctacggctttgcaaagtcgctcctgaaagctctgaaagaagacggtgatgtggtgattgttgtctttgatgcgaaagcgccaagttttcgccacgaagcgtacgaagcttacaaagccgggcgtgctccaacgccggaagactttcctcgccaattggcgcttatgaaggaattagtggatttgcttggcctcgaacgcttggaagttcccggtttcgaggcagacgacgtattagcgactctcgcaaagaaagccgaacgtgagggctatgaagtccagatcttgacagcagatcgcgatcttttccagcttttatctccgcgcatctcggtgttacacccggaagggcatcgtatcaccccggaatggctctgggagaaatatggtttgcgtcccgaacaatgggtggattttcgcgccttagcaggcgatccgagcgacaatattccgggagttaaaggtatcggcgagaagacggcgctcaagctccttaaagaatgggggtcgttggagaacttgcttaagaatttagatcaggtcaaaccagagtcagtgcgtgagaagattcttgctcacctcgaagacctcaaattaagccgcgaattgtcccgtgtacgcaccgatttgccgctcgaagttgatttcggtcgccgccgcgaacctgactgggagggtcttaaagcgtttttagagcgtcttgaatttggttcgctcttgcatgaattcggccttttagaaagcccgttactggccgaagaagcaccttggccaccgcccgagggcgcgtttttaggttaccgtttgagtcgcccggaaccgatgtgggccgaattactggctcttgcagcgtctgcccagggacgtgtgtatcgcgcggaagaccctcatggtgcgctccgcggcctcttcgaagtccgtggactccttgccaaagacttagctgttgttgcattgcgcgaaggtcttgatttacctccgactgatgatccaatgcttcttgcgtacctcttggacccgtcaaacacgacgcccgaaggcgtagcccgtcgttacggcggcgagtggaccgaagatgcagcgaaacgcgcgttattggccgaacgtttgcacgaaaatttattaggacgtttgcaaggcgaggaacgtctcctctggctttacgaagaagtggagaaaccattgagtcgcgtgctcgcgcatatggaagctaccggtgtcaaattagacgtggcgtatttggagaatctcagccttgaagttgctgcccacatgcgccgcttggaggaagaagtattccgtttactgggccgttcctttcgccttaactctcgcgatcagttagaacgtgtgttgttcgatgaacttggtctccctcctatcggcaagacagagaagaccggtaaacgtagcacttcagcggcggttttagaagctcttcgcgaagtccatcccattgtggacaagatcttgcagtaccgcgaaatggcgaaattgaaaggcacctatattgaccgtcttccggcattagtccacccgaaaacgggacgcctccatacccgcttcaaccaaacagccacggcgaccggtcgtttgtcctcctctgatccaaaccttcagaatattccagtacgtaccccattgggccagaagatccgccgtgcgtttgtagctgaggagggttggcgtttagtggccctcgattatcgtcaaattgaattacgtgtccttgcccatctttctggcgatgagaacctcatccgcgtgtttcaggaaggcaaagacattcacactcaaacggcaagctggatgtttggattatcagctgaagcgatcgatcctttgatgcgtcgtgcagcgaagaccatcaatttcggtgttctctacggtatgagtgcctttcgtttgtcgcaggaattaggcattccctatgaagaagctcaggcgttcattcagaaatactttcaaagctatcccaaagttaaagcatggatcgagaagactctccgtgaaggccgcacacgtggttacgtagagaccttatttggacgtcgccgctatgttcccgatttaaacgctcgcgtgaaaggcaagcgtgaagccgccgaacgcatggcgttcaacatgcctgtacagggcacggcagctgacctcatgaaacttgcaatggtgcgcctttttccacaattgcgtgaagttggtgcccgcatgctcttgcaggtccacgatgaactcttgttagaagcgccaaaagagcgtgcggaagaggtggcagccctcgcgaaagaagttatggaaggcgtgtggcccttagcggtgcctcttgaagtcgaagttggtattggcgaggattggctggctgccaaagga

SEQ ID NO: 5404 - protein, 841 aa, synthetic construct
  REGION 1..841: note = Variant of DNA polymerase I from Thermus sp. strain 2.9
MHHHHHHGGSGVLPVFEPKGRVLLVDGHHLAYRNFFALKGLTTSLGEPVQGVYGFAKSLLKALKEDGDVVIVVFDAKAPSFRHEAYEAYKAGRAPTPEDFPRQLALMKELVDLLGLERLEVPGFEADDVLATLAKKAEREGYEVQILTADRDLFQLLSPRISVLHPEGHRITPEWLWEKYGLRPEQWVDFRALAGDPSDNIPGVKGIGEKTALKLLKEWGSLENLLKNLDQVKPESVREKILAHLEDLKLSRELSRVRTDLPLEVDFGRRREPDWEGLKAFLERLEFGSLLHEFGLLESPLLAEEAPWPPPEGAFLGYRLSRPEPMWAELLALAASAQGRVYRAEDPHGALRGLFEVRGLLAKDLAVVALREGLDLPPTDDPMLLAYLLDPSNTTPEGVARRYGGEWTEDAAKRALLAERLHENLLGRLQGEERLLWLYEEVEKPLSRVLAHMEATGVKLDVAYLENLSLEVAAHMRRLEEEVFRLLGRSFRLNSRDQLERVLFDELGLPPIGKTEKTGKRSTSAAVLEALREVHPIVDKILQYREMAKLKGTYIDRLPALVHPKTGRLHTRFNQTATATGRLSSSDPNLQNIPVRTPLGQKIRRAFVAEEGWRLVALDYRQIELRVLAHLSGDENLIRVFQEGKDIHTQTASWMFGLSAEAIDPLMRRAAKTINFGVLYGMSAFRLSQELGIPYEEAQAFIQKYFQSYPKVKAWIEKTLREGRTRGYVETLFGRRRYVPDLNARVKGKREAAERMAFNMPVQGTAADLMKLAMVRLFPQLREVGARMLLQVHDELLLEAPKERAEEVAALAKEVMEGVWPLAVPLEVEVGIGEDWLAAKG

SEQ ID NO: 5405 - DNA, 2523 bp, synthetic construct
  misc_feature 1..2523: note = Variant of DNA polymerase I from Thermus sp. strain 2.9
  source 1..2523: mol_type = other DNA
atgcaccatcatcatcatcatggcggtagcggcgtgttaccggtgttcgagcctaaaggtcgcgtgcttctggttgatggccatcatctcgcgtatcgtaacttctttgccctgaaaggattaaccaccagcctgggcgagccggtacagggtgtctacggctttgcaaagtcgctcctgaaagctctgaaagaagacggtgatgtggtgattgttgtctttgatgcgaaagcgccaagttttcgccacgaagcgtacgaagcttacaaagccgggcgtgctccaacgccggaagactttcctcgccaattggcgcttatgaaggaattagtggatttgcttggcctcgaacgcttggaagttcccggtttcgaggcagacgacgtattagcgactctcgcaaagaaagccgaacgtgagggctatgaagtccagatcttgacagcagatcgcgatcttttccagcttttatctccgcgcatctcggtgttacacccggaagggcatcgtatcaccccggaatggctctgggagaaatatggtttgcgtcccgaacaatgggtggattttcgcgccttagcaggcgatccgagcgacaatattccgggagttaaaggtatcggcgagaagacggcgctcaagctccttaaagaatgggggtcgttggagaacttgcttaagaatttagatcaggtcaaaccagagtcagtgcgtgagaagattcttgctcacctcgaagacctcaaattaagccgcgaattgtcccgtgtacgcaccgatttgccgctcgaagttgatttcggtcgccgccgcgaacctgactgggagggtcttaaagcgtttttagagcgtcttgaatttggttcgctcttgcatgaattcggccttttagaaagcccgttactggccgaagaagcaccttggccaccgcccgagggcgcgtttttaggttaccgtttgagtcgcccggaaccgatgtgggccgaattactggctcttgcagcgtctgcccagggacgtgtgtatcgcgcggaagaccctcatggtgcgctccgcggcctcttcgaagtccgtggactccttgccaaagacttagctgttgttgcattgcgcgaaggtcttgatttacctccgactgatgatccaatgcttcttgcgtacctcttggacccgtcaaacacgacgcccgaaggcgtagcccgtcgttacggcggcgagtggaccgaagatgcagcgaaacgcgcgttattggccgaacgtttgcacgaaaatttattaggacgtttgcaaggcgagagtcgtctcctctggctttacgaagaagtggagaaaccattgagtcgcgtgctcgcgcatatggaagctaccggtgtcaaattagacgtggcgtatttggagaatctcagccttgaagttgctgcccacatgcgccgcttggaggaagaagtattccgtttagcaggccgttcctttcgccttaactctcgcgatcagttagaacgtgtgttgttcgatgaacttggtctccctcctatcggcaagacagagaagaccggtaaacgtagcacttcagcggcggttttagaagctcttcgcgaagtccatcccattgtggacaagatcttgcagtaccgcgaaatggcgaaattgaaaggcacctatattgaccgtcttccggcattagtccacccgaaaacgggacgcctccatacccgcttcaaccaaacagccacggcgaccggtcgtttgtcctcctctgatccaaaccttcagaatattccagtacgtaccccattgggccagaagatccgccgtgcgtttgtagctgaggagggttggcgtttagtggccctcgattatcgtcaaattgaattacgtgtccttgcccatctttctggcgatgagaacctcatccgcgtgtttcaggaaggcaaagacattcacactcaaacggcaagctggatgtttggattatcagctgaagcgatcgatcctttgatgcgtcgtgcagcgaagaccatcaatttcggtgttctctacggtatgagtgcctttcgtttgtcgcaggaattaggcattccctatgaagaagctcaggcgttcattcagaaatactttcaaagctatcccaaagttaaagcatggatcgagaagactctccgtgaaggccgcacacgtggttacgtagagaccttatttggacgtcgccgctatgttcccgatttaaacgctcgcgtgaaaggcaagcgtgaagccgccgaacgcatggcgttcaacatgcctgtacagggcacggcagctgacctcatgaaacttgcaatggtgcgcctttttccacaattgcgtgaagttggtgcccgcatgctcttgcaggtccacgatgaactcttgttagaagcgccaaaagagcgtgcggaagaggtggcagccctcgcgaaagaagttatggaaggcgtgtggcccttagcggtgcctcttgaagtcgaagttggtattggcgaggattggctggctgccaaagga

SEQ ID NO: 5406 - protein, 841 aa, synthetic construct
  REGION 1..841: note = Variant of DNA polymerase I from Thermus sp. strain 2.9
MHHHHHHGGSGVLPVFEPKGRVLLVDGHHLAYRNFFALKGLTTSLGEPVQGVYGFAKSLLKALKEDGDVVIVVFDAKAPSFRHEAYEAYKAGRAPTPEDFPRQLALMKELVDLLGLERLEVPGFEADDVLATLAKKAEREGYEVQILTADRDLFQLLSPRISVLHPEGHRITPEWLWEKYGLRPEQWVDFRALAGDPSDNIPGVKGIGEKTALKLLKEWGSLENLLKNLDQVKPESVREKILAHLEDLKLSRELSRVRTDLPLEVDFGRRREPDWEGLKAFLERLEFGSLLHEFGLLESPLLAEEAPWPPPEGAFLGYRLSRPEPMWAELLALAASAQGRVYRAEDPHGALRGLFEVRGLLAKDLAVVALREGLDLPPTDDPMLLAYLLDPSNTTPEGVARRYGGEWTEDAAKRALLAERLHENLLGRLQGESRLLWLYEEVEKPLSRVLAHMEATGVKLDVAYLENLSLEVAAHMRRLEEEVFRLAGRSFRLNSRDQLERVLFDELGLPPIGKTEKTGKRSTSAAVLEALREVHPIVDKILQYREMAKLKGTYIDRLPALVHPKTGRLHTRFNQTATATGRLSSSDPNLQNIPVRTPLGQKIRRAFVAEEGWRLVALDYRQIELRVLAHLSGDENLIRVFQEGKDIHTQTASWMFGLSAEAIDPLMRRAAKTINFGVLYGMSAFRLSQELGIPYEEAQAFIQKYFQSYPKVKAWIEKTLREGRTRGYVETLFGRRRYVPDLNARVKGKREAAERMAFNMPVQGTAADLMKLAMVRLFPQLREVGARMLLQVHDELLLEAPKERAEEVAALAKEVMEGVWPLAVPLEVEVGIGEDWLAAKG

SEQ ID NO: 5407 - DNA, 2523 bp, synthetic construct
  misc_feature 1..2523: note = Variant of DNA polymerase I from Thermus sp. strain 2.9
  source 1..2523: mol_type = other DNA
atgcaccatcatcatcatcatggcggtagcggcgtgttaccggtgttcgagcctaaaggtcgcgtgcttctggttgatggccatcatctcgcgtatcgtaacttctttgccctgaaaggattaaccaccagcctgggcgagccggtacagggtgtctacggctttgcaaagtcgctcctgaaagctctgaaagaagacggtgatgtggtgattgttgtctttgatgcgaaagcgccaagttttcgccacgaagcgtacgaagcttacaaagccgggcgtgctccaacgccggaagactttcctcgccaattggcgcttatgaaggaattagtggatttgcttggcctcgaacgcttggaagttcccggtttcgaggcagacgacgtattagcgactctcgcaaagaaagccgaacgtgagggctatgaagtccagatcttgacagcagatcgcgatcttttccagcttttatctccgcgcatctcggtgttacacccggaagggcatcgtatcaccccggaatggctctgggagaaatatggtttgcgtcccgaacaatgggtggattttcgcgccttagcaggcgatccgagcgacaatattccgggagttaaaggtatcggcgagaagacggcgctcaagctccttaaagaatgggggtcgttggagaacttgcttaagaatttagatcaggtcaaaccagagtcagtgcgtgagaagattcttgctcacctcgaagacctcaaattaagccgcgaattgtcccgtgtacgcaccgatttgccgctcgaagttgatttcggtcgccgccgcgaacctgactgggagggtcttaaagcgtttttagagcgtcttgaatttggttcgctcttgcatgaattcggccttttagaaagcccgttactggccgaagaagcaccttggccaccgcccgagggcgcgtttttaggttaccgtttgagtcgcccggaaccgatgtgggccgaattactggctcttgcagcgtctgcccagggacgtgtgtatcgcgcggaagaccctcatggtgcgctccgcggcctcttcgaagtccgtggactccttgccaaagacttagctgttgttgcattgcgcgaaggtcttgatttacctccgactgatgatccaatgcttcttgcgtacctcttggacccgtcaaacacgacgcccgaaggcgtagcccgtcgttacggcggcgagtggaccgaagatgcagcgaaacgcgcgttattggccgaacgtttgcacgaaaatttattaggacgtttgcaaggcgaggaacgtctcctctggctttacgaagaagtggagaaaccattgagtcgcgtgctcgcgcatatggaagctaccggtgtcaaattagacgtggcgtatttggagaatctcagccttgaagttgctgcccacatgcgccgcttggaggaagaagtattccgtttagcaggccgttcctttcgccttaactctcgcgatcagttagaacgtgtgttgttcgatgaacttggtctccctcctatcggcaagacagagaagaccggtaaacgtagcacttcagcggcggttttagaagctcttcgcgaagtccatcccattgtggacaagatcttgcagtaccgcgaaatggcgaaattgaaaggcacctatattgaccgtcttccggcattagtccacccgaaaacgggacgcctccatacccgcttcaaccaaacagccacggcgaccggtcgtttgtcctcctctgatccaaaccttcagaatattccagtacgtaccccattgggccagaagatccgccgtgcgtttgtagctgaggagggttggcgtttagtggccctcgattatcatcaaattgaattacgtgtccttgcccatctttctggcgatgagaacctcatccgcgtgtttcaggaaggcaaagacattcacactcaaacggcaagctggatgtttggattatcagctgaagcgatcgatcctttgatgcgtcgtgcagcgaagaccatcaatttcggtgttctctacggtatgagtgcctttcgtttgtcgcaggaattaggcattccctatgaagaagctcaggcgttcattcagaaatactttcaaagctatcccaaagttaaagcatggatcgagaagactctccgtgaaggccgcacacgtggttacgtagagaccttatttggacgtcgccgctatgttcccgatttaaacgctgatgtgaaaggcaagcgtgaagccgccgaacgcatggcgttcaacatgcctgtacagggcacggcagctgacctcatgaaacttgcaatggtgcgcctttttccacaattgcgtgaagttggtgcccgcatgctcttgcaggtccacgatgaactcttgttagaagcgccaaaagagcgtgcggaagaggtggcagccctcgcgaaagaagttatggaaggcgtgtggcccttagcggtgcctcttgaagtcgaagttggtattggcgaggattggctggctgccaaagga

SEQ ID NO: 5408 - protein, 841 aa, synthetic construct
  REGION 1..841: note = Variant of DNA polymerase I from Thermus sp. strain 2.9
MHHHHHHGGSGVLPVFEPKGRVLLVDGHHLAYRNFFALKGLTTSLGEPVQGVYGFAKSLLKALKEDGDVVIVVFDAKAPSFRHEAYEAYKAGRAPTPEDFPRQLALMKELVDLLGLERLEVPGFEADDVLATLAKKAEREGYEVQILTADRDLFQLLSPRISVLHPEGHRITPEWLWEKYGLRPEQWVDFRALAGDPSDNIPGVKGIGEKTALKLLKEWGSLENLLKNLDQVKPESVREKILAHLEDLKLSRELSRVRTDLPLEVDFGRRREPDWEGLKAFLERLEFGSLLHEFGLLESPLLAEEAPWPPPEGAFLGYRLSRPEPMWAELLALAASAQGRVYRAEDPHGALRGLFEVRGLLAKDLAVVALREGLDLPPTDDPMLLAYLLDPSNTTPEGVARRYGGEWTEDAAKRALLAERLHENLLGRLQGEERLLWLYEEVEKPLSRVLAHMEATGVKLDVAYLENLSLEVAAHMRRLEEEVFRLAGRSFRLNSRDQLERVLFDELGLPPIGKTEKTGKRSTSAAVLEALREVHPIVDKILQYREMAKLKGTYIDRLPALVHPKTGRLHTRFNQTATATGRLSSSDPNLQNIPVRTPLGQKIRRAFVAEEGWRLVALDYHQIELRVLAHLSGDENLIRVFQEGKDIHTQTASWMFGLSAEAIDPLMRRAAKTINFGVLYGMSAFRLSQELGIPYEEAQAFIQKYFQSYPKVKAWIEKTLREGRTRGYVETLFGRRRYVPDLNADVKGKREAAERMAFNMPVQGTAADLMKLAMVRLFPQLREVGARMLLQVHDELLLEAPKERAEEVAALAKEVMEGVWPLAVPLEVEVGIGEDWLAAKG

SEQ ID NO: 5409 - DNA, 2523 bp, synthetic construct
  misc_feature 1..2523: note = Variant of DNA polymerase I from Thermus sp. strain 2.9
  source 1..2523: mol_type = other DNA
atgcaccatcatcatcatcatggcggtagcggcgtgttaccggtgttcgagcctaaaggtcgcgtgcttctggttgatggccatcatctcgcgtatcgtaacttctttgccctgaaaggattaaccaccagcctgggcgagccggtacagggtgtctacggctttgcaaagtcgctcctgaaagctctgaaagaagacggtgatgtggtgattgttgtctttgatgcgaaagcgccaagttttcgccacgaagcgtacgaagcttacaaagccgggcgtgctccaacgccggaagactttcctcgccaattggcgcttatgaaggaattagtggatttgcttggcctcgaacgcttggaagttcccggtttcgaggcagacgacgtattagcgactctcgcaaagaaagccgaacgtgagggctatgaagtccagatcttgacagcagatcgcgatcttttccagcttttatctccgcgcatctcggtgttacacccggaagggcatcgtatcaccccggaatggctctgggagaaatatggtttgcgtcccgaacaatgggtggattttcgcgccttagcaggcgatccgagcgacaatattccgggagttaaaggtatcggcgagaagacggcgctcaagctccttaaagaatgggggtcgttggagaacttgcttaagaatttagatcaggtcaaaccagagtcagtgcgtgagaagattcttgctcacctcgaagacctcaaattaagccgcgaattgtcccgtgtacgcaccgatttgccgctcgaagttgatttcggtcgccgccgcgaacctgactgggagggtcttaaagcgtttttagagcgtcttgaatttggttcgctcttgcatgaattcggccttttagaaagcccgttactggccgaagaagcaccttggccaccgcccgagggcgcgtttttaggttaccgtttgagtcgcccggaaccgatgtgggccgaattactggctcttgcagcgtctgcccagggacgtgtgtatcgcgcggaagaccctcatggtgcgctccgcggcctcttcgaagtccgtggactccttgccaaagacttagctgttgttgcattgcgcgaaggtcttgatttacctccgactgatgatccaatgcttcttgcgtacctcttggacccgtcaaacacgacgcccgaaggcgtagcccgtcgttacggcggcgagtggaccgaagatgcagcgaaacgcgcgttattggccgaacgtttgcacgaaaatttattaggacgtttgcaaggcgaggaacgtctcctctggctttacgaagaagtggagaaaccattgagtcgcgtgctcgcgcatatggaagctaccggtgtcaaattagacgtggcgtatttggagaatctcagccttgaagttgctgcccacatgcgccgcttggaggaagaagtattccgtttagcaggccgttcctttcgccttaactctcgcgatcagttagaacgtgtgttgttcgatgaacttggtctccctcctatcggcaagacagaggtgaccggtaaacgtagcacttcagcggcggttttagaagctcttcgcgaagtccatcccattgtggacaagatcttgcagtaccgcgaaatggcgaaattgaaaggcacctatattgaccgtcttccggcattagtccacccgaaaacgggacgcctccatacccgcttcaaccaaacagccacggcgaccggtcgtttgtcctcctctgatccaaaccttcagaatattccagtacgtaccccattgggccagaagatccgccgtgcgtttgtagctgaggagggttggcgtttagtggccctcgattatcgtcaaattgaattacgtgtccttgcccatctttctggcgatgagaacctcatccgcgtgtttcaggaaggcaaagacattcacactcaaacggcaagctggatgtttggattatcagctgaagcgatcgatcctttgatgcgtcgtgcagcgaagaccatcaatttcggtgttctctacggtatgagtgcctttcgtttgtcgcaggaattaggcattccctatgaagaagctcaggcgttcattcagaaatactttcaaagctatcccaaagttaaagcatggatcgagaagactctccgtgaaggccgcacacgtggttacgtagagaccttatttggacgtcgccgctatgttcccgatttaaacgctcgcgtgaaaggcaagcgtgaagccgccgaacgcatggcgttcaacatgcctgtacagggcacggcagctgacctcatgaaacttgcaatggtgcgcctttttccacaattgcgtgaagttggtgcccgcatgctcttgcaggtccacgatgaactcttgttagaagcgccaaaagagcgtgcggaagaggtggcagccctcgcgaaagaagttatggaaggcgtgtggcccttagcggtgcctcttgaagtcgaagttggtattggcgaggattggctggctgccaaagga

SEQ ID NO: 5410 - protein, 841 aa, synthetic construct
  REGION 1..841: note = Variant of DNA polymerase I from Thermus sp. strain 2.9
MHHHHHHGGSGVLPVFEPKGRVLLVDGHHLAYRNFFALKGLTTSLGEPVQGVYGFAKSLLKALKEDGDVVIVVFDAKAPSFRHEAYEAYKAGRAPTPEDFPRQLALMKELVDLLGLERLEVPGFEADDVLATLAKKAEREGYEVQILTADRDLFQLLSPRISVLHPEGHRITPEWLWEKYGLRPEQWVDFRALAGDPSDNIPGVKGIGEKTALKLLKEWGSLENLLKNLDQVKPESVREKILAHLEDLKLSRELSRVRTDLPLEVDFGRRREPDWEGLKAFLERLEFGSLLHEFGLLESPLLAEEAPWPPPEGAFLGYRLSRPEPMWAELLALAASAQGRVYRAEDPHGALRGLFEVRGLLAKDLAVVALREGLDLPPTDDPMLLAYLLDPSNTTPEGVARRYGGEWTEDAAKRALLAERLHENLLGRLQGEERLLWLYEEVEKPLSRVLAHMEATGVKLDVAYLENLSLEVAAHMRRLEEEVFRLAGRSFRLNSRDQLERVLFDELGLPPIGKTEVTGKRSTSAAVLEALREVHPIVDKILQYREMAKLKGTYIDRLPALVHPKTGRLHTRFNQTATATGRLSSSDPNLQNIPVRTPLGQKIRRAFVAEEGWRLVALDYRQIELRVLAHLSGDENLIRVFQEGKDIHTQTASWMFGLSAEAIDPLMRRAAKTINFGVLYGMSAFRLSQELGIPYEEAQAFIQKYFQSYPKVKAWIEKTLREGRTRGYVETLFGRRRYVPDLNARVKGKREAAERMAFNMPVQGTAADLMKLAMVRLFPQLREVGARMLLQVHDELLLEAPKERAEEVAALAKEVMEGVWPLAVPLEVEVGIGEDWLAAKG

SEQ ID NO: 5411 - DNA, 2523 bp, synthetic construct
  misc_feature 1..2523: note = Variant of DNA polymerase I from Thermus sp. strain 2.9
  source 1..2523: mol_type = other DNA
atgcaccatcatcatcatcatggcggtagcggcgtgttaccggtgttcgagcctaaaggtcgcgtgcttctggttgatggccatcatctcgcgtatcgtaacttctttgccctgaaaggattaaccaccagcctgggcgagccggtacagggtgtctacggctttgcaaagtcgctcctgaaagctctgaaagaagacggtgatgtggtgattgttgtctttgatgcgaaagcgccaagttttcgccacgaagcgtacgaagcttacaaagccgggcgtgctccaacgccggaagactttcctcgccaattggcgcttatgaaggaattagtggatttgcttggcctcgaacgcttggaagttcccggtttcgaggcagacgacgtattagcgactctcgcaaagaaagccgaacgtgagggctatgaagtccagatcttgacagcagatcgcgatcttttccagcttttatctccgcgcatctcggtgttacacccggaagggcatcgtatcaccccggaatggctctgggagaaatatggtttgcgtcccgaacaatgggtggattttcgcgccttagcaggcgatccgagcgacaatattccgggagttaaaggtatcggcgagaagacggcgctcaagctccttaaagaatgggggtcgttggagaacttgcttaagaatttagatcaggtcaaaccagagtcagtgcgtgagaagattcttgctcacctcgaagacctcaaattaagccgcgaattgtcccgtgtacgcaccgatttgccgctcgaagttgatttcggccgccgccgcgaacctgactgggagggtcttaaagcgtttttagagcgtcttgaatttggttcgctcttgcatgaattcggccttttagaaagcccgttactggccgaagaagcaccttggccaccgcccgagggcgcgtttttaggttaccgtttgagtcgcccggaaccgatgtgggccgaattactggctcttgcagcgtctgcccagggacgtgtgtatcgcgcggaagaccctcatggtgcgctccgcggcctcttcgaagtccgtggactccttgccaaagacttagctgttgttgcattgcgcgaaggtcttgatttacctccgactgatgatccaatgcttcttgcgtacctcttggacccgtcaaacacgacgcccgaaggcgtagcccgtcgttacggcggcgagtggaccgaagatgcagcgaaacgcgcgttattggccgaacgtttgcacgcaaatttattaggacgtttgcaaggcgaggaacgtctcctctggctttacgaagaagtggagaaaccattgagtcgcgtgctcgcgcatatggaagctaccggtgtcaaattagacgtggcgtatttggagaatctcagccttgaagttgctgcccacatgcgccgcttggaggaagaagtattccgtttagcaggccactcctttcgccttaactctcgcgatcagttagaacgtgtgttgttcgatgaacttggtctccctcctatcggcaagacagagaagaccggtaaacgtagcacttcagcggcggttttagaagctcttcgcgaagtccatcccattgtggacaagatcttgcagtaccgcgaaatggcgaaattgaaaggcacctatattgaccgtcttccggcattagtccacccgaaaacgggacgcctccatacccgcttcaaccaaacagccacggcgaccggtcgtttgtcctcctctgatccaaaccttcagaatattccagtacgtaccccattgggccagaagatccgccgtgcgtttgtagctgaggagggttggcgtttagtggccctcgattatagtcaaattgaattacgtgtccttgcccatctttctggcgatgagaacctcatccgcgtgtttcaggaaggcaaagacattcacactcaaacggcaagctggatgtttggattatcagctgaagcgatcgatcctttgatgcgtcgtgcagcgaagaccatcaatttcggtgttctctacggtatgagtgcctttcgtttgtcgcaggaattaggcattccctatgaagaagctcaggcgttcattcagaaatactttcaaagctatcccaaagttaaagcatggatcgagaagactctccgcgaaggccgcacacgtggttacgtagagaccttatttggacgtcgccgctatgttcccgatttaaacgctcgcgtgaaaggcaaacgtgaagccgccgaacgcatggcgttcaacatgcctgtacagggcacggcagctgacctcatgaaacttgcaatggtgcgcctttttccacaattgcgtgaagttggtgcccgcatgctcttgcaggtccacgatgaactcttgttagaagcgccaaaagagcgtgcggaagaggtggcagccctcgcgaaagaagttatggaaggcgtgtggcccttagcggtgcctcttgaagtcgaagttggtattggcgaggattggctggctgccaaagga

SEQ ID NO: 5412 - protein, 841 aa, synthetic construct
  REGION 1..841: note = Variant of DNA polymerase I from Thermus sp. strain 2.9
MHHHHHHGGSGVLPVFEPKGRVLLVDGHHLAYRNFFALKGLTTSLGEPVQGVYGFAKSLLKALKEDGDVVIVVFDAKAPSFRHEAYEAYKAGRAPTPEDFPRQLALMKELVDLLGLERLEVPGFEADDVLATLAKKAEREGYEVQILTADRDLFQLLSPRISVLHPEGHRITPEWLWEKYGLRPEQWVDFRALAGDPSDNIPGVKGIGEKTALKLLKEWGSLENLLKNLDQVKPESVREKILAHLEDLKLSRELSRVRTDLPLEVDFGRRREPDWEGLKAFLERLEFGSLLHEFGLLESPLLAEEAPWPPPEGAFLGYRLSRPEPMWAELLALAASAQGRVYRAEDPHGALRGLFEVRGLLAKDLAVVALREGLDLPPTDDPMLLAYLLDPSNTTPEGVARRYGGEWTEDAAKRALLAERLHANLLGRLQGEERLLWLYEEVEKPLSRVLAHMEATGVKLDVAYLENLSLEVAAHMRRLEEEVFRLAGHSFRLNSRDQLERVLFDELGLPPIGKTEKTGKRSTSAAVLEALREVHPIVDKILQYREMAKLKGTYIDRLPALVHPKTGRLHTRFNQTATATGRLSSSDPNLQNIPVRTPLGQKIRRAFVAEEGWRLVALDYSQIELRVLAHLSGDENLIRVFQEGKDIHTQTASWMFGLSAEAIDPLMRRAAKTINFGVLYGMSAFRLSQELGIPYEEAQAFIQKYFQSYPKVKAWIEKTLREGRTRGYVETLFGRRRYVPDLNARVKGKREAAERMAFNMPVQGTAADLMKLAMVRLFPQLREVGARMLLQVHDELLLEAPKERAEEVAALAKEVMEGVWPLAVPLEVEVGIGEDWLAAKG

SEQ ID NO: 5413 - DNA, 2523 bp, synthetic construct
  misc_feature 1..2523: note = Variant of DNA polymerase I from Thermus sp. strain 2.9
  source 1..2523: mol_type = other DNA
atgcaccatcatcatcatcatggcggtagcggcgtgttaccggtgttcgagcctaaaggtcgcgtgcttctggttgatggccatcatctcgcgtatcgtaacttctttgccctgaaaggattaaccaccagcctgggcgagccggtacagggtgtctacggctttgcaaagtcgctcctgaaagctctgaaagaagacggtgatgtggtgattgttgtctttgatgcgaaagcgccaagttttcgccacgaagcgtacgaagcttacaaagccgggcgtgctccaacgccggaagactttcctcgccaattggcgcttatgaaggaattagtggatttgcttggcctcgaacgcttggaagttcccggtttcgaggcagacgacgtattagcgactctcgcaaagaaagccgaacgtgagggctatgaagtccagatcttgacagcagatcgcgatcttttccagcttttatctccgcgcatctcggtgttacacccggaagggcatcgtatcaccccggaatggctctgggagaaatatggtttgcgtcccgaacaatgggtggattttcgcgccttagcaggcgatccgagcgacaatattccgggagttaaaggtatcggcgagaagacggcgctcaagctccttaaagaatgggggtcgttggagaacttgcttaagaatttagatcaggtcaaaccagagtcagtgcgtgagaagattcttgctcacctcgaagacctcaaattaagccgcgaattgtcccgtgtacgcaccgatttgccgctcgaagttgatttcggtcgccgccgcgaacctgactgggagggtcttaaagcgtttttagagcgtcttgaatttggttcgctcttgcatgaattcggccttttagaaagcccgttactggccgaagaagcaccttggccaccgcccgagggcgcgtttttaggttaccgtttgagtcgcccggaaccgatgtgggccgaattactggctcttgcagcgtctgcccagggacgtgtgtatcgcgcggaagaccctcatggtgcgctccgcggcctcttcgaagtccgtggactccttgccaaagacttagctgttgttgcattgcgcgaaggtcttgatttacctccgactgatgatccaatgcttcttgcgtacctcttggacccgtcaaacacgacgcccgaaggcgtagcccgtcgttacggcggcgagtggaccgaagatgcagcgaaacgcgcgttattggccgaacgtttgcacgaaaatttattaggacgtttgcaaggcgaggaacgtctcacttggctttacgaagaagtggagaaaccattgagtcgcgtgctcgcgcatatggaagctaccggtgtcaaattagacgtggcgtatttggagaatctcagccttgaagttgctgcccacatgcgccgcttggaggaagaagtattccgtttagcaggccgttcctttcgccttaactctcgcgatcagttagaacgtgtgttgttcgatgaacttggtctccctcctatcggcaagacagagaagaccggtaaacgtagcacttcagcggcggttttagaagctcttcgcgaagtccatcccattgtggacaagatcttgcagtaccgcgaaatggcgaaattgaaaggcacctatattgaccgtcttccggcattagtccacccgaaaacgggacgcctccatacccgcttcaaccaaacagccacggcgaccggtcgtttgtcctcctctgatccaaaccttcagaatattccagtacgtaccccattgggccagaagatccgccgtgcgtttgtagctgaggagggttggcgtttagtggccctcgattatcgtcaaattgaattacgtgtccttgcccatctttctggcgatgagaacctcatccgcgtgtttcaggaaggcaaagacattcacactcaaacggcaagctggatgtttggattatcagctgaagcgatcgatcctttgatgcgtcgtgcagcgaagaccatcaatttcggtgttctctacggtatgagtgcctttcgtttgtcgcaggaattaggcattccctatgaagaagctcaggcgttcattcagaaatactttcaaagctatcccaaagttaaagcatggatcgagaagactctccgtgaaggccgcacacgtggttacgtagagaccttatttggacgtcgccgctatgttcccgatttaaacgctcgcgtgaaaggcaagcgtgaagccgccgaacgcatggcgttcaacatgcctgtacagggcacggcagctgacctcatgaaacttgcaatggtgcgcctttttccacaattgcgtgaagttggtgcccgcatgctcttgcaggtccacgatgaactcttgttagaagcgccaaaagagcgtgcggaagaggtggcagccctcgcgaaagaagttatggaaggcgtgtggcccttagcggtgcctcttgaagtcgaagttggtattggcgaggattggctggctgccaaagga

SEQ ID NO: 5414 - protein, 841 aa, synthetic construct
  REGION 1..841: note = Variant of DNA polymerase I from Thermus sp. strain 2.9
MHHHHHHGGSGVLPVFEPKGRVLLVDGHHLAYRNFFALKGLTTSLGEPVQGVYGFAKSLLKALKEDGDVVIVVFDAKAPSFRHEAYEAYKAGRAPTPEDFPRQLALMKELVDLLGLERLEVPGFEADDVLATLAKKAEREGYEVQILTADRDLFQLLSPRISVLHPEGHRITPEWLWEKYGLRPEQWVDFRALAGDPSDNIPGVKGIGEKTALKLLKEWGSLENLLKNLDQVKPESVREKILAHLEDLKLSRELSRVRTDLPLEVDFGRRREPDWEGLKAFLERLEFGSLLHEFGLLESPLLAEEAPWPPPEGAFLGYRLSRPEPMWAELLALAASAQGRVYRAEDPHGALRGLFEVRGLLAKDLAVVALREGLDLPPTDDPMLLAYLLDPSNTTPEGVARRYGGEWTEDAAKRALLAERLHENLLGRLQGEERLTWLYEEVEKPLSRVLAHMEATGVKLDVAYLENLSLEVAAHMRRLEEEVFRLAGRSFRLNSRDQLERVLFDELGLPPIGKTEKTGKRSTSAAVLEALREVHPIVDKILQYREMAKLKGTYIDRLPALVHPKTGRLHTRFNQTATATGRLSSSDPNLQNIPVRTPLGQKIRRAFVAEEGWRLVALDYRQIELRVLAHLSGDENLIRVFQEGKDIHTQTASWMFGLSAEAIDPLMRRAAKTINFGVLYGMSAFRLSQELGIPYEEAQAFIQKYFQSYPKVKAWIEKTLREGRTRGYVETLFGRRRYVPDLNARVKGKREAAERMAFNMPVQGTAADLMKLAMVRLFPQLREVGARMLLQVHDELLLEAPKERAEEVAALAKEVMEGVWPLAVPLEVEVGIGEDWLAAKG

SEQ ID NO: 5415 - DNA, 2523 bp, synthetic construct
  misc_feature 1..2523: note = Variant of DNA polymerase I from Thermus sp. strain 2.9
  source 1..2523: mol_type = other DNA
atgcaccatcatcatcatcatggcggtagcggcgtgttaccggtgttcgagcctaaaggtcgcgtgcttctggttgatggccatcatctcgcgtatcgtaacttctttgccctgaaaggattaaccaccagcctgggcgagccggtacagggtgtctacggctttgcaaagtcgctcctgaaagctctgaaagaagacggtgatgtggtgattgttgtctttgatgcgaaagcgccaagttttcgccacgaagcgtacgaagcttacaaagccgggcgtgctccaacgccggaagactttcctcgccaattggcgcttatgaaggaattagtggatttgcttggcctcgaacgcttggaagttcccggtttcgaggcagacgacgtattagcgactctcgcaaagaaagccgaacgtgagggctatgaagtccagatcttgacagcagatcgcgatcttttccagcttttatctccgcgcatctcggtgttacacccggaagggcatcgtatcaccccggaatggctctgggagaaatatggtttgcgtcccgaacaatgggtggattttcgcgccttagcaggcgatccgagcgacaatattccgggagttaaaggtatcggcgagaagacggcgctcaagctccttaaagaatgggggtcgttggagaacttgcttaagaatttagatcaggtcaaaccagagtcagtgcgtgagaagattcttgctcacctcgaagacctcaaattaagccgcgaattgtcccgtgtacgcaccgatttgccgctcgaagttgatttcggtcgccgccgcgaacctgactgggagggtcttaaagcgtttttagagcgtcttgaatttggttcgctcttgcatgaattcggccttttagaaagcccgttactggccgaagaagcaccttggccaccgcccgagggcgcgtttttaggttaccgtttgagtcgcccggaaccgatgtgggccgaattactggctcttgcagcgtctgcccagggacgtgtgtatcgcgcggaagaccctcatggtgcgctccgcggcctcttcgaagtccgtggactccttgccaaagacttagctgttgttgcattgcgcgaaggtcttgatttacctccgactgatgatccaatgcttcttgcgtacctcttggacccgtcaaacacgacgcccgaaggcgtagcccgtcgttacggcggcgagtggaccgaagatgcagcgaaacgcgcgttattggccgaacgtttgcacgaaaatttattaggacgtttgcaaggcgaggaacgtctcctctggctttacgaagaagtggagaaaccattgagtcgcgtgctcgcgcatatggaagctaccggtgtcaaattagacgtggcgtatttggagaatctcagccttgaagttgctgcccacatgcgccgcttggaggaagaagtattccgtttagcaggccgttcctttcgccttaactctcgcgatcagttagaacgtgtgttgttcgatgaacttggtctccctcctatcggcaagacagagaagaccggtaaacgtagcacttcagcggcggttttagaagctcttcgcgaagtccatcccattgtggacaagatcttgcagtaccgcgaaatggcgaaattgaaaggcacctatattgaccgtcttccggcattagtccacccgaaaacgggacgcctccatacccgcttcaaccaaacagccacggcgaccggtcgtttgtcctcctctgatccaaaccttcagaatattccagtacgtaccccattgggccagaagatccgccgtgcgtttgtagctgaggagggttggcgtttagtggccctcgattatcgtcaaattgaattacgtgtccttgcccatctttctggcgatgagaacctcatccgcgtgtttcaggaaggcaaagacattcacactcaaacggcaagctggatgtttggattatcagctgaagcgatcgatcctttgatgcgtcgtgcagcgaagaccatcaatttcggtgttctctacggtatgagtgcctttcgtttgtcgcaggaattaggcattccctatgaagaagctcaggcgttcattcagaaatactttcaaagctatcccaaagttaaagcatggatcgagaagactctccgtgaaggccgcacacgtggttacgtagagaccttatttggacgtcgccgctatgttcccgatttaaacgctcgcgtgaaaggcaagcgtgaagccgccgaacgcatggcgttcaacatgcctgtacagggcacggcagctgacctcatgaaacttgcaatggtgcgcctttttccacggttgcgtgaagttggtgcccgcatgctcttgcaggtccacgatgaactcttgttagaagcgccaaaagagcgtgcggaagaggtggcagccctcgcgaaagaagttatggaaggcgtgtggcccttagcggtgcctcttgaagtcgaagttggtattggcgaggattggctggctgccaaagga

SEQ ID NO: 5416 - protein, 841 aa, synthetic construct
  REGION 1..841: note = Variant of DNA polymerase I from Thermus sp. strain 2.9
MHHHHHHGGSGVLPVFEPKGRVLLVDGHHLAYRNFFALKGLTTSLGEPVQGVYGFAKSLLKALKEDGDVVIVVFDAKAPSFRHEAYEAYKAGRAPTPEDFPRQLALMKELVDLLGLERLEVPGFEADDVLATLAKKAEREGYEVQILTADRDLFQLLSPRISVLHPEGHRITPEWLWEKYGLRPEQWVDFRALAGDPSDNIPGVKGIGEKTALKLLKEWGSLENLLKNLDQVKPESVREKILAHLEDLKLSRELSRVRTDLPLEVDFGRRREPDWEGLKAFLERLEFGSLLHEFGLLESPLLAEEAPWPPPEGAFLGYRLSRPEPMWAELLALAASAQGRVYRAEDPHGALRGLFEVRGLLAKDLAVVALREGLDLPPTDDPMLLAYLLDPSNTTPEGVARRYGGEWTEDAAKRALLAERLHENLLGRLQGEERLLWLYEEVEKPLSRVLAHMEATGVKLDVAYLENLSLEVAAHMRRLEEEVFRLAGRSFRLNSRDQLERVLFDELGLPPIGKTEKTGKRSTSAAVLEALREVHPIVDKILQYREMAKLKGTYIDRLPALVHPKTGRLHTRFNQTATATGRLSSSDPNLQNIPVRTPLGQKIRRAFVAEEGWRLVALDYRQIELRVLAHLSGDENLIRVFQEGKDIHTQTASWMFGLSAEAIDPLMRRAAKTINFGVLYGMSAFRLSQELGIPYEEAQAFIQKYFQSYPKVKAWIEKTLREGRTRGYVETLFGRRRYVPDLNARVKGKREAAERMAFNMPVQGTAADLMKLAMVRLFPRLREVGARMLLQVHDELLLEAPKERAEEVAALAKEVMEGVWPLAVPLEVEVGIGEDWLAAKG

SEQ ID NO: 5417 - DNA, 2523 bp, synthetic construct
  misc_feature 1..2523: note = Variant of DNA polymerase I from Thermus sp. strain 2.9
  source 1..2523: mol_type = other DNA
atgcaccatcatcatcatcatggcggtagcggcgtgttaccggtgttcgagcctaaaggtcgcgtgcttctggttgatggccatcatctcgcgtatcgtaacttctttgccctgaaaggattaaccaccagcctgggcgagccggtacagggtgtctacggctttgcaaagtcgctcctgaaagctctgaaagaagacggtgatgtggtgattgttgtctttgatgcgaaagcgccaagttttcgccacgaagcgtacgaagcttacaaagccgggcgtgctccaacgccggaagactttcctcgccaattggcgcttatgaaggaattagtggatttgcttggcctcgaacgcttggaagttcccggtttcgaggcagacgacgtattagcgactctcgcaaagaaagccgaacgtgagggctatgaagtccagatcttgacagcagatcgcgatcttttccagcttttatctccgcgcatctcggtgttacacccggaagggcatcgtatcaccccggaatggctctgggagaaatatggtttgcgtcccgaacaatgggtggattttcgcgccttagcaggcgatccgagcgacaatattccgggagttaaaggtatcggcgagaagacggcgctcaagctccttaaagaatgggggtcgttggagaacttgcttaagaatttagatcaggtcaaaccagagtcagtgcgtgagaagattcttgctcacctcgaagacctcaaattaagccgcgaattgtcccgtgtacgcaccgatttgccgctcgaagttgatttcggtcgccgccgcgaacctgactgggagggtcttaaagcgtttttagagcgtcttgaatttggttcgctcttgcatgaattcggccttttagaaagcccgttactggccgaagaagcaccttggccaccgcccgagggcgcgtttttaggttaccgtttgagtcgcccggaaccgatgtgggccgaattactggctcttgcagcgtctgcccagggacgtgtgtatcgcgcggaagaccctcatggtgcgctccgcggcctcttcgaagtccgtggactccttgccaaagacttagctgttgttgcattgcgcgaaggtcttgatttacctccgactgatgatccaatgcttcttgcgtacctcttggacccgtcaaacacgacgcccgaaggcgtagcccgtcgttacggcggcgagtggaccgaagatgcagcgaaacgcgcgttattggccgaacgtttgcacgaaaatttattaggacgtttgcaaggcgaggaacgtctcctctggctttacgaagaagtggagaaaccattgagtcgcgtgctcgcgcatatggaagctaccggtgtcaaattagacgtggcgtatttggagaatctcagccttgaagttgctgcccacatgcgccgcttggaggaagaagtattccgtttagcaggccgttcctttcgccttaactctcgcgatcagttagaacgtgtgttgttcgatgaacttggtctccctcctatcggcaagacagagaagaccggtaaacgtagcacttcagcggcggttttagaagctcttcgcgaagtccatcccattgtggacaagatcttgcagtaccgcgaaatggcgaaattgaaaggcacctatattgaccgtcttccggcattagtccacccgaaaacgggacgcctccatacccgcttcaaccaaacagccacggcgaccggtcgtttgtcctcctctgatccaaaccttcagaatattccagtacgtaccccattgggccagaagatccgccgtgcgtttgtagctgaggagggttggcgtttagtggccctcgattatcgtcaaattgaattacgtgtccttgcccatctttctggcgatgagaacctcatccgcgtgtttcaggaaggcaaagacattcacactcaaacggcaagctggatgtttggattatcagctgaagcgatcgatcctttgatgcgtcgtgcagcgaagaccatcaatttcggtgttctctacggtatgagtgcctttcgtttgtcgcaggaattaggcattccctatgaagaagctcaggcgttcattcagaaatactttcaaagctatcccaaagttaaagcatggatcgagaagactctccgtgaaggccgcacacgtggttacgtagagaccttatttggacgtcgccgctatgttcccgatttaaacactcgcgtgaaaggcaagcgtgaagccgccgaacgcatggcgttcaacatgcctgtacagggcacggcagctgacctcatgaaacttgcaatggtgcgcctttttccacaattgcgtgaagttggtgcccgcatgctcttgcaggtccacgatgaactcttgttagaagcgccaaaagagcgtgcggaagaggtggcagccctcgcgaaagaagttatggaaggcgtgtggcccttagcggtgcctcttgaagtcgaagttggtattggcgaggattggctggctgccaaagga

SEQ ID NO: 5418 - protein, 841 aa, synthetic construct
  REGION 1..841: note = Variant of DNA polymerase I from Thermus sp. strain 2.9
MHHHHHHGGSGVLPVFEPKGRVLLVDGHHLAYRNFFALKGLTTSLGEPVQGVYGFAKSLLKALKEDGDVVIVVFDAKAPSFRHEAYEAYKAGRAPTPEDFPRQLALMKELVDLLGLERLEVPGFEADDVLATLAKKAEREGYEVQILTADRDLFQLLSPRISVLHPEGHRITPEWLWEKYGLRPEQWVDFRALAGDPSDNIPGVKGIGEKTALKLLKEWGSLENLLKNLDQVKPESVREKILAHLEDLKLSRELSRVRTDLPLEVDFGRRREPDWEGLKAFLERLEFGSLLHEFGLLESPLLAEEAPWPPPEGAFLGYRLSRPEPMWAELLALAASAQGRVYRAEDPHGALRGLFEVRGLLAKDLAVVALREGLDLPPTDDPMLLAYLLDPSNTTPEGVARRYGGEWTEDAAKRALLAERLHENLLGRLQGEERLLWLYEEVEKPLSRVLAHMEATGVKLDVAYLENLSLEVAAHMRRLEEEVFRLAGRSFRLNSRDQLERVLFDELGLPPIGKTEKTGKRSTSAAVLEALREVHPIVDKILQYREMAKLKGTYIDRLPALVHPKTGRLHTRFNQTATATGRLSSSDPNLQNIPVRTPLGQKIRRAFVAEEGWRLVALDYRQIELRVLAHLSGDENLIRVFQEGKDIHTQTASWMFGLSAEAIDPLMRRAAKTINFGVLYGMSAFRLSQELGIPYEEAQAFIQKYFQSYPKVKAWIEKTLREGRTRGYVETLFGRRRYVPDLNTRVKGKREAAERMAFNMPVQGTAADLMKLAMVRLFPQLREVGARMLLQVHDELLLEAPKERAEEVAALAKEVMEGVWPLAVPLEVEVGIGEDWLAAKG

SEQ ID NO: 5419 - DNA, 2523 bp, synthetic construct
  misc_feature 1..2523: note = Variant of DNA polymerase I from Thermus sp. strain 2.9
  source 1..2523: mol_type = other DNA
atgcaccatcatcatcatcatggcggtagcggcgtgttaccggtgttcgagcctaaaggtcgcgtgcttctggttgatggccatcatctcgcgtatcgtaacttctttgccctgaaaggattaaccaccagcctgggcgagccggtacagggtgtctacggctttgcaaagtcgctcctgaaagctctgaaagaagacggtgatgtggtgattgttgtctttgatgcgaaagcgccaagttttcgccacgaagcgtacgaagcttacaaagccgggcgtgctccaacgccggaagactttcctcgccaattggcgcttatgaaggaattagtggatttgcttggcctcgaacgcttggaagttcccggtttcgaggcagacgacgtattagcgactctcgcaaagaaagccgaacgtgagggctatgaagtccagatcttgacagcagatcgcgatcttttccagcttttatctccgcgcatctcggtgttacacccggaagggcatcgtatcaccccggaatggctctgggagaaatatggtttgcgtcccgaacaatgggtggattttcgcgccttagcaggcgatccgagcgacaatattccgggagttaaaggtatcggcgagaagacggcgctcaagctccttaaagaatgggggtcgttggagaacttgcttaagaatttagatcaggtcaaaccagagtcagtgcgtgagaagattcttgctcacctcgaagacctcaaattaagccgcgaattgtcccgtgtacgcaccgatttgccgctcgaagttgatttcggccgccgccgcgaacctgactgggagggtcttaaagcgtttttagagcgtcttgaatttggttcgctcttgcatgaattcggccttttagaaagcccgttactggccgaagaagcaccttggccaccgcccgagggcgcgtttttaggttaccgtttgagtcgcccggaaccgatgtgggccgaattactggctcttgcagcgtctgcccagggacgtgtgtatcgcgcggaagaccctcatggtgcgctccgcggcctcttcgaagtccgtggactccttgccaaagacttagctgttgttgcattgcgcgaaggtcttgatttacctccgactgatgatccaatgcttcttgcgtacctcttggacccgtcaaacacgacgcccgaaggcgtagcccgtcgttacggcggcgagtggaccgaagatgcagcgaaacgcgcgttattggccgaacgtttgcacgaaaatttattaggacgtttgcaaggcgaggaacgtctcctctggctttacgaagaagtggagaaaccattgagtcgcgtgctcgcgcatatggaagctaccggtgtcaaattagacgtggcgtatttggaggcccttagccttgaagttgctgcccacatgcgccgcttggaggaagaagtattccgtttagcaggccgctcctttcgccttaactctcgcgatcagttagaacgtgtgttgttcgatgaacttggtctccctcctatcggcaagacagagaagaccggtaaacgtagcacttcagcggcggttttagaagctcttcgcgaagtccatcccattgtggacaagatcttgcagtaccgcgaaatggcgaaattgaaaggcacctatattgaccgtcttccggcattagtccacccgaaaacgggacgcctccatacccgcttcaaccaaacagccacggcgaccggtcgtttgtcctcctctgatccaaaccttcagaatattccagtacgtaccccattgggccagaagatccgccgtgcgtttgtagctgaggagggttggcgtttagtggccctcgattatcgtcaaattgaattacgtgtccttgcccatctttctggcgatgagaacctcatccgcgtgtttcaggaaggcaaagacattcacactcaaacggcaagctggatgtttggattatcagctgaagcgatcgatcctttgatgcgtcgtgcagcgaagaccatcaatttcggtgttctctacggtatgagtgcctttcgtttgtcgcaggaattaggcattccctatgaagaagctcaggcgttcattcagaaatactttcaaagctatcccaaagttaaagcatggatcgagaagactctccgtgaaggccgcacacgtggttacgtagagaccttatttggacgtcgccgctatgttcccgatttaaacgctcgcgtgaaaggcgtacgtgaagccgccgaacgcatggcgttcaacatgcctgtacagggcacggcagctgacctcatgaaacttgcaatggtgcgcctttttccacaattgcgtgaagttggtgcccgcatgctcttgcaggtccacgatgaactcttgttagaagcgccaaaagagcgtgcggaagaggtggcagccctcgcgaaagaagttatggaaggcgtgtggcccttagcggtgcctcttgaagtcgaagttggtattggcgaggattggctggctgccaaagga

SEQ ID NO: 5420 - protein, 841 aa, synthetic construct
  REGION 1..841: note = Variant of DNA polymerase I from Thermus sp. strain 2.9
MHHHHHHGGSGVLPVFEPKGRVLLVDGHHLAYRNFFALKGLTTSLGEPVQGVYGFAKSLLKALKEDGDVVIVVFDAKAPSFRHEAYEAYKAGRAPTPEDFPRQLALMKELVDLLGLERLEVPGFEADDVLATLAKKAEREGYEVQILTADRDLFQLLSPRISVLHPEGHRITPEWLWEKYGLRPEQWVDFRALAGDPSDNIPGVKGIGEKTALKLLKEWGSLENLLKNLDQVKPESVREKILAHLEDLKLSRELSRVRTDLPLEVDFGRRREPDWEGLKAFLERLEFGSLLHEFGLLESPLLAEEAPWPPPEGAFLGYRLSRPEPMWAELLALAASAQGRVYRAEDPHGALRGLFEVRGLLAKDLAVVALREGLDLPPTDDPMLLAYLLDPSNTTPEGVARRYGGEWTEDAAKRALLAERLHENLLGRLQGEERLLWLYEEVEKPLSRVLAHMEATGVKLDVAYLEALSLEVAAHMRRLEEEVFRLAGRSFRLNSRDQLERVLFDELGLPPIGKTEKTGKRSTSAAVLEALREVHPIVDKILQYREMAKLKGTYIDRLPALVHPKTGRLHTRFNQTATATGRLSSSDPNLQNIPVRTPLGQKIRRAFVAEEGWRLVALDYRQIELRVLAHLSGDENLIRVFQEGKDIHTQTASWMFGLSAEAIDPLMRRAAKTINFGVLYGMSAFRLSQELGIPYEEAQAFIQKYFQSYPKVKAWIEKTLREGRTRGYVETLFGRRRYVPDLNARVKGVREAAERMAFNMPVQGTAADLMKLAMVRLFPQLREVGARMLLQVHDELLLEAPKERAEEVAALAKEVMEGVWPLAVPLEVEVGIGEDWLAAKG

SEQ ID NO: 5421 - DNA, 2523 bp, synthetic construct
  misc_feature 1..2523: note = Variant of DNA polymerase I from Thermus sp. strain 2.9
  source 1..2523: mol_type = other DNA
atgcaccatcatcatcatcatggcggtagcggcgtgttaccggtgttcgagcctaaaggtcgcgtgcttctggttgatggccatcatctcgcgtatcgtaacttctttgccctgaaaggattaaccaccagcctgggcgagccggtacagggtgtctacggctttgcaaagtcgctcctgaaagctctgaaagaagacggtgatgtggtgattgttgtctttgatgcgaaagcgccaagttttcgccacgaagcgtacgaagcttacaaagccgggcgtgctccaacgccggaagactttcctcgccaattggcgcttatgaaggaattagtggatttgcttggcctcgaacgcttggaagttcccggtttcgaggcagacgacgtattagcgactctcgcaaagaaagccgaacgtgagggctatgaagtccagatcttgacagcagatcgcgatcttttccagcttttatctccgcgcatctcggtgttacacccggaagggcatcgtatcaccccggaatggctctgggagaaatatggtttgcgtcccgaacaatgggtggattttcgcgccttagcaggcgatccgagcgacaatattccgggagttaaaggtatcggcgagaagacggcgctcaagctccttaaagaatgggggtcgttggagaacttgcttaagaatttagatcaggtcaaaccagagtcagtgcgtgagaagattcttgctcacctcgaagacctcaaattaagccgcgaattgtcccgtgtacgcaccgatttgccgctcgaagttgatttcggtcgccgccgcgaacctgactgggagggtcttaaagcgtttttagagcgtcttgaatttggttcgctcttgcatgaattcggccttttagaaagcccgttactggccgaagaagcaccttggccaccgcccgagggcgcgtttttaggttaccgtttgagtcgcccggaaccgatgtgggccgaattactggctcttgcagcgtctgcccagggacgtgtgtatcgcgcggaagaccctcatggtgcgctccgcggcctcttcgaagtccgtggcctccttgccaaagacttagctgttgttgcattgcgcgaaggtcttgatttacctccgactgatgatccaatgcttcttgcgtacctcttggacccgtcaaacacgacgcccgaaggcgtagcccgtcgttacggcggcgagtggaccgaagatgcaggcaaacgcgcgttattggccgaacgtttgcacgaaaatttattaggacgtttgcaaggcgaggagcgtctcctgtggctttacgaagaagtggagaaaccattgagtcgcgtgctcgcgcatatggaagctaccggtgtcaaattagacgtggcgtatttggagaatctcagccttgaagttgctgcccacatgcgccgcttggaggaagaagtattccgtttagcaggccgttcctttcgccttaactctcgcgatcagttagaacgtgtgttgttcgatgaacttggtctccctcctatcggcaagacagagaagaccggtaaacgtagcacttcagcggcggttttagaagctcttcgcgaagtccatcccattgtggacaagatcttgcagtaccgcgaaatggcgaaattgaaaggcacctatattgaccgtcttccggcattagtccacccgaaaacgggacgcctccatacccgcttcaaccaaacagccacggcgaccggtcgtttgtcctcctctgatccaaaccttcagaatattccagtacgtacctttttgggccagaagatccgccgtgcgtttgtagctgagccgggttggcgtttagtggccctcgattatcgtcaaattgaattacgtgtccttgcccatctttctggcgatgagaacctcatccgcgtgtttcaggaaggcaaagacattcacactcaaacggcaagctggatgtttggattatcagctgaagcgatcgatcctttgatgcgtcgtgcagcgaagaccatcaatttcggtgttctctacggtatgagtgcctttcgtttgtcgcaggaattaggcattccctatgaagaagctcaggcgttcattcagaaatactttcaaagctatcccaaagttaaagcatggatcgagaagactctccgtgaaggccgcacacgtggttacgtagagaccttatttggacgtcgccgctatgttcccgatttaaactcgcgcgtgaaaggcaagcgtgaagccgccgaacgcatggcgttcaacatgcctgtacagggcacggcagctgacctcatgaaacttgcaatggtgcgcctttttccacaattgcgtgaagttggtgcccgcatgctgttgcaggtccacgatgaactcttgttagaagcgccaaaagagcgtgcggaagaggtggcagccctcgcgaaagaagttatggaaggcgtgtggcccttagcggtgcctcttgaagtcgaagttggtattggcgaggattggctggctgccaaagga

SEQ ID NO: 5422 - protein, 841 aa, synthetic construct
  REGION 1..841: note = Variant of DNA polymerase I from Thermus sp. strain 2.9
MHHHHHHGGSGVLPVFEPKGRVLLVDGHHLAYRNFFALKGLTTSLGEPVQGVYGFAKSLLKALKEDGDVVIVVFDAKAPSFRHEAYEAYKAGRAPTPEDFPRQLALMKELVDLLGLERLEVPGFEADDVLATLAKKAEREGYEVQILTADRDLFQLLSPRISVLHPEGHRITPEWLWEKYGLRPEQWVDFRALAGDPSDNIPGVKGIGEKTALKLLKEWGSLENLLKNLDQVKPESVREKILAHLEDLKLSRELSRVRTDLPLEVDFGRRREPDWEGLKAFLERLEFGSLLHEFGLLESPLLAEEAPWPPPEGAFLGYRLSRPEPMWAELLALAASAQGRVYRAEDPHGALRGLFEVRGLLAKDLAVVALREGLDLPPTDDPMLLAYLLDPSNTTPEGVARRYGGEWTEDAGKRALLAERLHENLLGRLQGEERLLWLYEEVEKPLSRVLAHMEATGVKLDVAYLENLSLEVAAHMRRLEEEVFRLAGRSFRLNSRDQLERVLFDELGLPPIGKTEKTGKRSTSAAVLEALREVHPIVDKILQYREMAKLKGTYIDRLPALVHPKTGRLHTRFNQTATATGRLSSSDPNLQNIPVRTFLGQKIRRAFVAEPGWRLVALDYRQIELRVLAHLSGDENLIRVFQEGKDIHTQTASWMFGLSAEAIDPLMRRAAKTINFGVLYGMSAFRLSQELGIPYEEAQAFIQKYFQSYPKVKAWIEKTLREGRTRGYVETLFGRRRYVPDLNSRVKGKREAAERMAFNMPVQGTAADLMKLAMVRLFPQLREVGARMLLQVHDELLLEAPKERAEEVAALAKEVMEGVWPLAVPLEVEVGIGEDWLAAKG

SEQ ID NO: 5423 - DNA, 2523 bp, synthetic construct
  misc_feature 1..2523: note = Variant of DNA polymerase I from Thermus sp. strain 2.9
  source 1..2523: mol_type = other DNA
atgcaccatcatcatcatcatggcggtagcggcgtgttaccggtgttcgagcctaaaggtcgcgtgcttctggttgatggccatcatctcgcgtatcgtaacttctttgccctgaaaggattaaccaccagcctgggcgagccggtacagggtgtctacggctttgcaaagtcgctcctgaaagctctgaaagaagacggtgatgtggtgattgttgtctttgatgcgaaagcgccaagttttcgccacgaagcgtacgaagcttacaaagccgggcgtgctccaacgccggaagactttcctcgccaattggcgcttatgaaggaattagtggatttgcttggcctcgaacgcttggaagttcccggtttcgaggcagacgacgtattagcgactctcgcaaagaaagccgaacgtgagggctatgaagtccagatcttgacagcagatcgcgatcttttccagcttttatctccgcgcatctcggtgttacacccggaagggcatcgtatcaccccggaatggctctgggagaaatatggtttgcgtcccgaacaatgggtggattttcgcgccttagcaggcgatccgagcgacaatattccgggagttaaaggtatcggcgagaagacggcgctcaagctccttaaagaatgggggtcgttggagaacttgcttaagaatttagatcaggtcaaaccagagtcagtgcgtgagaagattcttgctcacctcgaagacctcaaattaagccgcgaattgtcccgtgtacgcaccgatttgccgctcgaagttgatttcggtcgccgccgcgaacctgactgggagggtcttaaagcgtttttagagcgtcttgaatttggttcgctcttgcatgaattcggccttttagaaagcccgttactggccgaagaagcaccttggccaccgcccgagggcgcgtttttaggttaccgtttgagtcgcccggaaccgatgtgggccgaattactggctcttgcagcgtctgcccagggacgtgtgtatcgcgcggaagaccctcatggtgcgctccgcggcctcttcgaagtccgtggactccttgccaaagacttagctgttgttgcattgcgcgaaggtcttgatttacctccgactgatgatccaatgcttcttgcgtacctcttggacccgtcaaacacgacgcccgaaggcgtagcccgtcgttacggcggcgagtggctggaagatgcagcgaaacgcgcgttattggccgaacgtttgcacgaaaatttattaggacgtttgcaaggcgaggaacgtctcctctggctttacgaagaagtggagaaaccattgagtcgcgtgctcgcgcatatggaagctaccggtgtcaaattagacgtggcgtatttggagaatctcagccttgaagttgctgcccacatgcgccgcttggaggaagaagtattccgtttagcaggccgttcctttcgccttaactctcgcgatcagttagaacgtgtgttgttcgatgaacttggtctccctcctatcggcaagacagagaagaccggtaaacgtagcacttcagcggcggttttagaagctcttcgcgaagtccatcccattgtggacaagatcttgcagtaccgcgaaatggcgaaattgaaaggcacctatattgaccgtcttccggcattagtccacccgaaaacgggacgcctccatacccgcttcaaccaaacagccacggcgaccggtcgtttgtcctcctctgatccaaaccttcagaatattccagtacgtaccccattgggccagaagatccgccgtgcgtttgtagctgaggagggttggcgtttagtggccctcgattatcgtcaaattgaattacgtgtccttgcccatctttctggcgatgagaacctcatccgcgtgtttcaggaaggcaaagacattcacactcaaacggcaagctggatgtttggattatcagctgaagcgatcgatcctttgatgcgtcgtgcagcgaagaccatcaatttcggtgttctctacggtatgagtgcctttcgtttgtcgcaggaattaggcattccctatgaagaagctcaggcgttcattcagaaatactttcaaagctatcccaaagttaaagcatggatcgagaagactctccgtgaaggccgcacacgtggttacgtagagaccttatttggacgtcgccgctatgttcccgatttaaacgctcgcgtgaaaggcaagcgtgaagccgccgaacgcatggcgttcaacatgcctgtacagggcacggcagctgacctcatgaaacttgcaatggtgcgcctttttccacaattgcgtgaagttggtgcccgcatgctcttgcaggtccacgatgaactcttgttagaagcgccaaaagagcgtgcggaagaggtggcagccctcgcgaaagaagttatggaaggcgtgtggcccttagcggtgcctcttgaagtcgaagttggtattggcgaggattggctggctgccaaagga

SEQ ID NO: 5424 - protein, 841 aa, synthetic construct
  REGION 1..841: note = Variant of DNA polymerase I from Thermus sp. strain 2.9
MHHHHHHGGSGVLPVFEPKGRVLLVDGHHLAYRNFFALKGLTTSLGEPVQGVYGFAKSLLKALKEDGDVVIVVFDAKAPSFRHEAYEAYKAGRAPTPEDFPRQLALMKELVDLLGLERLEVPGFEADDVLATLAKKAEREGYEVQILTADRDLFQLLSPRISVLHPEGHRITPEWLWEKYGLRPEQWVDFRALAGDPSDNIPGVKGIGEKTALKLLKEWGSLENLLKNLDQVKPESVREKILAHLEDLKLSRELSRVRTDLPLEVDFGRRREPDWEGLKAFLERLEFGSLLHEFGLLESPLLAEEAPWPPPEGAFLGYRLSRPEPMWAELLALAASAQGRVYRAEDPHGALRGLFEVRGLLAKDLAVVALREGLDLPPTDDPMLLAYLLDPSNTTPEGVARRYGGEWLEDAAKRALLAERLHENLLGRLQGEERLLWLYEEVEKPLSRVLAHMEATGVKLDVAYLENLSLEVAAHMRRLEEEVFRLAGRSFRLNSRDQLERVLFDELGLPPIGKTEKTGKRSTSAAVLEALREVHPIVDKILQYREMAKLKGTYIDRLPALVHPKTGRLHTRFNQTATATGRLSSSDPNLQNIPVRTPLGQKIRRAFVAEEGWRLVALDYRQIELRVLAHLSGDENLIRVFQEGKDIHTQTASWMFGLSAEAIDPLMRRAAKTINFGVLYGMSAFRLSQELGIPYEEAQAFIQKYFQSYPKVKAWIEKTLREGRTRGYVETLFGRRRYVPDLNARVKGKREAAERMAFNMPVQGTAADLMKLAMVRLFPQLREVGARMLLQVHDELLLEAPKERAEEVAALAKEVMEGVWPLAVPLEVEVGIGEDWLAAKG

SEQ ID NO: 5425 - DNA, 2523 bp, synthetic construct
  misc_feature 1..2523: note = Variant of DNA polymerase I from Thermus sp. strain 2.9
  source 1..2523: mol_type = other DNA
atgcaccatcatcatcatcatggcggtagcggcgtgttaccggtgttcgagcctaaaggtcgcgtgcttctggttgatggccatcatctcgcgtatcgtaacttctttgccctgaaaggattaaccaccagcctgggcgagccggtacagggtgtctacggctttgcaaagtcgctcctgaaagctctgaaagaagacggtgatgtggtgattgttgtctttgatgcgaaagcgccaagttttcgccacgaagcgtacgaagcttacaaagccgggcgtgctccaacgccggaagactttcctcgccaattggcgcttatgaaggaattagtggatttgcttggcctcgaacgcttggaagttcccggtttcgaggcagacgacgtattagcgactctcgcaaagaaagccgaacgtgagggctatgaagtccagatcttgacagcagatcgcgatcttttccagcttttatctccgcgcatctcggtgttacacccggaagggcatcgtatcaccccggaatggctctgggagaaatatggtttgcgtcccgaacaatgggtggattttcgcgccttagcaggcgatccgagcgacaatattccgggagttaaaggtatcggcgagaagacggcgctcaagctccttaaagaatgggggtcgttggagaacttgcttaagaatttagatcaggtcaaaccagagtcagtgcgtgagaagattcttgctcacctcgaagacctcaaattaagccgcgaattgtcccgtgtacgcaccgatttgccgctcgaagttgatttcggtcgccgccgcgaacctgactgggagggtcttaaagcgtttttagagcgtcttgaatttggttcgctcttgcatgaattcggccttttagaaagcccgttactggccgaagaagcaccttggccaccgcccgagggcgcgtttttaggttaccgtttgagtcgcccggaaccgatgtgggccgaattactggctcttgcagcgtctgcccagggacgtgtgtatcgcgcggaagaccctcatggtgcgctccgcggcctcttcgaagtccgtggactccttgccaaagacttagctgttgttgcattgcgcgaaggtcttgatttacctccgactgatgatccaatgcttcttgcgtacctcttggacccgtcaaacacgacgcccgaaggcgtagcccgtcgttacggcggcgagtggaccgaagatgcagcgaaacgcgcgttattggccgaacgtttgcacgaaaatttattaggacgtttgcaaggcgaggaacgtctcctctggctttacgaagaagtggagaaaccattgagtcgcgtgctcgcgcatatggaagctaccggtgtcaaattagacgtggcgtatttggagaatctcagccttgaagttgctgcccacatgcgccgcttggaggaagaactgttccgtttagcaggccgttcctttcgccttaactctcgcgatcagttagaacgtgtgttgttcgatgaacttggtctccctcctatcggcaagacagagaagaccggtaaacgtagcacttcagcggcggttttagaagctcttcgcgaagtccatcccattgtggacaagatcttgcagtaccgcgaaatggcgaaattgaaaggcacctatattgaccgtcttccggcattagtccacccgaaaacgggacgcctccatacccgcttcaaccaaacagccacggcgaccggtcgtttgtcctcctctgatccaaaccttcagaatattccagtacgtaccccattgggccagaagatccgccgtgcgtttgtagctgaggagggttggcgtttagtggccctcgattatcgtcaaattgaattacgtgtccttgcccatctttctggcgatgagaacctcatccgcgtgtttcaggaaggcaaagacattcacactcaaacggcaagctggatgtttggattatcagctgaagcgatcgatcctttgatgcgtcgtgcagcgaagaccatcaatttcggtgttctctacggtatgagtgcctttcgtttgtcgcaggaattaggcattccctatgaagaagctcaggcgttcattcagaaatactttcaaagctatcccaaagttaaagcatggatcgagaagactctccgtgaaggccgcacacgtggttacgtagagaccttatttggacgtcgccgctatgttcccgatttaaacgctcgcgtgaaaggcaagcgtgaagccgccgaacgcatggcgttcaacatgcctgtacagggcacggcagctgacctcatgaaacttgcaatggtgcgcctttttccacaattgcgtgaagttggtgcccgcatgctcttgcaggtccacgatgaactcttgttagaagcgccaaaagagcgtgcggaagaggtggcagccctcgcgaaagaagttatggaaggcgtgtggcccttagcggtgcctcttgaagtcgaagttggtattggcgaggattggctggctgccaaagga

SEQ ID NO: 5426 - protein, 841 aa, synthetic construct
  REGION 1..841: note = Variant of DNA polymerase I from Thermus sp. strain 2.9
MHHHHHHGGSGVLPVFEPKGRVLLVDGHHLAYRNFFALKGLTTSLGEPVQGVYGFAKSLLKALKEDGDVVIVVFDAKAPSFRHEAYEAYKAGRAPTPEDFPRQLALMKELVDLLGLERLEVPGFEADDVLATLAKKAEREGYEVQILTADRDLFQLLSPRISVLHPEGHRITPEWLWEKYGLRPEQWVDFRALAGDPSDNIPGVKGIGEKTALKLLKEWGSLENLLKNLDQVKPESVREKILAHLEDLKLSRELSRVRTDLPLEVDFGRRREPDWEGLKAFLERLEFGSLLHEFGLLESPLLAEEAPWPPPEGAFLGYRLSRPEPMWAELLALAASAQGRVYRAEDPHGALRGLFEVRGLLAKDLAVVALREGLDLPPTDDPMLLAYLLDPSNTTPEGVARRYGGEWTEDAAKRALLAERLHENLLGRLQGEERLLWLYEEVEKPLSRVLAHMEATGVKLDVAYLENLSLEVAAHMRRLEEELFRLAGRSFRLNSRDQLERVLFDELGLPPIGKTEKTGKRSTSAAVLEALREVHPIVDKILQYREMAKLKGTYIDRLPALVHPKTGRLHTRFNQTATATGRLSSSDPNLQNIPVRTPLGQKIRRAFVAEEGWRLVALDYRQIELRVLAHLSGDENLIRVFQEGKDIHTQTASWMFGLSAEAIDPLMRRAAKTINFGVLYGMSAFRLSQELGIPYEEAQAFIQKYFQSYPKVKAWIEKTLREGRTRGYVETLFGRRRYVPDLNARVKGKREAAERMAFNMPVQGTAADLMKLAMVRLFPQLREVGARMLLQVHDELLLEAPKERAEEVAALAKEVMEGVWPLAVPLEVEVGIGEDWLAAKG

SEQ ID NO: 5427 - DNA, 2523 bp, synthetic construct
  misc_feature 1..2523: note = Variant of DNA polymerase I from Thermus sp. strain 2.9
  source 1..2523: mol_type = other DNA
atgcaccatcatcatcatcatggcggtagcggcgtgttaccggtgttcgagcctaaaggtcgcgtgcttctggttgatggccatcatctcgcgtatcgtaacttctttgccctgaaaggattaaccaccagcctgggcgagccggtacagggtgtctacggctttgcaaagtcgctcctgaaagctctgaaagaagacggtgatgtggtgattgttgtctttgatgcgaaagcgccaagttttcgccacgaagcgtacgaagcttacaaagccgggcgtgctccaacgccggaagactttcctcgccaattggcgcttatgaaggaattagtggatttgcttggcctcgaacgcttggaagttcccggtttcgaggcagacgacgtattagcgactctcgcaaagaaagccgaacgtgagggctatgaagtccagatcttgacagcagatcgcgatcttttccagcttttatctccgcgcatctcggtgttacacccggaagggcatcgtatcaccccggaatggctctgggagaaatatggtttgcgtcccgaacaatgggtggattttcgcgccttagcaggcgatccgagcgacaatattccgggagttaaaggtatcggcgagaagacggcgctcaagctccttaaagaatgggggtcgttggagaacttgcttaagaatttagatcaggtcaaaccagagtcagtgcgtgagaagattcttgctcacctcgaagacctcaaattaagccgcgaattgtcccgtgtacgcaccgatttgccgctcgaagttgatttcggtcgccgccgcgaacctgactgggagggtcttaaagcgtttttagagcgtcttgaatttggttcgctcttgcatgaattcggccttttagaaagcccgttactggccgaagaagcaccttggccaccgcccgagggcgcgtttttaggttaccgtttgagtcgcccggaaccgatgtgggccgaattactggctcttgcagcgtctgcccagggacgtgtgtatcgcgcggaagaccctcatggtgcgctccgcggcctcttcgaagtccgtggactccttgccaaagacttagctgttgttgcattgcgcgaaggtcttgatttacctccgactgatgatccaatgcttcttgcgtacctcttggacccgtcaaacacgacgcccgaaggcgtagcccgtcgttacggcggcgagtggaccgaagatgcagcgaaacgcgcgttattggccgaacgtttgcacgaaaatttattaggacgtttgcaaggcgaggaacgtctcctctggctttacgaagaagtggagaaaccattgagtcgcgtgctcgcgcatatggaagctaccggtgtcaaattagacgtggcgtatttggagaatctcagccttgaagttgctgcccacatgcgccgcttggaggaagaagtattccgtttagcaggccgttcctttcgccttaactctcgcgatcagttagaacgtgtgttgttcgatgaacttggtctccctcctatcggcaagacagagaagaccggtaaacgtagcacttcagcggcggttttagaagctcttcgcgaagtccatcccattgtggacaagatcttgcagtaccgcgaaatggcgaaattgaaaggcacctatattgaccgtcttccggcattagtccacccgaaaacgggacgcctccatacccgcttcaaccaaacagccacggcgaccggtcgtttgtcctcctctgatccaaaccttcagaatattccagtacgtaccctgttgggccagaagatccgccgtgcgtttgtagctgaggagggttggcgtttagtggccctcgattatcgtcaaattgaattacgtgtccttgcccatctttctggcgatgagaacctcatccgcgtgtttcaggaaggcaaagacattcacactcaaacggcaagctggatgtttggattatcagctgaagcgatcgatcctttgatgcgtcgtgcagcgaagaccatcaatttcggtgttctctacggtatgagtgcctttcgtttgtcgcaggaattaggcattccctatgaagaagctcaggcgttcattcagaaatactttcaaagctatcccaaagttaaagcatggatcgagaagactctccgtgaaggccgcacacgtggttacgtagagaccttatttggacgtcgccgctatgttcccgatttaaacgctcgcgtgaaaggcaagcgtgaagccgccgaacgcatggcgttcaacatgcctgtacagggcacggcagctgacctcatgaaacttgcaatggtgcgcctttttccacaattgcgtgaagttggtgcccgcatgctcttgcaggtccacgatgaactcttgttagaagcgccaaaagagcgtgcggaagaggtggcagccctcgcgaaagaagttatggaaggcgtgtggcccttagcggtgcctcttgaagtcgaagttggtattggcgaggattggctggctgccaaagga

SEQ ID NO: 5428 - protein, 841 aa, synthetic construct
  REGION 1..841: note = Variant of DNA polymerase I from Thermus sp. strain 2.9
MHHHHHHGGSGVLPVFEPKGRVLLVDGHHLAYRNFFALKGLTTSLGEPVQGVYGFAKSLLKALKEDGDVVIVVFDAKAPSFRHEAYEAYKAGRAPTPEDFPRQLALMKELVDLLGLERLEVPGFEADDVLATLAKKAEREGYEVQILTADRDLFQLLSPRISVLHPEGHRITPEWLWEKYGLRPEQWVDFRALAGDPSDNIPGVKGIGEKTALKLLKEWGSLENLLKNLDQVKPESVREKILAHLEDLKLSRELSRVRTDLPLEVDFGRRREPDWEGLKAFLERLEFGSLLHEFGLLESPLLAEEAPWPPPEGAFLGYRLSRPEPMWAELLALAASAQGRVYRAEDPHGALRGLFEVRGLLAKDLAVVALREGLDLPPTDDPMLLAYLLDPSNTTPEGVARRYGGEWTEDAAKRALLAERLHENLLGRLQGEERLLWLYEEVEKPLSRVLAHMEATGVKLDVAYLENLSLEVAAHMRRLEEEVFRLAGRSFRLNSRDQLERVLFDELGLPPIGKTEKTGKRSTSAAVLEALREVHPIVDKILQYREMAKLKGTYIDRLPALVHPKTGRLHTRFNQTATATGRLSSSDPNLQNIPVRTLLGQKIRRAFVAEEGWRLVALDYRQIELRVLAHLSGDENLIRVFQEGKDIHTQTASWMFGLSAEAIDPLMRRAAKTINFGVLYGMSAFRLSQELGIPYEEAQAFIQKYFQSYPKVKAWIEKTLREGRTRGYVETLFGRRRYVPDLNARVKGKREAAERMAFNMPVQGTAADLMKLAMVRLFPQLREVGARMLLQVHDELLLEAPKERAEEVAALAKEVMEGVWPLAVPLEVEVGIGEDWLAAKG

SEQ ID NO: 5429 - DNA, 2523 bp, synthetic construct
  misc_feature 1..2523: note = Variant of DNA polymerase I from Thermus sp. strain 2.9
  source 1..2523: mol_type = other DNA
atgcaccatcatcatcatcatggcggtagcggcgtgttaccggtgttcgagcctaaaggtcgcgtgcttctggttgatggccatcatctcgcgtatcgtaacttctttgccctgaaaggattaaccaccagcctgggcgagccggtacagggtgtctacggctttgcaaagtcgctcctgaaagctctgaaagaagacggtgatgtggtgattgttgtctttgatgcgaaagcgccaagttttcgccacgaagcgtacgaagcttacaaagccgggcgtgctccaacgccggaagactttcctcgccaattggcgcttatgaaggaattagtggatttgcttggcctcgaacgcttggaagttcccggtttcgaggcagacgacgtattagcgactctcgcaaagaaagccgaacgtgagggctatgaagtccagatcttgacagcagatcgcgatcttttccagcttttatctccgcgcatctcggtgttacacccggaagggcatcgtatcaccccggaatggctctgggagaaatatggtttgcgtcccgaacaatgggtggattttcgcgccttagcaggcgatccgagcgacaatattccgggagttaaaggtatcggcgagaagacggcgctcaagctccttaaagaatgggggtcgttggagaacttgcttaagaatttagatcaggtcaaaccagagtcagtgcgtgagaagattcttgctcacctcgaagacctcaaattaagccgcgaattgtcccgtgtacgcaccgatttgccgctcgaagttgatttcggtcgccgccgcgaacctgactgggagggtcttaaagcgtttttagagcgtcttgaatttggttcgctcttgcatgaattcggccttttagaaagcccgttactggccgaagaagcaccttggccaccgcccgagggcgcgtttttaggttaccgtttgagtcgcccggaaccgatgtgggccgaattactggctcttgcagcgtctgcccagggacgtgtgtatcgcgcggaagaccctcatggtgcgctccgcggcctcttcgaagtccgtggactccttgccaaagacttagctgttgttgcattgcgcgaaggtcttgatttacctccgactgatgatccaatgcttcttgcgtacctcttggacccgtcaaacacgacgcccgaaggcgtagcccgtcgttactggggcgagtggaccgaagatgcagcgaaacgcgcgttattggccgaacgtttgcacgaaaatttattaggacgtttgcaaggcgaggaacgtctcctctggctttacgaagaagtggagaaaccattgagtcgcgtgctcgcgcatatggaagctaccggtgtcaaattagacgtggcgtatttggagaatctcagccttgaagttgctgcccacatgcgccgcttggaggaagaagtattccgtttagcaggccgttcctttcgccttaactctcgcgatcagttagaacgtgtgttgttcgatgaacttggtctccctcctatcggcaagacagagaagaccggtaaacgtagcacttcagcggcggttttagaagctcttcgcgaagtccatcccattgtggacaagatcttgcagtaccgcgaaatggcgaaattgaaaggcacctatattgaccgtcttccggcattagtccacccgaaaacgggacgcctccatacccgcttcaaccaaacagccacggcgaccggtcgtttgtcctcctctgatccaaaccttcagaatattccagtacgtaccccattgggccagaagatccgccgtgcgtttgtagctgaggagggttggcgtttagtggccctcgattatcgtcaaattgaattacgtgtccttgcccatctttctggcgatgagaacctcatccgcgtgtttcaggaaggcaaagacattcacactcaaacggcaagctggatgtttggattatcagctgaagcgatcgatcctttgatgcgtcgtgcagcgaagaccatcaatttcggtgttctctacggtatgagtgcctttcgtttgtcgcaggaattaggcattccctatgaagaagctcaggcgttcattcagaaatactttcaaagctatcccaaagttaaagcatggatcgagaagactctccgtgaaggccgcacacgtggttacgtagagaccttatttggacgtcgccgctatgttcccgatttaaacgctcgcgtgaaaggcaagcgtgaagccgccgaacgcatggcgttcaacatgcctgtacagggcacggcagctgacctcatgaaacttgcaatggtgcgcctttttccacaattgcgtgaagttggtgcccgcatgctcttgcaggtccacgatgaactcttgttagaagcgccaaaagagcgtgcggaagaggtggcagccctcgcgaaagaagttatggaaggcgtgtggcccttagcggtgcctcttgaagtcgaagttggtattggcgaggattggctggctgccaaagga

SEQ ID NO: 5430 - protein, 841 aa, synthetic construct
  REGION 1..841: note = Variant of DNA polymerase I from Thermus sp. strain 2.9
MHHHHHHGGSGVLPVFEPKGRVLLVDGHHLAYRNFFALKGLTTSLGEPVQGVYGFAKSLLKALKEDGDVVIVVFDAKAPSFRHEAYEAYKAGRAPTPEDFPRQLALMKELVDLLGLERLEVPGFEADDVLATLAKKAEREGYEVQILTADRDLFQLLSPRISVLHPEGHRITPEWLWEKYGLRPEQWVDFRALAGDPSDNIPGVKGIGEKTALKLLKEWGSLENLLKNLDQVKPESVREKILAHLEDLKLSRELSRVRTDLPLEVDFGRRREPDWEGLKAFLERLEFGSLLHEFGLLESPLLAEEAPWPPPEGAFLGYRLSRPEPMWAELLALAASAQGRVYRAEDPHGALRGLFEVRGLLAKDLAVVALREGLDLPPTDDPMLLAYLLDPSNTTPEGVARRYWGEWTEDAAKRALLAERLHENLLGRLQGEERLLWLYEEVEKPLSRVLAHMEATGVKLDVAYLENLSLEVAAHMRRLEEEVFRLAGRSFRLNSRDQLERVLFDELGLPPIGKTEKTGKRSTSAAVLEALREVHPIVDKILQYREMAKLKGTYIDRLPALVHPKTGRLHTRFNQTATATGRLSSSDPNLQNIPVRTPLGQKIRRAFVAEEGWRLVALDYRQIELRVLAHLSGDENLIRVFQEGKDIHTQTASWMFGLSAEAIDPLMRRAAKTINFGVLYGMSAFRLSQELGIPYEEAQAFIQKYFQSYPKVKAWIEKTLREGRTRGYVETLFGRRRYVPDLNARVKGKREAAERMAFNMPVQGTAADLMKLAMVRLFPQLREVGARMLLQVHDELLLEAPKERAEEVAALAKEVMEGVWPLAVPLEVEVGIGEDWLAAKG

SEQ ID NO: 5431 - DNA, 2523 bp, synthetic construct
  misc_feature 1..2523: note = Variant of DNA polymerase I from Thermus sp. strain 2.9
  source 1..2523: mol_type = other DNA
atgcaccatcatcatcatcatggcggtagcggcgtgttaccggtgttcgagcctaaaggtcgcgtgcttctggttgatggccatcatctcgcgtatcgtaacttctttgccctgaaaggattaaccaccagcctgggcgagccggtacagggtgtctacggctttgcaaagtcgctcctgaaagctctgaaagaagacggtgatgtggtgattgttgtctttgatgcgaaagcgccaagttttcgccacgaagcgtacgaagcttacaaagccgggcgtgctccaacgccggaagactttcctcgccaattggcgcttatgaaggaattagtggatttgcttggcctcgaacgcttggaagttcccggtttcgaggcagacgacgtattagcgactctcgcaaagaaagccgaacgtgagggctatgaagtccagatcttgacagcagatcgcgatcttttccagcttttatctccgcgcatctcggtgttacacccggaagggcatcgtatcaccccggaatggctctgggagaaatatggtttgcgtcccgaacaatgggtggattttcgcgccttagcaggcgatccgagcgacaatattccgggagttaaaggtatcggcgagaagacggcgctcaagctccttaaagaatgggggtcgttggagaacttgcttaagaatttagatcaggtcaaaccagagtcagtgcgtgagaagattcttgctcacctcgaagacctcaaattaagccgcgaattgtcccgtgtacgcaccgatttgccgctcgaagttgatttcggtcgccgccgcgaacctgactgggagggtcttaaagcgtttttagagcgtcttgaatttggttcgctcttgcatgaattcggccttttagaaagcccgttactggccgaagaagcaccttggccaccgcccgagggcgcgtttttaggttaccgtttgagtcgcccggaaccgatgtgggccgaattactggctcttgcagcgtctgcccagggacgtgtgtatcgcgcggaagaccctcatggtgcgctccgcggcctcttcgaagtccgtggactccttgccaaagacttagctgttgttgcattgcgcgaaggtcttgatttacctccgactgatgatccaatgcttcttgcgtacctcttggacccgtcaaacacgacgcccgaaggcgtagcccgtcgttacggcggcgagtggaccgaagatgcagcgaaacgcgcgttattggccgaacgtttgcacgaaaatttattaggacgtttgcaaggcgaggaacgtctcctctggctttacgaagaagtggagaaaccattgagtcgcgtgctcgcgcatatggaagctaccggtgtcaaattagacgtggcgtatttggagaatctcagccttgaagttgctgcccacatgcgccgcttggaggaagaagtattccgtttagcaggccgttcctttcgccttaactctcgcgatcagttagaacgtgtgttgttcgatgaacttggtctccctcctatcggcaagacagagaagaccggtaaacgtagcacttcagcggcggttttagaagctcttcgcgaagtccatcccattgtggacaagatcttgcagtaccgcgaaatggcgaaattgaaaggcacctatattgaccgtcttccggcattagtccacccgaaaacgggacgcctccatacccgcttcaaccaaacagccacggcgaccggtcgtttgtcctcctctgatccaaaccttcagaatattccagtacgtaccccattgggccagaagatccgccgtgcgtttgtagctgagaggggttggcgtttagtggccctcgattatcgtcaaattgaattacgtgtccttgcccatctttctggcgatgagaacctcatccgcgtgtttcaggaaggcaaagacattcacactcaaacggcaagctggatgtttggattatcagctgaagcgatcgatcctttgatgcgtcgtgcagcgaagaccatcaatttcggtgttctctacggtatgagtgcctttcgtttgtcgcaggaattaggcattccctatgaagaagctcaggcgttcattcagaaatactttcaaagctatcccaaagttaaagcatggatcgagaagactctccgtgaaggccgcacacgtggttacgtagagaccttatttggacgtcgccgctatgttcccgatttaaacgctcgcgtgaaaggcaagcgtgaagccgccgaacgcatggcgttcaacatgcctgtacagggcacggcagctgacctcatgaaacttgcaatggtgcgcctttttccacaattgcgtgaagttggtgcccgcatgctcttgcaggtccacgatgaactcttgttagaagcgccaaaagagcgtgcggaagaggtggcagccctcgcgaaagaagttatggaaggcgtgtggcccttagcggtgcctcttgaagtcgaagttggtattggcgaggattggctggctgccaaagga

SEQ ID NO: 5432 - protein, 841 aa, synthetic construct
  REGION 1..841: note = Variant of DNA polymerase I from Thermus sp. strain 2.9
MHHHHHHGGSGVLPVFEPKGRVLLVDGHHLAYRNFFALKGLTTSLGEPVQGVYGFAKSLLKALKEDGDVVIVVFDAKAPSFRHEAYEAYKAGRAPTPEDFPRQLALMKELVDLLGLERLEVPGFEADDVLATLAKKAEREGYEVQILTADRDLFQLLSPRISVLHPEGHRITPEWLWEKYGLRPEQWVDFRALAGDPSDNIPGVKGIGEKTALKLLKEWGSLENLLKNLDQVKPESVREKILAHLEDLKLSRELSRVRTDLPLEVDFGRRREPDWEGLKAFLERLEFGSLLHEFGLLESPLLAEEAPWPPPEGAFLGYRLSRPEPMWAELLALAASAQGRVYRAEDPHGALRGLFEVRGLLAKDLAVVALREGLDLPPTDDPMLLAYLLDPSNTTPEGVARRYGGEWTEDAAKRALLAERLHENLLGRLQGEERLLWLYEEVEKPLSRVLAHMEATGVKLDVAYLENLSLEVAAHMRRLEEEVFRLAGRSFRLNSRDQLERVLFDELGLPPIGKTEKTGKRSTSAAVLEALREVHPIVDKILQYREMAKLKGTYIDRLPALVHPKTGRLHTRFNQTATATGRLSSSDPNLQNIPVRTPLGQKIRRAFVAERGWRLVALDYRQIELRVLAHLSGDENLIRVFQEGKDIHTQTASWMFGLSAEAIDPLMRRAAKTINFGVLYGMSAFRLSQELGIPYEEAQAFIQKYFQSYPKVKAWIEKTLREGRTRGYVETLFGRRRYVPDLNARVKGKREAAERMAFNMPVQGTAADLMKLAMVRLFPQLREVGARMLLQVHDELLLEAPKERAEEVAALAKEVMEGVWPLAVPLEVEVGIGEDWLAAKG

SEQ ID NO: 5433 - DNA, 2523 bp, synthetic construct
  misc_feature 1..2523: note = Variant of DNA polymerase I from Thermus sp. strain 2.9
  source 1..2523: mol_type = other DNA
atgcaccatcatcatcatcatggcggtagcggcgtgttaccggtgttcgagcctaaaggtcgcgtgcttctggttgatggccatcatctcgcgtatcgtaacttctttgccctgaaaggattaaccaccagcctgggcgagccggtacagggtgtctacggctttgcaaagtcgctcctgaaagctctgaaagaagacggtgatgtggtgattgttgtctttgatgcgaaagcgccaagttttcgccacgaagcgtacgaagcttacaaagccgggcgtgctccaacgccggaagactttcctcgccaattggcgcttatgaaggaattagtggatttgcttggcctcgaacgcttggaagttcccggtttcgaggcagacgacgtattagcgactctcgcaaagaaagccgaacgtgagggctatgaagtccagatcttgacagcagatcgcgatcttttccagcttttatctccgcgcatctcggtgttacacccggaagggcatcgtatcaccccggaatggctctgggagaaatatggtttgcgtcccgaacaatgggtggattttcgcgccttagcaggcgatccgagcgacaatattccgggagttaaaggtatcggcgagaagacggcgctcaagctccttaaagaatgggggtcgttggagaacttgcttaagaatttagatcaggtcaaaccagagtcagtgcgtgagaagattcttgctcacctcgaagacctcaaattaagccgcgaattgtcccgtgtacgcaccgatttgccgctcgaagttgatttcggtcgccgccgcgaacctgactgggagggtcttaaagcgtttttagagcgtcttgaatttggttcgctcttgcatgaattcggccttttagaaagcccgttactggccgaagaagcaccttggccaccgcccgagggcgcgtttttaggttaccgtttgagtcgcccggaaccgatgtgggccgaattactggctcttgcagcgtctgcccagggacgtgtgtatcgcgcggaagaccctcatggtgcgctccgcggcctcttcgaagtccgtggactccttgccaaagacttagctgttgttgcattgcgcgaaggtcttgatttacctccgactgatgatccaatgcttcttgcgtacctcttggacccgtcaaacacgacgcccgaaggcgtagcccgtcgttacggcggcgagtggaccgaagatgcagcgaaacgcgcgttattggccgaacgtttgcacgaaaatttattaggacgtttgcaaggcgaggaacgtctcctctggctttacgaagaagtggagaaaccattgagtcgcgtgctcgcgcatatggaagctaccggtgtcaaattagacgtggcgtatttggagaatctcagccttgaagttgctgcccacatgcgccgcttggaggaagaagtattccgtttagcaggccgttcctttcgccttaactctcgcgatcagttagaacgtgtgttgttcgatgaacttggtctccctcctatcggcaagacagagaagaccggtaaacgtagcacttcagcggcggttttagaagctcttcgcgaagtccatcccattgtggacaagatcttgcagtaccgcgaaatggcgaaattgaaaggcacctatattgaccgtcttccggcattagtccacccgaaaacgggacgcctccatacccgcttcaaccaaacagccacggcgaccggtcgtttgtcctcctctgatccaaaccttcagaatattccagtacgtaccccattgggccagaagatccgccgtgcgtttgtagctgaggagggttggcgtttagtggccctcgattatcgtcaaattgaattacgtgtccttgcccatctttctggcgatgagaacctcatccgcgtgtttcaggaaggcaaagacattcacactcaaacggcaagctggatgtttggattatcagctgaagcgatcgatcctttgatgcgtcgtgcagcgaagaccatcaatttcggtgttctctacggtatgagtgcctttcgtttgtcgcaggaattaggcattccctatgaagaagctcaggcgttcattcagaaatactttcaaagctatcccaaagttaaagcatggatcgagaagactctccgtgaaggccgcacacgtggttacgtagagaccttatttggacgtcgccgctatgttccccctttaaacgctcgcgtgaaaggcaagcgtgaagccgccgaacgcatggcgttcaacatgcctgtacagggcacggcagctgacctcatgaaacttgcaatggtgcgcctttttccacaattgcgtgaagttggtgcccgcatgctcttgcaggtccacgatgaactcttgttagaagcgccaaaagagcgtgcggaagaggtggcagccctcgcgaaagaagttatggaaggcgtgtggcccttagcggtgcctcttgaagtcgaagttggtattggcgaggattggctggctgccaaagga

SEQ ID NO: 5434 - protein, 841 aa, synthetic construct
  REGION 1..841: note = Variant of DNA polymerase I from Thermus sp. strain 2.9
MHHHHHHGGSGVLPVFEPKGRVLLVDGHHLAYRNFFALKGLTTSLGEPVQGVYGFAKSLLKALKEDGDVVIVVFDAKAPSFRHEAYEAYKAGRAPTPEDFPRQLALMKELVDLLGLERLEVPGFEADDVLATLAKKAEREGYEVQILTADRDLFQLLSPRISVLHPEGHRITPEWLWEKYGLRPEQWVDFRALAGDPSDNIPGVKGIGEKTALKLLKEWGSLENLLKNLDQVKPESVREKILAHLEDLKLSRELSRVRTDLPLEVDFGRRREPDWEGLKAFLERLEFGSLLHEFGLLESPLLAEEAPWPPPEGAFLGYRLSRPEPMWAELLALAASAQGRVYRAEDPHGALRGLFEVRGLLAKDLAVVALREGLDLPPTDDPMLLAYLLDPSNTTPEGVARRYGGEWTEDAAKRALLAERLHENLLGRLQGEERLLWLYEEVEKPLSRVLAHMEATGVKLDVAYLENLSLEVAAHMRRLEEEVFRLAGRSFRLNSRDQLERVLFDELGLPPIGKTEKTGKRSTSAAVLEALREVHPIVDKILQYREMAKLKGTYIDRLPALVHPKTGRLHTRFNQTATATGRLSSSDPNLQNIPVRTPLGQKIRRAFVAEEGWRLVALDYRQIELRVLAHLSGDENLIRVFQEGKDIHTQTASWMFGLSAEAIDPLMRRAAKTINFGVLYGMSAFRLSQELGIPYEEAQAFIQKYFQSYPKVKAWIEKTLREGRTRGYVETLFGRRRYVPPLNARVKGKREAAERMAFNMPVQGTAADLMKLAMVRLFPQLREVGARMLLQVHDELLLEAPKERAEEVAALAKEVMEGVWPLAVPLEVEVGIGEDWLAAKG

SEQ ID NO: 5435 - DNA, 2523 bp, synthetic construct
  misc_feature 1..2523: note = Variant of DNA polymerase I from Thermus sp. strain 2.9
  source 1..2523: mol_type = other DNA
atgcaccatcatcatcatcatggcggtagcggcgtgttaccggtgttcgagcctaaaggtcgcgtgcttctggttgatggccatcatctcgcgtatcgtaacttctttgccctgaaaggattaaccaccagcctgggcgagccggtacagggtgtctacggctttgcaaagtcgctcctgaaagctctgaaagaagacggtgatgtggtgattgttgtctttgatgcgaaagcgccaagttttcgccacgaagcgtacgaagcttacaaagccgggcgtgctccaacgccggaagactttcctcgccaattggcgcttatgaaggaattagtggatttgcttggcctcgaacgcttggaagttcccggtttcgaggcagacgacgtattagcgactctcgcaaagaaagccgaacgtgagggctatgaagtccagatcttgacagcagatcgcgatcttttccagcttttatctccgcgcatctcggtgttacacccggaagggcatcgtatcaccccggaatggctctgggagaaatatggtttgcgtcccgaacaatgggtggattttcgcgccttagcaggcgatccgagcgacaatattccgggagttaaaggtatcggcgagaagacggcgctcaagctccttaaagaatgggggtcgttggagaacttgcttaagaatttagatcaggtcaaaccagagtcagtgcgtgagaagattcttgctcacctcgaagacctcaaattaagccgcgaattgtcccgtgtacgcaccgatttgccgctcgaagttgatttcggtcgccgccgcgaacctgactgggagggtcttaaagcgtttttagagcgtcttgaatttggttcgctcttgcatgaattcggccttttagaaagcccgttactggccgaagaagcaccttggccaccgcccgagggcgcgtttttaggttaccgtttgagtcgcccggaaccgatgtgggccgaattactggctcttgcagcgtctgcccagggacgtgtgtatcgcgcggaagaccctcatggtgcgctccgcggcctcttcgaagtccgtaccctccttgccaaagacttagctgttgttgcattgcgcgaaggtcttgatttacctccgactgatgatccaatgcttcttgcgtacctcttggacccgtcaaacacgacgcccgaaggcgtagcccgtcgttacggcggcgagtggaccgaagatgcagccaaacgcgcgttattggccgaacgtttgcacgaaaatttattaggacgtttgcaaggcgaggagcgtctccgttggctttacgaagaagtggagaaaccattgagtcgcgtgctcgcgcatatggaagctaccggtgtcaaattagacgtggcgtatttggagaatctcagccttgaagttgctgcccacatgcgccgcttggaggaagaagtattccgtttagcaggccgttcctttcgccttaactctcgcgatcagttagaacgtgtgttgttcgatgaacttggtctccctcctatcggcaagacagagaagaccggtaaacgtagcacttcagcggcggttttagaagctcttcgcgaagtccatcccattgtggacaagatcttgcagtaccgcgaaatggcgaaattgaaaggcacctatattgaccgtcttccggcattagtccacccgaaaacgggacgcctccatacccgcttcaaccaaacagccacggcgaccggtcgtttgtcctcctctgatccaaaccttcagaatattccagtacgtaccccattgggccagaagatccgccgtgcgtttgtagctgagccgggttggcgtttagtggccctcgattatcgtcaaattgaattacgtgtccttgcccatctttctggcgatgagaacctcatccgcgtgtttcaggaaggcaaagacattcacactcaaacggcaagctggatgtttggattatcagctgaagcgatcgatcctttgatgcgtcgtgcagcgaagaccatcaatttcggtgttctctacggtatgagtgcctttcgtttgtcgcaggaattaggcattccctatgaagaagctcaggcgttcattcagaaatactttcaaggctatcccaaagttaaagcatggatcgagaagactctccgtgaaggccgcacacgtggttacgtagagaccttatttggacgtcgccgctatgttcccgatttaaacggtcgcgtgaaaggcaagcgtgaagccgccgaacgcatggcgttcaacatgcctgtacagggcacggcagctgacctcatgaaacttgcaatggtgcgcctttttccacaattgcgtgaagttggtgcccgcatgctgttgcaggtccacgatgaactcttgttagaagcgccaaaagagcgtgcggaagaggtggcagccctcgcgaaagaagttatggaaggcgtgtggcccttagcggtgcctcttgaagtcgaagttggtattggcgaggattggctggctgccaaagga

SEQ ID NO: 5436 - protein, 841 aa, synthetic construct
  REGION 1..841: note = Variant of DNA polymerase I from Thermus sp. strain 2.9
MHHHHHHGGSGVLPVFEPKGRVLLVDGHHLAYRNFFALKGLTTSLGEPVQGVYGFAKSLLKALKEDGDVVIVVFDAKAPSFRHEAYEAYKAGRAPTPEDFPRQLALMKELVDLLGLERLEVPGFEADDVLATLAKKAEREGYEVQILTADRDLFQLLSPRISVLHPEGHRITPEWLWEKYGLRPEQWVDFRALAGDPSDNIPGVKGIGEKTALKLLKEWGSLENLLKNLDQVKPESVREKILAHLEDLKLSRELSRVRTDLPLEVDFGRRREPDWEGLKAFLERLEFGSLLHEFGLLESPLLAEEAPWPPPEGAFLGYRLSRPEPMWAELLALAASAQGRVYRAEDPHGALRGLFEVRTLLAKDLAVVALREGLDLPPTDDPMLLAYLLDPSNTTPEGVARRYGGEWTEDAAKRALLAERLHENLLGRLQGEERLRWLYEEVEKPLSRVLAHMEATGVKLDVAYLENLSLEVAAHMRRLEEEVFRLAGRSFRLNSRDQLERVLFDELGLPPIGKTEKTGKRSTSAAVLEALREVHPIVDKILQYREMAKLKGTYIDRLPALVHPKTGRLHTRFNQTATATGRLSSSDPNLQNIPVRTPLGQKIRRAFVAEPGWRLVALDYRQIELRVLAHLSGDENLIRVFQEGKDIHTQTASWMFGLSAEAIDPLMRRAAKTINFGVLYGMSAFRLSQELGIPYEEAQAFIQKYFQGYPKVKAWIEKTLREGRTRGYVETLFGRRRYVPDLNGRVKGKREAAERMAFNMPVQGTAADLMKLAMVRLFPQLREVGARMLLQVHDELLLEAPKERAEEVAALAKEVMEGVWPLAVPLEVEVGIGEDWLAAKG

SEQ ID NO: 5437 - DNA, 2523 bp, synthetic construct
  misc_feature 1..2523: note = Variant of DNA polymerase I from Thermus sp. strain 2.9
  source 1..2523: mol_type = other DNA
atgcaccatcatcatcatcatggcggtagcggcgtgttaccggtgttcgagcctaaaggtcgcgtgcttctggttgatggccatcatctcgcgtatcgtaacttctttgccctgaaaggattaaccaccagcctgggcgagccggtacagggtgtctacggctttgcaaagtcgctcctgaaagctctgaaagaagacggtgatgtggtgattgttgtctttgatgcgaaagcgccaagttttcgccacgaagcgtacgaagcttacaaagccgggcgtgctccaacgccggaagactttcctcgccaattggcgcttatgaaggaattagtggatttgcttggcctcgaacgcttggaagttcccggtttcgaggcagacgacgtattagcgactctcgcaaagaaagccgaacgtgagggctatgaagtccagatcttgacagcagatcgcgatcttttccagcttttatctccgcgcatctcggtgttacacccggaagggcatcgtatcaccccggaatggctctgggagaaatatggtttgcgtcccgaacaatgggtggattttcgcgccttagcaggcgatccgagcgacaatattccgggagttaaaggtatcggcgagaagacggcgctcaagctccttaaagaatgggggtcgttggagaacttgcttaagaatttagatcaggtcaaaccagagtcagtgcgtgagaagattcttgctcacctcgaagacctcaaattaagccgcgaattgtcccgtgtacgcaccgatttgccgctcgaagttgatttcggtcgccgccgcgaacctgactgggagggtcttaaagcgtttttagagcgtcttgaatttggttcgctcttgcatgaattcggccttttagaaagcccgttactggccgaagaagcaccttggccaccgcccgagggcgcgtttttaggttaccgtttgagtcgcccggaaccgatgtgggccgaattactggctcttgcagcgtctgcccagggacgtgtgtatcgcgcggaagaccctcatggtgcgctccgcggcctcttcgaagtccgtggactccttgccaaagacttagctgttgttgcattgcgcgaaggtcttgatttacctccgactgatgatccaatgcttcttgcgtacctcttggacccgtcaaacacgacgcccgaaggcgtagcccgtcgttacggcggcgagtggaccgaagatgcagcgaaacgcgcgttattggccgaacgtttgcacgaaaatttattaggacgtttgcaaggcgaggaacgtctcctctggctttacgaagaagtggagaaaccattgagtcgcgtgctcgcgcatatggaagctaccggtgtcaaattagacgtggcgtatttggagaatctcagccttgaagttgctgcccacatgcgccgcttggaggaagaagtattccgtttagcaggccgttcctttcgccttaactctcgcgatcagttagaacgtgtgttgttcgatgaacttggtctccctcctatcggcaagacagagaagaccggtaaacgtagcacttcagcggcggttttagaagctcttcgcgaagtccatcccattgtggacaagatcttgcagtaccgcgaaatggcgaaattgaaaggcacctatattgaccgtcttccggcattagtccacccgaaaacgggacgcctccatacccgcttcaaccaaacagccacggcgaccggtcgtttgtcctcctctgatccaaaccttcagaatattccagtacgtaccccattgggccagaagatccgccgtgcgtttgtagctgaggagggttggcgtttagtggccctcgattatcgtcaaattgaattacgtgtccttgcccatctttctggcgatgagaacctcatccgcgtgtttcaggaaggcaaagacattcacactcaaacggcaagctggatgtttggattatcagctgaagcgatcgatcctttgatgcgtcgtgcagcgaagaccatcaatttcggtgttctctacggtatgagtgcctttcgtttgtcgcaggaattaggcattccctatgaagaagctcaggcgttcattcagaaatactttcaaagctatcccaaagttaaagcatggatcgagaagactctccgtgaaggccgcacacgtggttacgtagagaccttatttggacgtcgccgctatgttcccgatttaaacgctcgcgtgaaaggcaagcgtgaagccgccgaacgcatggcgttcaacatgcctgtacagggcacggcagctgacctcatgaaacttgcaatggtgcgcctttttccacaattgcgtgaagttagggcccgcatgctcttgcaggtccacgatgaactcttgttagaagcgccaaaagagcgtgcggaagaggtggtagccctcgcgaaagaagttatggaaggcgtgtggcccttagcggtgcctcttgaagtcgaagttggtattggcgaggattggctggctgccaaagga

SEQ ID NO: 5438 - protein, 841 aa, synthetic construct
  REGION 1..841: note = Variant of DNA polymerase I from Thermus sp. strain 2.9
MHHHHHHGGSGVLPVFEPKGRVLLVDGHHLAYRNFFALKGLTTSLGEPVQGVYGFAKSLLKALKEDGDVVIVVFDAKAPSFRHEAYEAYKAGRAPTPEDFPRQLALMKELVDLLGLERLEVPGFEADDVLATLAKKAEREGYEVQILTADRDLFQLLSPRISVLHPEGHRITPEWLWEKYGLRPEQWVDFRALAGDPSDNIPGVKGIGEKTALKLLKEWGSLENLLKNLDQVKPESVREKILAHLEDLKLSRELSRVRTDLPLEVDFGRRREPDWEGLKAFLERLEFGSLLHEFGLLESPLLAEEAPWPPPEGAFLGYRLSRPEPMWAELLALAASAQGRVYRAEDPHGALRGLFEVRGLLAKDLAVVALREGLDLPPTDDPMLLAYLLDPSNTTPEGVARRYGGEWTEDAAKRALLAERLHENLLGRLQGEERLLWLYEEVEKPLSRVLAHMEATGVKLDVAYLENLSLEVAAHMRRLEEEVFRLAGRSFRLNSRDQLERVLFDELGLPPIGKTEKTGKRSTSAAVLEALREVHPIVDKILQYREMAKLKGTYIDRLPALVHPKTGRLHTRFNQTATATGRLSSSDPNLQNIPVRTPLGQKIRRAFVAEEGWRLVALDYRQIELRVLAHLSGDENLIRVFQEGKDIHTQTASWMFGLSAEAIDPLMRRAAKTINFGVLYGMSAFRLSQELGIPYEEAQAFIQKYFQSYPKVKAWIEKTLREGRTRGYVETLFGRRRYVPDLNARVKGKREAAERMAFNMPVQGTAADLMKLAMVRLFPQLREVRARMLLQVHDELLLEAPKERAEEVVALAKEVMEGVWPLAVPLEVEVGIGEDWLAAKG

SEQ ID NO: 5439 - DNA, 2523 bp, synthetic construct
  misc_feature 1..2523: note = Variant of DNA polymerase I from Thermus sp. strain 2.9
  source 1..2523: mol_type = other DNA
atgcaccatcatcatcatcatggcggtagcggcgtgttaccggtgttcgagcctaaaggtcgcgtgcttctggttgatggccatcatctcgcgtatcgtaacttctttgccctgaaaggattaaccaccagcctgggcgagccggtacagggtgtctacggctttgcaaagtcgctcctgaaagctctgaaagaagacggtgatgtggtgattgttgtctttgatgcgaaagcgccaagttttcgccacgaagcgtacgaagcttacaaagccgggcgtgctccaacgccggaagactttcctcgccaattggcgcttatgaaggaattagtggatttgcttggcctcgaacgcttggaagttcccggtttcgaggcagacgacgtattagcgactctcgcaaagaaagccgaacgtgagggctatgaagtccagatcttgacagcagatcgcgatcttttccagcttttatctccgcgcatctcggtgttacacccggaagggcatcgtatcaccccggaatggctctgggagaaatatggtttgcgtcccgaacaatgggtggattttcgcgccttagcaggcgatccgagcgacaatattccgggagttaaaggtatcggcgagaagacggcgctcaagctccttaaagaatgggggtcgttggagaacttgcttaagaatttagatcaggtcaaaccagagtcagtgcgtgagaagattcttgctcacctcgaagacctcaaattaagccgcgaattgtcccgtgtacgcaccgatttgccgctcgaagttgatttcggtcgccgccgcgaacctgactgggagggtcttaaagcgtttttagagcgtcttgaatttggttcgctcttgcatgaattcggccttttagaaagcccgttactggccgaagaagcaccttggccaccgcccgagggcgcgtttttaggttaccgtttgagtcgcccggaaccgatgtgggccgaattactggctcttgcagcgtctgcccagggacgtgtgtatcgcgcggaagaccctcatggtgcgctccgcggcctcttcgaagtccgtggactccttgccaaagacttagctgttgttgcattgcgcgaaggtcttgatttacctccgactgatgatccaatgcttcttgcgtacctcttggacccgtcaaacacgacgcccgaaggcgtagcccgtcgttacggcggcgagtggaccgaagatgcagcgaaacgcgcgttattggccgaacgtttgcacgaaaatttattaggacgtttgcaaggcgaggaacgtctcctctggctttacgaagaagtggagaaaccattgagtcgcgtgctcgcgcatatggaagctaccggtgtcaaattagacgtggcgtatttggagaatctcagccttgaagttgctgcccacatgcgccgcttggaggaagaagtattccgtttagcaggccgttcctttcgccttaactctcgcgatcagttagaacgtgtgttgttcgatgaacttggtctccctcctatcggcaagacagagaagaccggtaaacgtagcacttcagcggcggttttagaagctcttcgcgaagtccatcccattgtgggtaagatcttgcagtaccgcgaaatggcgaaattgaaaggcacctatattgaccgtcttccggcattagtccacccgaaaacgggacgcctccatacccgcttcaaccaaacagccacggcgaccggtcgtttgtcctcctctgatccaaaccttcagaatattccagtacgtaccccattgggccagaagatccgccgtgcgtttgtagctgaggagggttggcgtttagtggccctcgattatcgtcaaattgaattacgtgtccttgcccatctttctggcgatgagaacctcatccgcgtgtttcaggaaggcaaagacattcacactcaaacggcaagctggatgtttggattatcagctgaagcgatcgatcctttgatgcgtcgtgcagcgaagaccatcaatttcggtgttctctacggtatgagtgcctttcgtttgtcgcaggaattaggcattccctatgaagaagctcaggcgttcattcagaaatactttcaaagctatcccaaagttaaagcatggatcgagaagactctccgtgaaggccgcacacgtggttacgtagagaccttatttggacgtcgccgctatgttcccgatttaaacgctcgcgtgaaaggcaagcgtgaagccgccgaacgcatggcgttcaacatgcctgtacagggcacggcagctgacctcatgaaacttgcaatggtgcgcctttttccacaattgcgtgaagttggtgcccgcatgctcttgcaggtccacgatgaactcttgttagaagcgccaaaagagcgtgcggaagaggtggcagccctcgcgaaagaagttatggaaggcgtgtggcccttagcggtgcctcttgaagtcgaagttggtattggcgaggattggctggctgccaaagga

SEQ ID NO: 5440 - protein, 841 aa, synthetic construct
  REGION 1..841: note = Variant of DNA polymerase I from Thermus sp. strain 2.9
MHHHHHHGGSGVLPVFEPKGRVLLVDGHHLAYRNFFALKGLTTSLGEPVQGVYGFAKSLLKALKEDGDVVIVVFDAKAPSFRHEAYEAYKAGRAPTPEDFPRQLALMKELVDLLGLERLEVPGFEADDVLATLAKKAEREGYEVQILTADRDLFQLLSPRISVLHPEGHRITPEWLWEKYGLRPEQWVDFRALAGDPSDNIPGVKGIGEKTALKLLKEWGSLENLLKNLDQVKPESVREKILAHLEDLKLSRELSRVRTDLPLEVDFGRRREPDWEGLKAFLERLEFGSLLHEFGLLESPLLAEEAPWPPPEGAFLGYRLSRPEPMWAELLALAASAQGRVYRAEDPHGALRGLFEVRGLLAKDLAVVALREGLDLPPTDDPMLLAYLLDPSNTTPEGVARRYGGEWTEDAAKRALLAERLHENLLGRLQGEERLLWLYEEVEKPLSRVLAHMEATGVKLDVAYLENLSLEVAAHMRRLEEEVFRLAGRSFRLNSRDQLERVLFDELGLPPIGKTEKTGKRSTSAAVLEALREVHPIVGKILQYREMAKLKGTYIDRLPALVHPKTGRLHTRFNQTATATGRLSSSDPNLQNIPVRTPLGQKIRRAFVAEEGWRLVALDYRQIELRVLAHLSGDENLIRVFQEGKDIHTQTASWMFGLSAEAIDPLMRRAAKTINFGVLYGMSAFRLSQELGIPYEEAQAFIQKYFQSYPKVKAWIEKTLREGRTRGYVETLFGRRRYVPDLNARVKGKREAAERMAFNMPVQGTAADLMKLAMVRLFPQLREVGARMLLQVHDELLLEAPKERAEEVAALAKEVMEGVWPLAVPLEVEVGIGEDWLAAKG

SEQ ID NO: 5441 - DNA, 2523 bp, synthetic construct
  misc_feature 1..2523: note = Variant of DNA polymerase I from Thermus sp. strain 2.9
  source 1..2523: mol_type = other DNA
atgcaccatcatcatcatcatggcggtagcggcgtgttaccggtgttcgagcctaaaggtcgcgtgcttctggttgatggccatcatctcgcgtatcgtaacttctttgccctgaaaggattaaccaccagcctgggcgagccggtacagggtgtctacggctttgcaaagtcgctcctgaaagctctgaaagaagacggtgatgtggtgattgttgtctttgatgcgaaagcgccaagttttcgccacgaagcgtacgaagcttacaaagccgggcgtgctccaacgccggaagactttcctcgccaattggcgcttatgaaggaattagtggatttgcttggcctcgaacgcttggaagttcccggtttcgaggcagacgacgtattagcgactctcgcaaagaaagccgaacgtgagggctatgaagtccagatcttgacagcagatcgcgatcttttccagcttttatctccgcgcatctcggtgttacacccggaagggcatcgtatcaccccggaatggctctgggagaaatatggtttgcgtcccgaacaatgggtggattttcgcgccttagcaggcgatccgagcgacaatattccgggagttaaaggtatcggcgagaagacggcgctcaagctccttaaagaatgggggtcgttggagaacttgcttaagaatttagatcaggtcaaaccagagtcagtgcgtgagaagattcttgctcacctcgaagacctcaaattaagccgcgaattgtcccgtgtacgcaccgatttgccgctcgaagttgatttcggtcgccgccgcgaacctgactgggagggtcttaaagcgtttttagagcgtcttgaatttggttcgctcttgcatgaattcggccttttagaaagcccgttactggccgaagaagcaccttggccaccgcccgagggcgcgtttttaggttaccgtttgagtcgcccggaaccgatgtgggccgaattactggctcttgcagcgtctgcccagggacgtgtgtatcgcgcggaagaccctcatggtgcgctccgcggcctcttcgaagtccgtggactccttgccaaagacttagctgttgttgcattgcgcgaaggtcttgatttacctccgactgatgatccaatgcttcttgcgtacctcttggacccgtcaaacacgacgcccgaaggcgtagcccgtcgttacggcggcgagtggaccgaagatgcagcgaaacgcgcgttattggccgaacgtttgcacgaaaatttattaggacgtttgcaaggcgaggaacgtctcctctggctttacgaagaagtggagaaaccattgagtcgcgtgctcgcgcatatggaagctaccggtgtcaaattagacgtggcgtatttggagaatctcagccttgaagttgctgcccacatgcgccgcttggaggaagaagtattccgtttagcaggccgttcctttcgccttaactctcgcgatcagttagaacgtgtgttgttcgatgaacttggtctccctcctatcggcaagacagagaagaccggtaaacgtagcacttcagcggcggttttagaagctcttcgcgaagtccatcccattgtggacaagatcttgcagtaccgcgaaatggcgaaattgaaaggcacctatattgaccgtcttccggcattagtccacccgaaaacgggacgcctccatacccgcttcaaccaaacagccacggcgaccggtcgtttgtcctcctctgatccaaaccttcagaatattccagtacgtaccccattgggccagaagatccgccgtgcgtttgtagctgaggagggttggcgtttagtggccctcgattatcgtcaaattgaattacgtgtccttgcccatctttctggcgatgagaacctcatccgcgtgtttcaggaaggcaaagacattcacactcaaacggcaagctggatgtttggattatcagctgaagcgatcgatcctttgatgcgtcgtgcagcgaagaccatcaatttcggtgttctctacggtatgagtgcctttcgtttgtcgtgggaattaggcattccctatgaagaagctcaggcgttcattcagaaatactttcaaagctatcccaaagttaaagcatggatcgagaagactctccgtgaaggccgcacacgtggttacgtagagaccttatttggacgtcgccgctatgttcccgatttaaacgctcgcgtgaaaggcaagcgtgaagccgccgaacgcatggcgttcaacatgcctgtacagggcacggcagctgacctcatgaaacttgcaatggtgcgcctttttccacaattgcgtgaagttggtgcccgcatgctcttgcaggtccacgatgaactcttgttagaagcgccaaaagagcgtgcggaagaggtggcagccctcgcgaaagaagttatggaaggcgtgtggcccttagcggtgcctcttgaagtcgaagttggtattggcgaggattggctggctgccaaagga

SEQ ID NO: 5442 - protein, 841 aa, synthetic construct
  REGION 1..841: note = Variant of DNA polymerase I from Thermus sp. strain 2.9
MHHHHHHGGSGVLPVFEPKGRVLLVDGHHLAYRNFFALKGLTTSLGEPVQGVYGFAKSLLKALKEDGDVVIVVFDAKAPSFRHEAYEAYKAGRAPTPEDFPRQLALMKELVDLLGLERLEVPGFEADDVLATLAKKAEREGYEVQILTADRDLFQLLSPRISVLHPEGHRITPEWLWEKYGLRPEQWVDFRALAGDPSDNIPGVKGIGEKTALKLLKEWGSLENLLKNLDQVKPESVREKILAHLEDLKLSRELSRVRTDLPLEVDFGRRREPDWEGLKAFLERLEFGSLLHEFGLLESPLLAEEAPWPPPEGAFLGYRLSRPEPMWAELLALAASAQGRVYRAEDPHGALRGLFEVRGLLAKDLAVVALREGLDLPPTDDPMLLAYLLDPSNTTPEGVARRYGGEWTEDAAKRALLAERLHENLLGRLQGEERLLWLYEEVEKPLSRVLAHMEATGVKLDVAYLENLSLEVAAHMRRLEEEVFRLAGRSFRLNSRDQLERVLFDELGLPPIGKTEKTGKRSTSAAVLEALREVHPIVDKILQYREMAKLKGTYIDRLPALVHPKTGRLHTRFNQTATATGRLSSSDPNLQNIPVRTPLGQKIRRAFVAEEGWRLVALDYRQIELRVLAHLSGDENLIRVFQEGKDIHTQTASWMFGLSAEAIDPLMRRAAKTINFGVLYGMSAFRLSWELGIPYEEAQAFIQKYFQSYPKVKAWIEKTLREGRTRGYVETLFGRRRYVPDLNARVKGKREAAERMAFNMPVQGTAADLMKLAMVRLFPQLREVGARMLLQVHDELLLEAPKERAEEVAALAKEVMEGVWPLAVPLEVEVGIGEDWLAAKG

SEQ ID NO: 5443 - DNA, 2523 bp, synthetic construct
  misc_feature 1..2523: note = Variant of DNA polymerase I from Thermus sp. strain 2.9
  source 1..2523: mol_type = other DNA
atgcaccatcatcatcatcatggcggtagcggcgtgttaccggtgttcgagcctaaaggtcgcgtgcttctggttgatggccatcatctcgcgtatcgtaacttctttgccctgaaaggattaaccaccagcctgggcgagccggtacagggtgtctacggctttgcaaagtcgctcctgaaagctctgaaagaagacggtgatgtggtgattgttgtctttgatgcgaaagcgccaagttttcgccacgaagcgtacgaagcttacaaagccgggcgtgctccaacgccggaagactttcctcgccaattggcgcttatgaaggaattagtggatttgcttggcctcgaacgcttggaagttcccggtttcgaggcagacgacgtattagcgactctcgcaaagaaagccgaacgtgagggctatgaagtccagatcttgacagcagatcgcgatcttttccagcttttatctccgcgcatctcggtgttacacccggaagggcatcgtatcaccccggaatggctctgggagaaatatggtttgcgtcccgaacaatgggtggattttcgcgccttagcaggcgatccgagcgacaatattccgggagttaaaggtatcggcgagaagacggcgctcaagctccttaaagaatgggggtcgttggagaacttgcttaagaatttagatcaggtcaaaccagagtcagtgcgtgagaagattcttgctcacctcgaagacctcaaattaagccgcgaattgtcccgtgtacgcaccgatttgccgctcgaagttgatttcggtcgccgccgcgaacctgactgggagggtcttaaagcgtttttagagcgtcttgaatttggttcgctcttgcatgaattcggccttttagaaagcccgttactggccgaagaagcaccttggccaccgcccgagggcgcgtttttaggttaccgtttgagtcgcccggaaccgatgtgggccgaattactggctcttgcagcgtctgcccagggacgtgtgtatcgcgcggaagaccctcatggtgcgctccgcggcctcttcgaagtccgtggactccttgccaaagacttagctgttgttgcattgcgcgaaggtcttgatttacctccgactgatgatccaatgcttcttgcgtacctcttggacccgtcaaacacgacgcccgaaggcgtagcccgtcgttacggcggcgagtggaccgaagatgcagcgaaacgcgcgttattggccgaacgtttgcacgaaaatttattaggacgtttgcaaggcgaggaacgtctcctctggctttacgaagaagtggagaaaccattgagtcgcgtgctcgcgcatatggaagctaccggtgtcaaattagacgtggcgtatttggagaatctcagccttgaagttgctgcccacatgcgccgcttggaggaagaagtattccgtttagcaggccgttcctttcgccttaactctcgcgatcagttagaacgtgtgttgttcgatgaacttggtctccctcctatcggcaagacagagaagaccggtaaacgtagcacttcagcggcggttttagaagctcttcgcgaagtccatcccattgtggacaagatcttgcagtaccgcgaaatggcggttttgaaaggcacctatattgaccgtcttccggcattagtccacccgaaaacgggacgcctccatacccgcttcaaccaaacagccacggcgaccggtcgtttgtcctcctctgatccaaaccttcagaatattccagtacgtaccccattgggccagaagatccgccgtgcgtttgtagctgaggagggttggcgtttagtggccctcgattatcgtcaaattgaattacgtgtccttgcccatctttctggcgatgagaacctcatccgcgtgtttcaggaaggcaaagacattcacactcaaacggcaagctggatgtttggattatcagctgaagcgatcgatcctttgatgcgtcgtgcagcgaagaccatcaatttcggtgttctctacggtatgagtgcctttcgtttgtcgcaggaattaggcattccctatgaagaagctcaggcgttcattcagaaatactttcaaagctatcccaaagttaaagcatggatcgagaagactctccgtgaaggccgcacacgtggttacgtagagaccttatttggacgtcgccgctatgttcccgatttaaacgctcgcgtgaaaggcaagcgtgaagccgccgaacgcatggcgttcaacatgcctgtacagggcacggcagctgacctcatgaaacttgcaatggtgcgcctttttccacaattgcgtgaagttggtgcccgcatgctcttgcaggtccacgatgaactcttgttagaagcgccaaaagagcgtgcggaagaggtggcagccctcgcgaaagaagttatggaaggcgtgtggcccttagcggtgcctcttgaagtcgaagttggtattggcgaggattggctggctgccaaagga

SEQ ID NO: 5444 - protein, 841 aa, synthetic construct
  REGION 1..841: note = Variant of DNA polymerase I from Thermus sp. strain 2.9
MHHHHHHGGSGVLPVFEPKGRVLLVDGHHLAYRNFFALKGLTTSLGEPVQGVYGFAKSLLKALKEDGDVVIVVFDAKAPSFRHEAYEAYKAGRAPTPEDFPRQLALMKELVDLLGLERLEVPGFEADDVLATLAKKAEREGYEVQILTADRDLFQLLSPRISVLHPEGHRITPEWLWEKYGLRPEQWVDFRALAGDPSDNIPGVKGIGEKTALKLLKEWGSLENLLKNLDQVKPESVREKILAHLEDLKLSRELSRVRTDLPLEVDFGRRREPDWEGLKAFLERLEFGSLLHEFGLLESPLLAEEAPWPPPEGAFLGYRLSRPEPMWAELLALAASAQGRVYRAEDPHGALRGLFEVRGLLAKDLAVVALREGLDLPPTDDPMLLAYLLDPSNTTPEGVARRYGGEWTEDAAKRALLAERLHENLLGRLQGEERLLWLYEEVEKPLSRVLAHMEATGVKLDVAYLENLSLEVAAHMRRLEEEVFRLAGRSFRLNSRDQLERVLFDELGLPPIGKTEKTGKRSTSAAVLEALREVHPIVDKILQYREMAVLKGTYIDRLPALVHPKTGRLHTRFNQTATATGRLSSSDPNLQNIPVRTPLGQKIRRAFVAEEGWRLVALDYRQIELRVLAHLSGDENLIRVFQEGKDIHTQTASWMFGLSAEAIDPLMRRAAKTINFGVLYGMSAFRLSQELGIPYEEAQAFIQKYFQSYPKVKAWIEKTLREGRTRGYVETLFGRRRYVPDLNARVKGKREAAERMAFNMPVQGTAADLMKLAMVRLFPQLREVGARMLLQVHDELLLEAPKERAEEVAALAKEVMEGVWPLAVPLEVEVGIGEDWLAAKG

SEQ ID NO: 5445 - DNA, 2523 bp, synthetic construct
  misc_feature 1..2523: note = Variant of DNA polymerase I from Thermus sp. strain 2.9
  source 1..2523: mol_type = other DNA
atgcaccatcatcatcatcatggcggtagcggcgtgttaccggtgttcgagcctaaaggtcgcgtgcttctggttgatggccatcatctcgcgtatcgtaacttctttgccctgaaaggattaaccaccagcctgggcgagccggtacagggtgtctacggctttgcaaagtcgctcctgaaagctctgaaagaagacggtgatgtggtgattgttgtctttgatgcgaaagcgccaagttttcgccacgaagcgtacgaagcttacaaagccgggcgtgctccaacgccggaagactttcctcgccaattggcgcttatgaaggaattagtggatttgcttggcctcgaacgcttggaagttcccggtttcgaggcagacgacgtattagcgactctcgcaaagaaagccgaacgtgagggctatgaagtccagatcttgacagcagatcgcgatcttttccagcttttatctccgcgcatctcggtgttacacccggaagggcatcgtatcaccccggaatggctctgggagaaatatggtttgcgtcccgaacaatgggtggattttcgcgccttagcaggcgatccgagcgacaatattccgggagttaaaggtatcggcgagaagacggcgctcaagctccttaaagaatgggggtcgttggagaacttgcttaagaatttagatcaggtcaaaccagagtcagtgcgtgagaagattcttgctcacctcgaagacctcaaattaagccgcgaattgtcccgtgtacgcaccgatttgccgctcgaagttgatttcggtcgccgccgcgaacctgactgggagggtcttaaagcgtttttagagcgtcttgaatttggttcgctcttgcatgaattcggccttttagaaagcccgttactggccgaagaagcaccttggccaccgcccgagggcgcgtttttaggttaccgtttgagtcgcccggaaccgatgtgggccgaattactggctcttgcagcgtctgcccagggacgtgtgtatcgcgcggaagaccctcatggtgcgctccgcggcctcttcgaagtccgtggactccttgccaaagacttagctgttgttgcattgcgcgaaggtcttgatttacctccgactgatgatccaatgcttcttgcgtacctcttggacccgtcaaacacgacgcccgaaggcgtagcccgtcgttacggcggcgagtggaccgaagatgcagcgaaacgcgcgttattggccgaacgtttgcacgaaaatttattaggacgtttgcaaggcgaggaacgtctcctctggctttacgaagaagtggagaaaccattgagtcgcgtgctcgcgcatatggaagctaccggtgtcaaattagacgtggcgtatttggagaatctcagccttgaagttgctgcccacatgcgccgcttggaggaagaagtattccgtttagcaggccgttcctttcgccttaactctcgcgatcagttagaacgtgtgttgttcgatgaacttggtctccctcctatcggcaagacagagaagaccggtaaacgtagcacttcagcggcggttttagaagctcttcgcgaagtccatcccattgtggacaagatcttgcagtaccgcgaaatggcgaaattgaaaggcacctatattgaccgtcttccggcattagtccacccgaaaacgggacgcctccatacccgcttcaaccaaacagccacggcgaccggtcgtttgtcctcctctgatccaaaccttcagaatattccagtacgtaccccattgggccagaagatccgccgtgcgtttgtagctgaggagggttggcgtttagtggccctcgattatcgtcaaattgaattacgtgtccttgcccatctttctggcgatgagaacctcatccgcgtgtttcaggaaggcaaagacattcacactcaaacggcaagctggatgtttggattatcagctgaagcgatcgatcctttgatgcgtcgtgcagcgaagaccatcaatttcggtgttctctacggtatgagtgcctttcgtttgtcgcaggaattaggcattccccgggaagaagctcaggcgttcattcagaaatactttcaaagctatcccaaagttaaagcatggatcgagaagactctccgtgaaggccgcacacgtggttacgtagagaccttatttggacgtcgccgctatgttcccgatttaaacgctcgcgtgaaaggcaagcgtgaagccgccgaacgcatggcgttcaacatgcctgtacagggcacggcagctgacctcatgaaacttgcaatggtgcgcctttttccacaattgcgtgaagttggtgcccgcatgctcttgcaggtccacgatgaactcttgttagaagcgccaaaagagcgtgcggaagaggtggcagccctcgcgaaagaagttatggaaggcgtgtggcccttagcggtgcctcttgaagtcgaagttggtattggcgaggattggctggctgccaaagga

SEQ ID NO: 5446 - protein, 841 aa, synthetic construct
  REGION 1..841: note = Variant of DNA polymerase I from Thermus sp. strain 2.9
MHHHHHHGGSGVLPVFEPKGRVLLVDGHHLAYRNFFALKGLTTSLGEPVQGVYGFAKSLLKALKEDGDVVIVVFDAKAPSFRHEAYEAYKAGRAPTPEDFPRQLALMKELVDLLGLERLEVPGFEADDVLATLAKKAEREGYEVQILTADRDLFQLLSPRISVLHPEGHRITPEWLWEKYGLRPEQWVDFRALAGDPSDNIPGVKGIGEKTALKLLKEWGSLENLLKNLDQVKPESVREKILAHLEDLKLSRELSRVRTDLPLEVDFGRRREPDWEGLKAFLERLEFGSLLHEFGLLESPLLAEEAPWPPPEGAFLGYRLSRPEPMWAELLALAASAQGRVYRAEDPHGALRGLFEVRGLLAKDLAVVALREGLDLPPTDDPMLLAYLLDPSNTTPEGVARRYGGEWTEDAAKRALLAERLHENLLGRLQGEERLLWLYEEVEKPLSRVLAHMEATGVKLDVAYLENLSLEVAAHMRRLEEEVFRLAGRSFRLNSRDQLERVLFDELGLPPIGKTEKTGKRSTSAAVLEALREVHPIVDKILQYREMAKLKGTYIDRLPALVHPKTGRLHTRFNQTATATGRLSSSDPNLQNIPVRTPLGQKIRRAFVAEEGWRLVALDYRQIELRVLAHLSGDENLIRVFQEGKDIHTQTASWMFGLSAEAIDPLMRRAAKTINFGVLYGMSAFRLSQELGIPREEAQAFIQKYFQSYPKVKAWIEKTLREGRTRGYVETLFGRRRYVPDLNARVKGKREAAERMAFNMPVQGTAADLMKLAMVRLFPQLREVGARMLLQVHDELLLEAPKERAEEVAALAKEVMEGVWPLAVPLEVEVGIGEDWLAAKG

SEQ ID NO: 5447 - DNA, 2523 bp, synthetic construct
  misc_feature 1..2523: note = Variant of DNA polymerase I from Thermus sp. strain 2.9
  source 1..2523: mol_type = other DNA
atgcaccatcatcatcatcatggcggtagcggcgtgttaccggtgttcgagcctaaaggtcgcgtgcttctggttgatggccatcatctcgcgtatcgtaacttctttgccctgaaaggattaaccaccagccgcggcgagccggtacagggtgtctacggctttgcaaagtcgctcctgaaagctctgaaagaagacggtgatgtggtgattgttgtctttgatgcgaaagcgccaagttttcgccacgaagcgtacgaagcttacaaagccgggcgtgctccaacgccggaagactttcctcgccaattggcgcttatgaaggaattagtggatttgcttggcctcgaacgcttggaagttcccggtttcgaggcagacgacgtattagcgactctcgcaaagaaagccgaacgtgagggctatgaagtccagatcttgacagcagatcgcgatcttttccagcttttatctccgcgcatctcggtgttacacccggaagggcatcgtatcaccccggaatggctctgggagaaatatggtttgcgtcccgaacaatgggtggattttcgcgccttagcaggcgatccgagcgacaatattccgggagttaaaggtatcggcgagaagacggcgctcaagctccttaaagaatgggggtcgttggagaacttgcttaagaatttagatcaggtcaaaccagagtcagtgcgtgagaagattcttgctcacctcgaagacctcaaattaagccgcgaattgtcccgtgtacgcaccgatttgccgctcgaagttgatttcggccgccgccgcgaacctgactgggagggtcttaaagcgtttttagagcgtcttgaatttggttcgctcttgcatgaattcggccttttagaaagcccgttactggccgaagaagcaccttggccaccgcccgagggcgcgtttttaggttaccgtttgagtcgcccggaaccgatgtgggccgaattactggctcttgcagcgtctgcccagggacgtgtgtatcgcgcggaagaccctcatggtgcgctccgcggcctcttcgaagtccgtggactccttgccaaagacttagctgttgttgcattgcgcgaaggtcttgatttacctccgactgatgatccaatgcttcttgcgtacctcttggacccgtcaaacacgacgcccgaaggcgtagcccgtcgttacggcggcgagtggaccgaagatgcagcgaaacgcgcgttattggccgaacgtttgcacgaaaatttattaggacgtttgcaaggcgaggaacgtctcctctggctttacgaagaagtggagaaaccattgagtcgcgtgctcgcgcatatggaagctaccggtgtcaaattagacgtggcgtatttggagaatcttcaccttgaagttgctgcccacatgcgccgcttggaggaagaagtattccgtttagcaggccgttcctttcgccttaactctcgcgatcagttagaacgtgtgttgttcgatgaacttggtctccctcctatcggcaagacagagaagaccggtaaacgtagcacttcagcggcggttttagaagctcttcgcgaagtccatcccattgtggacaagatcttgcagtaccgcgaaatggcgaaattgaaaggcacctatattgaccgtcttccggcattagtccacccgaaaacgggacgcctccatacccgcttcaaccaaacagccacggcgaccggtcgtttgtccagttctgatccaaaccttcagaatattccagtacgtaccccattgggccagaagatccgccgtgcgtttgtagctgaggagggttggcgtttagtggccctcgattatcgtcaaattgaattacgtgtccttgcccatctttctggcgatgagaacctcatccgcgtgtttcaggaaggcaaagacattcacactcaaacggcaagctggatgtttggattatcagctgaagcgatcgatcctttgatgcgtcgtgcagcgaagaccatcaatttcggtgttctctacggtatgagtgcctttcgtttgtcgcaggaattaggcattccctatgaagaagctcaggcgttcattcagaaatactttcaaagctatcccaaagttaaagcatggatcgagaagactctcgaggaaggccgcacacgtggttacgtagagaccttatttggacgtcgccgctatgttcccgatttaaacgctcgcgtgaaaggcaagcgtgaagccgccgaacgcatggcgttcaacatgcctgtacagggcacggcagctgacctcatgaaacttgcaatggtgcgcctttttccacaattgcgtgaagttggtgcccgcatgctcttgcaggtccacgatgaactcttgttagaagcgccaaaagagcgtgcggaagaggtggcagccctcgcgaaagaagttatggaaggcgtgtggcccttagcggtgcctcttgaagtcgaagttggtattggcgaggattggctggctgccaaagga

SEQ ID NO: 5448 - protein, 841 aa, synthetic construct
  REGION 1..841: note = Variant of DNA polymerase I from Thermus sp. strain 2.9
MHHHHHHGGSGVLPVFEPKGRVLLVDGHHLAYRNFFALKGLTTSRGEPVQGVYGFAKSLLKALKEDGDVVIVVFDAKAPSFRHEAYEAYKAGRAPTPEDFPRQLALMKELVDLLGLERLEVPGFEADDVLATLAKKAEREGYEVQILTADRDLFQLLSPRISVLHPEGHRITPEWLWEKYGLRPEQWVDFRALAGDPSDNIPGVKGIGEKTALKLLKEWGSLENLLKNLDQVKPESVREKILAHLEDLKLSRELSRVRTDLPLEVDFGRRREPDWEGLKAFLERLEFGSLLHEFGLLESPLLAEEAPWPPPEGAFLGYRLSRPEPMWAELLALAASAQGRVYRAEDPHGALRGLFEVRGLLAKDLAVVALREGLDLPPTDDPMLLAYLLDPSNTTPEGVARRYGGEWTEDAAKRALLAERLHENLLGRLQGEERLLWLYEEVEKPLSRVLAHMEATGVKLDVAYLENLHLEVAAHMRRLEEEVFRLAGRSFRLNSRDQLERVLFDELGLPPIGKTEKTGKRSTSAAVLEALREVHPIVDKILQYREMAKLKGTYIDRLPALVHPKTGRLHTRFNQTATATGRLSSSDPNLQNIPVRTPLGQKIRRAFVAEEGWRLVALDYRQIELRVLAHLSGDENLIRVFQEGKDIHTQTASWMFGLSAEAIDPLMRRAAKTINFGVLYGMSAFRLSQELGIPYEEAQAFIQKYFQSYPKVKAWIEKTLEEGRTRGYVETLFGRRRYVPDLNARVKGKREAAERMAFNMPVQGTAADLMKLAMVRLFPQLREVGARMLLQVHDELLLEAPKERAEEVAALAKEVMEGVWPLAVPLEVEVGIGEDWLAAKG

SEQ ID NO: 5449 - DNA, 2523 bp, synthetic construct
  misc_feature 1..2523: note = Variant of DNA polymerase I from Thermus sp. strain 2.9
  source 1..2523: mol_type = other DNA
atgcaccatcatcatcatcatggcggtagcggcgtgttaccggtgttcgagcctaaaggtcgcgtgcttctggttgatggccatcatctcgcgtatcgtaacttctttgccctgaaaggattaaccaccagcctgggcgagccggtacagggtgtctacggctttgcaaagtcgctcctgaaagctctgaaagaagacggtgatgtggtgattgttgtctttgatgcgaaagcgccaagttttcgccacgaagcgtacgaagcttacaaagccgggcgtgctccaacgccggaagactttcctcgccaattggcgcttatgaaggaattagtggatttgcttggcctcgaacgcttggaagttcccggtttcgaggcagacgacgtattagcgactctcgcaaagaaagccgaacgtgagggctatgaagtccagatcttgacagcagatcgcgatcttttccagcttttatctccgcgcatctcggtgttacacccggaagggcatcgtatcaccccggaatggctctgggagaaatatggtttgcgtcccgaacaatgggtggattttcgcgccttagcaggcgatccgagcgacaatattccgggagttaaaggtatcggcgagaagacggcgctcaagctccttaaagaatgggggtcgttggagaacttgcttaagaatttagatcaggtcaaaccagagtcagtgcgtgagaagattcttgctcacctcgaagacctcaaattaagccgcgaattgtcccgtgtacgcaccgatttgccgctcgaagttgatttcggtcgccgccgcgaacctgactgggagggtcttaaagcgtttttagagcgtcttgaatttggttcgctcttgcatgaattcggccttttagaaagcccgttactggccgaagaagcaccttggccaccgcccgagggcgcgtttttaggttaccgtttgagtcgcccggaaccgatgtgggccgaattactggctcttgcagcgtctgcccagggacgtgtgtatcgcgcggaagaccctcatggtgcgctccgcggcctcttcgaagtccgtaccctccttgccaaagacttagctgttgttgcattgcgcgaaggtcttgatttacctccgactgatgatccaatgcttcttgcgtacctcttggacccgtcaaacacgacgcccgaaggcgtagcccgtcgttacggcggcgagtggaccgaagatgcagccaaacgcgcgttattggccgaacgtttgcacgaaaatttattaggacgtttgcaaggcgaggaacgtctcctctggctttacgaagaagtggagaaaccattgagtcgcgtgctcgcgcatatggaagctaccggtgtcaaattagacgtggcgtatttggagaatctcagccttgaagttgctgcccacatgcgccgcttggaggaagaagtattccgtttagcaggccgttcctttcgccttaactctcgcgatcagttagaacgtgtgttgttcgatgaacttggtctccctcctatcggcaagacagagaagaccggtaaacgtagcacttcagcggcggttttagaagctcttcgcgaagtccatcccattgtggacaagatcttgcagtaccgcgaaatggcgaaattgaaaggcacctatattgaccgtcttccggcattagtccacccgaaaacgggacgcctccatacccgcttcaaccaaacagccacggcgaccggtcgtttgtcctcctctgatccaaaccttcagaatattccagtacgtacctttttgggccagaagatccgccgtgcgtttgtagctgagccgggttgggcgttagtggccctcgattatcgtcaaattgaattacgtgtccttgcccatctttctggcgatgagaacctcatccgcgtgtttcaggaaggcaaagacattcacactcaaacggcaagctggatgtttggattatcagctgaagcgatcgatcctttgatgcgtcgtgcagcgaagaccatcaatttcggtgttctctacggtatgagtgcctttcgtttgtcgcaggaattaggcattccctatgaagaagctcaggcgttcattcagaaatactttcaaagctatcccaaagttaaagcatggatcgagaagactctccgtgaaggccgcacacgtggttacgtagagaccttatttggacgtcgccgctatgttcccgatttaaactcgcgcgtgaaaggcaagcgtgaagccgccgaacgcatggcgttcaacatgcctgtacagggcacggcagctgacctcatgaaacttgcaatggtgcgcctttttccacaattgcgtgaagttggtgcccgcatgctgttgcaggtccacgatgaactcttgttagaagcgccaaaagagcgtgcggaagaggtggcagccctcgcgaaagaagttatggaaggcgtgtggcccttagcggtgcctcttgaagtcgaagttggtattggcgaggattggctggctgccaaagga

SEQ ID NO: 5450 - protein, 841 aa, synthetic construct
  REGION 1..841: note = Variant of DNA polymerase I from Thermus sp. strain 2.9
MHHHHHHGGSGVLPVFEPKGRVLLVDGHHLAYRNFFALKGLTTSLGEPVQGVYGFAKSLLKALKEDGDVVIVVFDAKAPSFRHEAYEAYKAGRAPTPEDFPRQLALMKELVDLLGLERLEVPGFEADDVLATLAKKAEREGYEVQILTADRDLFQLLSPRISVLHPEGHRITPEWLWEKYGLRPEQWVDFRALAGDPSDNIPGVKGIGEKTALKLLKEWGSLENLLKNLDQVKPESVREKILAHLEDLKLSRELSRVRTDLPLEVDFGRRREPDWEGLKAFLERLEFGSLLHEFGLLESPLLAEEAPWPPPEGAFLGYRLSRPEPMWAELLALAASAQGRVYRAEDPHGALRGLFEVRTLLAKDLAVVALREGLDLPPTDDPMLLAYLLDPSNTTPEGVARRYGGEWTEDAAKRALLAERLHENLLGRLQGEERLLWLYEEVEKPLSRVLAHMEATGVKLDVAYLENLSLEVAAHMRRLEEEVFRLAGRSFRLNSRDQLERVLFDELGLPPIGKTEKTGKRSTSAAVLEALREVHPIVDKILQYREMAKLKGTYIDRLPALVHPKTGRLHTRFNQTATATGRLSSSDPNLQNIPVRTFLGQKIRRAFVAEPGWALVALDYRQIELRVLAHLSGDENLIRVFQEGKDIHTQTASWMFGLSAEAIDPLMRRAAKTINFGVLYGMSAFRLSQELGIPYEEAQAFIQKYFQSYPKVKAWIEKTLREGRTRGYVETLFGRRRYVPDLNSRVKGKREAAERMAFNMPVQGTAADLMKLAMVRLFPQLREVGARMLLQVHDELLLEAPKERAEEVAALAKEVMEGVWPLAVPLEVEVGIGEDWLAAKG

SEQ ID NO: 5451 - DNA, 2523 bp, synthetic construct
  misc_feature 1..2523: note = Variant of DNA polymerase I from Thermus sp. strain 2.9
  source 1..2523: mol_type = other DNA
atgcaccatcatcatcatcatggcggtagcggcgtgttaccggtgttcgagcctaaaggtcgcgtgcttctggttgatggccatcatctcgcgtatcgtaacttctttgccctgaaaggattaaccaccagcctgggcgagccggtacagggtgtctacggctttgcaaagtcgctcctgaaagctctgaaagaagacggtgatgtggtgattgttgtctttgatgcgaaagcgccaagttttcgccacgaagcgtacgaagcttacaaagccgggcgtgctccaacgccggaagactttcctcgccaattggcgcttatgaaggaattagtggatttgcttggcctcgaacgcttggaagttcccggtttcgaggcagacgacgtattagcgactctcgcaaagaaagccgaacgtgagggctatgaagtccagatcttgacagcagatcgcgatcttttccagcttttatctccgcgcatctcggtgttacacccggaagggcatcgtatcaccccggaatggctctgggagaaatatggtttgcgtcccgaacaatgggtggattttcgcgccttagcaggcgatccgagcgacaatattccgggagttaaaggtatcggcgagaagacggcgctcaagctccttaaagaatgggggtcgttggagaacttgcttaagaatttagatcaggtcaaaccagagtcagtgcgtgagaagattcttgctcacctcgaagacctcaaattaagccgcgaattgtcccgtgtacgcaccgatttgccgctcgaagttgatttcggtcgccgccgcgaacctgactgggagggtcttaaagcgtttttagagcgtcttgaatttggttcgctcttgcatgaattcggccttttagaaagcccgttactggccgaagaagcaccttggccaccgcccgagggcgcgtttttaggttaccgtttgagtatgccggaaccgatgtgggccgaattactggctcttgcagcgtctgcccagggacgtgtgtatcgcgcggaagaccctcatggtgcgctccgcggcctcttcgaagtccgtggactccttgccaaagacttagctgttgttgcattgcgcgaaggtcttgatttacctccgactgatgatccaatgcttcttgcgtacctcttggacccgtcaaacacgacgcccgaaggcgtagcccgtcgttacggcggcgagtggaccgaagatgcagcgaaacgcgcgttattggccgaacgtttgcacgaaaatttattaggacgtttgcaaggcgaggaacgtctcctctggctttacgaagaagtggagaaaccattgagtcgcgtgctcgcgcatatggaagctaccggtgtcaaattagacgtggcgtatttggagaatctcagccttgaagttgctgcccacatgcgccgcttggaggaagaagtattccgtttagcaggccgttcctttcgccttaactctcgcgatcagttagaacgtgtgttgttcgatgaacttggtctccctcctatcggcaagacagagaagaccggtaaacgtagcacttcagcggcggttttagaagctcttcgcgaagtccatcccattgtggacaagatcttgcagtaccgcgaaatggcgaaattgaaaggcacctatattgaccgtcttccggcattagtccacccgaaaacgggacgcctccatacccgcttcaaccaaacagccacggcgaccggtcgtttgtcctcctctgatccaaaccttcagaatattccagtacgtaccccattgggccagaagatccgccgtgcgtttgtagctgaggagggttggcgtttagtggccctcgattatcgtcaaattgaattacgtgtccttgcccatctttctggcgatgagaacctcatccgcgtgtttcaggaaggcaaagacattcacactcaaacggcaagctggatgtttggattatcagctgaagcgatcgatcctttgatgcgtcgtgcagcgaagaccatcaatttcggtgttctctacggtatgagtgcctttcgtttgtcgcaggaattaggcattccctatgaagaagctcaggcgttcattcagaaatactttcaaagctatcccaaagttaaagcatggatcgagaagactctccgtgaaggccgcacacgtggttacgtagagaccttatttggacgtcgccgctatgttcccgatttaaacgctcgcgtgaaaggcaagcgtgaagccgccgaacgcatggcgttcaacatgcctgtacagggcacggcagctgacctcatgaaacttgcaatggtgcgcctttttccacaattgcgtgaagttggtgcccgcatgctcttgcaggtccacgatgaactcttgttagaagcgccaaaagagcgtgcggaagaggtggcagccctcgcgaaagaagttatggaaggcgtgtggcccttagcggtgcctcttgaagtcgaagttggtattggcgaggattggctggctgccaaagga

SEQ ID NO: 5452 - protein, 841 aa, synthetic construct
  REGION 1..841: note = Variant of DNA polymerase I from Thermus sp. strain 2.9
MHHHHHHGGSGVLPVFEPKGRVLLVDGHHLAYRNFFALKGLTTSLGEPVQGVYGFAKSLLKALKEDGDVVIVVFDAKAPSFRHEAYEAYKAGRAPTPEDFPRQLALMKELVDLLGLERLEVPGFEADDVLATLAKKAEREGYEVQILTADRDLFQLLSPRISVLHPEGHRITPEWLWEKYGLRPEQWVDFRALAGDPSDNIPGVKGIGEKTALKLLKEWGSLENLLKNLDQVKPESVREKILAHLEDLKLSRELSRVRTDLPLEVDFGRRREPDWEGLKAFLERLEFGSLLHEFGLLESPLLAEEAPWPPPEGAFLGYRLSMPEPMWAELLALAASAQGRVYRAEDPHGALRGLFEVRGLLAKDLAVVALREGLDLPPTDDPMLLAYLLDPSNTTPEGVARRYGGEWTEDAAKRALLAERLHENLLGRLQGEERLLWLYEEVEKPLSRVLAHMEATGVKLDVAYLENLSLEVAAHMRRLEEEVFRLAGRSFRLNSRDQLERVLFDELGLPPIGKTEKTGKRSTSAAVLEALREVHPIVDKILQYREMAKLKGTYIDRLPALVHPKTGRLHTRFNQTATATGRLSSSDPNLQNIPVRTPLGQKIRRAFVAEEGWRLVALDYRQIELRVLAHLSGDENLIRVFQEGKDIHTQTASWMFGLSAEAIDPLMRRAAKTINFGVLYGMSAFRLSQELGIPYEEAQAFIQKYFQSYPKVKAWIEKTLREGRTRGYVETLFGRRRYVPDLNARVKGKREAAERMAFNMPVQGTAADLMKLAMVRLFPQLREVGARMLLQVHDELLLEAPKERAEEVAALAKEVMEGVWPLAVPLEVEVGIGEDWLAAKG

SEQ ID NO: 5453 - DNA, 2523 bp, synthetic construct
  misc_feature 1..2523: note = Variant of DNA polymerase I from Thermus sp. strain 2.9
  source 1..2523: mol_type = other DNA
atgcaccatcatcatcatcatggcggtagcggcgtgttaccggtgttcgagcctaaaggtcgcgtgcttctggttgatggccatcatctcgcgtatcgtaacttctttgccctgaaaggattaaccaccagcctgggcgagccggtacagggtgtctacggctttgcaaagtcgctcctgaaagctctgaaagaagacggtgatgtggtgattgttgtctttgatgcgaaagcgccaagttttcgccacgaagcgtacgaagcttacaaagccgggcgtgctccaacgccggaagactttcctcgccaattggcgcttatgaaggaattagtggatttgcttggcctcgaacgcttggaagttcccggtttcgaggcagacgacgtattagcgactctcgcaaagaaagccgaacgtgagggctatgaagtccagatcttgacagcagatcgcgatcttttccagcttttatctccgcgcatctcggtgttacacccggaagggcatcgtatcaccccggaatggctctgggagaaatatggtttgcgtcccgaacaatgggtggattttcgcgccttagcaggcgatccgagcgacaatattccgggagttaaaggtatcggcgagaagacggcgctcaagctccttaaagaatgggggtcgttggagaacttgcttaagaatttagatcaggtcaaaccagagtcagtgcgtgagaagattcttgctcacctcgaagacctcaaattaagccgcgaattgtcccgtgtacgcaccgatttgccgctcgaagttgatttcggtcgccgccgcgaacctgactgggagggtcttaaagcgtttttagagcgtcttgaatttggttcgctcttgcatgaattcggccttttagaaagcccgttactggccgaagaagcaccttggccaccgcccgagggcgcgtttttaggttaccgtttgagtcgcccggaaccgatgtgggccgaattactggctcttgcagcgtctgcccagggacgtgtgtatcgcgcggaagaccctcatggtgcgctccgcggcctcttcgaagtccgtggactccttgccaaagacttagctgttgttgcattgcgcgaaggtcttgatttacctccgactgatgatccaatgcttcttgcgtacctcttggacccgtcaaacacgacgcccgaaggcgtagcccgtcgttacggcggcgagtggaccgaagatgcagcgaaacgcgcgttattggccgaacgtttgcacgaaaatttattaggacgtttgcaaggcgaggaacgtctcctctggctttacgaagaagtggagaaaccattgagtcgcgtgctcgcgcatatggaagctaccggtgtcaaattagacgtggcgtatttggagaatctcagccttgaagttgctgcccacatgcgccgcttggaggaagaagtattccgtttagcaggccgttcctttcgccttaactctcgcgatcagttagaacgtgtgttgttcgatgaacttggtctccctcctatcggcaagacagagaagaccggtaaacgtagcacttcagcggcggttttagaagctcttcgcgaagtccatcccattgtggacaagatcttgcagtaccgcgaaatggcgaaattgaaaggcacctatattgaccgtcttccggcattagtccacccgaaaacgggacgcctccatacccgcttcaaccaaacagccacggcgaccggtcgtttgtcctcctctgatccaaaccttcagaatattccagtacgtaccccattgggccagaagatccgccgtgcgtttgtagctgaggagggttggcgtttagtggccctcgattatcgtcaaattgaattacgtgtccttgcccatctttctggcgatgagaacctcatccgcgtgtttcaggaaggcaaagacattcacactcaaacggcaagctggatgtttggattatcagctgaagcgatcgatcctttgatgcgtcgtgcagcgaagaccatcaatttcggtgttctctacggtatgagtgcctttcgtttgtcgcaggaattaggcattccctatgaagaagctcagctgttcattcagaaatactttcaaagctatcccaaagttaaagcatggatcgagaagactctccgtgaaggccgcacacgtggttacgtagagaccttatttggacgtcgccgctatgttcccgatttaaacgctcgcgtgaaaggcaagcgtgaagccgccgaacgcatggcgttcaacatgcctgtacagggcacggcagctgacctcatgaaacttgcaatggtgcgcctttttccacaattgcgtgaagttggtgcccgcatgctcttgcaggtccacgatgaactcttgttagaagcgccaaaagagcgtgcggaagaggtggcagccctcgcgaaagaagttatggaaggcgtgtggcccttagcggtgcctcttgaagtcgaagttggtattggcgaggattggctggctgccaaagga

SEQ ID NO: 5454 - protein, 841 aa, synthetic construct
  REGION 1..841: note = Variant of DNA polymerase I from Thermus sp. strain 2.9
MHHHHHHGGSGVLPVFEPKGRVLLVDGHHLAYRNFFALKGLTTSLGEPVQGVYGFAKSLLKALKEDGDVVIVVFDAKAPSFRHEAYEAYKAGRAPTPEDFPRQLALMKELVDLLGLERLEVPGFEADDVLATLAKKAEREGYEVQILTADRDLFQLLSPRISVLHPEGHRITPEWLWEKYGLRPEQWVDFRALAGDPSDNIPGVKGIGEKTALKLLKEWGSLENLLKNLDQVKPESVREKILAHLEDLKLSRELSRVRTDLPLEVDFGRRREPDWEGLKAFLERLEFGSLLHEFGLLESPLLAEEAPWPPPEGAFLGYRLSRPEPMWAELLALAASAQGRVYRAEDPHGALRGLFEVRGLLAKDLAVVALREGLDLPPTDDPMLLAYLLDPSNTTPEGVARRYGGEWTEDAAKRALLAERLHENLLGRLQGEERLLWLYEEVEKPLSRVLAHMEATGVKLDVAYLENLSLEVAAHMRRLEEEVFRLAGRSFRLNSRDQLERVLFDELGLPPIGKTEKTGKRSTSAAVLEALREVHPIVDKILQYREMAKLKGTYIDRLPALVHPKTGRLHTRFNQTATATGRLSSSDPNLQNIPVRTPLGQKIRRAFVAEEGWRLVALDYRQIELRVLAHLSGDENLIRVFQEGKDIHTQTASWMFGLSAEAIDPLMRRAAKTINFGVLYGMSAFRLSQELGIPYEEAQLFIQKYFQSYPKVKAWIEKTLREGRTRGYVETLFGRRRYVPDLNARVKGKREAAERMAFNMPVQGTAADLMKLAMVRLFPQLREVGARMLLQVHDELLLEAPKERAEEVAALAKEVMEGVWPLAVPLEVEVGIGEDWLAAKG

SEQ ID NO: 5455 - DNA, 2523 bp, synthetic construct
  misc_feature 1..2523: note = Variant of DNA polymerase I from Thermus sp. strain 2.9
  source 1..2523: mol_type = other DNA
atgcaccatcatcatcatcatggcggtagcggcgtgttaccggtgttcgagcctaaaggtcgcgtgcttctggttgatggccatcatctcgcgtatcgtaacttctttgccctgaaaggattaaccaccagcctgggcgagccggtacagggtgtctacggctttgcaaagtcgctcctgaaagctctgaaagaagacggtgatgtggtgattgttgtctttgatgcgaaagcgccaagttttcgccacgaagcgtacgaagcttacaaagccgggcgtgctccaacgccggaagactttcctcgccaattggcgcttatgaaggaattagtggatttgcttggcctcgaacgcttggaagttcccggtttcgaggcagacgacgtattagcgactctcgcaaagaaagccgaacgtgagggctatgaagtccagatcttgacagcagatcgcgatcttttccagcttttatctccgcgcatctcggtgttacacccggaagggcatcgtatcaccccggaatggctctgggagaaatatggtttgcgtcccgaacaatgggtggattttcgcgccttagcaggcgatccgagcgacaatattccgggagttaaaggtatcggcgagaagacggcgctcaagctccttaaagaatgggggtcgttggagaacttgcttaagaatttagatcaggtcaaaccagagtcagtgcgtgagaagattcttgctcacctcgaagacctcaaattaagccgcgaattgtcccgtgtacgcaccgatttgccgctcgaagttgatttcggtcgccgccgcgaacctgactgggagggtcttaaagcgtttttagagcgtcttgaatttggttcgctcttgcatgaattcggccttttagaaagcccgttactggccgaagaagcaccttggccaccgcccgagggcgcgtttttaggttaccgtttgagtcgcccggaaccgatgtgggccgaattactggctcttgcagcgtctgcccagggacgtgtgtatcgcgcggaagaccctcatggtgcgctccgcggcctcttcgaagtccgtggactccttgccaaagacttagctgttgttgcattgcgcgaaggtcttgatttacctccgactgatgatccaatgcttggtgcgtacctcttggacccgtcaaacacgacgcccgaaggcgtagcccgtcgttacggcggcgagtggaccgaagatgcagcgaaacgcgcgttattggccgaacgtttgcacgaaaatttattaggacgtttgcaaggcgaggaacgtctcctctggctttacgaagaagtggagaaaccattgagtcgcgtgctcgcgcatatggaagctaccggtgtcaaattagacgtggcgtatttggagaatctcagccttgaagttgctgcccacatgcgccgcttggaggaagaagtattccgtttagcaggccgttcctttcgccttaactctcgcgatcagttagaacgtgtgttgttcgatgaacttggtctccctcctatcggcaagacagagaagaccggtaaacgtagcacttcagcggcggttttagaagctcttcgcgaagtccatcccattgtggacaagatcttgcagtaccgcgaaatggcgaaattgaaaggcacctatattgaccgtcttccggcattagtccacccgaaaacgggacgcctccatacccgcttcaaccaaacagccacggcgaccggtcgtttgtcctcctctgatccaaaccttcagaatattccagtacgtaccccattgggccagaagatccgccgtgcgtttgtagctgaggagggttggcgtttagtggccctcgattatcgtcaaattgaattacgtgtccttgcccatctttctggcgatgagaacctcatccgcgtgtttcaggaaggcaaagacattcacactcaaacggcaagctggatgtttggattatcagctgaagcgatcgatcctttgatgcgtcgtgcagcgaagaccatcaatttcggtgttctctacggtatgagtgcctttcgtttgtcgcaggaattaggcattccctatgaagaagctcaggcgttcattcagaaatactttcaaagctatcccaaagttaaagcatggatcgagaagactctccgtgaaggccgcacacgtggttacgtagagaccttatttggacgtcgccgctatgttcccgatttaaacgctcgcgtgaaaggcaagcgtgaagccgccgaacgcatggcgttcaacatgcctgtacagggcacggcagctgacctcatgaaacttgcaatggtgcgcctttttccacaattgcgtgaagttggtgcccgcatgctcttgcaggtccacgatgaactcttgttagaagcgccaaaagagcgtgcggaagaggtggcagccctcgcgaaagaagttatggaaggcgtgtggcccttagcggtgcctcttgaagtcgaagttggtattggcgaggattggctggctgccaaagga

SEQ ID NO: 5456 - protein, 841 aa, synthetic construct
  REGION 1..841: note = Variant of DNA polymerase I from Thermus sp. strain 2.9
MHHHHHHGGSGVLPVFEPKGRVLLVDGHHLAYRNFFALKGLTTSLGEPVQGVYGFAKSLLKALKEDGDVVIVVFDAKAPSFRHEAYEAYKAGRAPTPEDFPRQLALMKELVDLLGLERLEVPGFEADDVLATLAKKAEREGYEVQILTADRDLFQLLSPRISVLHPEGHRITPEWLWEKYGLRPEQWVDFRALAGDPSDNIPGVKGIGEKTALKLLKEWGSLENLLKNLDQVKPESVREKILAHLEDLKLSRELSRVRTDLPLEVDFGRRREPDWEGLKAFLERLEFGSLLHEFGLLESPLLAEEAPWPPPEGAFLGYRLSRPEPMWAELLALAASAQGRVYRAEDPHGALRGLFEVRGLLAKDLAVVALREGLDLPPTDDPMLGAYLLDPSNTTPEGVARRYGGEWTEDAAKRALLAERLHENLLGRLQGEERLLWLYEEVEKPLSRVLAHMEATGVKLDVAYLENLSLEVAAHMRRLEEEVFRLAGRSFRLNSRDQLERVLFDELGLPPIGKTEKTGKRSTSAAVLEALREVHPIVDKILQYREMAKLKGTYIDRLPALVHPKTGRLHTRFNQTATATGRLSSSDPNLQNIPVRTPLGQKIRRAFVAEEGWRLVALDYRQIELRVLAHLSGDENLIRVFQEGKDIHTQTASWMFGLSAEAIDPLMRRAAKTINFGVLYGMSAFRLSQELGIPYEEAQAFIQKYFQSYPKVKAWIEKTLREGRTRGYVETLFGRRRYVPDLNARVKGKREAAERMAFNMPVQGTAADLMKLAMVRLFPQLREVGARMLLQVHDELLLEAPKERAEEVAALAKEVMEGVWPLAVPLEVEVGIGEDWLAAKG

SEQ ID NO: 5457 - DNA, 2523 bp, synthetic construct
  misc_feature 1..2523: note = Variant of DNA polymerase I from Thermus sp. strain 2.9
  source 1..2523: mol_type = other DNA
atgcaccatcatcatcatcatggcggtagcggcgtgttaccggtgttcgagcctaaaggtcgcgtgcttctggttgatggccatcatctcgcgtatcgtaacttctttgccctgaaaggattaaccaccagcctgggcgagccggtacagggtgtctacggctttgcaaagtcgctcctgaaagctctgaaagaagacggtgatgtggtgattgttgtctttgatgcgaaagcgccaagttttcgccacgaagcgtacgaagcttacaaagccgggcgtgctccaacgccggaagactttcctcgccaattggcgcttatgaaggaattagtggatttgcttggcctcgaacgcttggaagttcccggtttcgaggcagacgacgtattagcgactctcgcaaagaaagccgaacgtgagggctatgaagtccagatcttgacagcagatcgcgatcttttccagcttttatctccgcgcatctcggtgttacacccggaagggcatcgtatcaccccggaatggctctgggagaaatatggtttgcgtcccgaacaatgggtggattttcgcgccttagcaggcgatccgagcgacaatattccgggagttaaaggtatcggcgagaagacggcgctcaagctccttaaagaatgggggtcgttggagaacttgcttaagaatttagatcaggtcaaaccagagtcagtgcgtgagaagattcttgctcacctcgaagacctcaaattaagccgcgaattgtcccgtgtacgcaccgatttgccgctcgaagttgatttcggtcgccgccgcgaacctgactgggagggtcttaaagcgtttttagagcgtcttgaatttggttcgctcttgcatgaattcggccttttagaaagcccgttactggccgaagaagcaccttggccaccgcccgagggcgcgtttttaggttaccgtttgagtcgcccggaaccgatgtgggccgaattactggctcttgcagcgtctgcccagggacgtgtgtatcgcgcggaagaccctcatggtgcgctccgcggcctcttcgaagtccgtggactccttgccaaagacttagctgttgttgcattgcgcgaaggtcttgatttacctccgactgatgatccaatgcttcttgcgtacctcttggacccgtcaaacacgacgcccgaaggcgtagcccgtcgttacggcggcgagtggaccgaagatgcagcgaaacgcgcgttattggccgaacgtttgcacgaaaatttattaggacgtttgcaaggcgaggagcgtctcctgtggctttacgaagaagtggagaaaccattgagtcgcgtgctcgcgcatatggaagctaccggtgtcaaattagacgtggcgtatttggagaatctcagccttgaagttgctgcccacatgcgccgcttggaggaagaagtattccgtttagcaggccgttcctttcgccttaactctcgcgatcagttagaacgtgtgttgttcgatgaacttggtctccctcctatcggcaagacagagaagaccggtaaacgtagcacttcagcggcggttttagaagctcttcgcgaagtccatcccattgtggacaagatcttgcagtaccgcgaaatggcgaaattgaaaggcacctatattgaccgtcttccggcattagtccacccgaaaacgggacgcctccatacccgcttcaaccaaacagccacggcgaccggtcgtttgtcctcctctgatccaaaccttcagaatattccagtacgtacctttttgggccagaagatccgccgtgcgtttgtagctgaggagggttggcgtttagtggccctcgattatcgtcaaattgaattacgtgtccttgcccatctttctggcgatgagaacctcatccgcgtgtttcaggaaggcaaagacattcacactcaaacggcaagctggatgtttggattatcagctgaagcgatcgatcctttgatgcgtcgtgcagcgaagaccatcaatttcggtgttctctacggtatgagtgcctttcgtttgtcgcaggaattaggcattccctatgaagaagctcaggcgttcattcagaaatactttcaaggctatcccaaagttaaagcatggatcgagaagactctccgtgaaggccgcacacgtggttacgtagagaccttatttggacgtcgccgctatgttcccgatttaaacgctcgcgtgaaaggcaagcgtgaagccgccgaacgcatggcgttcaacatgcctgtacagggcacggcagctgacctcatgaaacttgcaatggtgcgcctttttccacaattgcgtgaagttggtgcccgcatgctgttgcaggtccacgatgaactcttgttagaagcgccaaaagagcgtgcggaagaggtggcagccctcgcgaaagaagttatggaaggcgtgtggcccttagcggtgcctcttgaagtcgaagttggtattggcgaggattggctggctgccaaagga

SEQ ID NO: 5458 - protein, 841 aa, synthetic construct
  REGION 1..841: note = Variant of DNA polymerase I from Thermus sp. strain 2.9
MHHHHHHGGSGVLPVFEPKGRVLLVDGHHLAYRNFFALKGLTTSLGEPVQGVYGFAKSLLKALKEDGDVVIVVFDAKAPSFRHEAYEAYKAGRAPTPEDFPRQLALMKELVDLLGLERLEVPGFEADDVLATLAKKAEREGYEVQILTADRDLFQLLSPRISVLHPEGHRITPEWLWEKYGLRPEQWVDFRALAGDPSDNIPGVKGIGEKTALKLLKEWGSLENLLKNLDQVKPESVREKILAHLEDLKLSRELSRVRTDLPLEVDFGRRREPDWEGLKAFLERLEFGSLLHEFGLLESPLLAEEAPWPPPEGAFLGYRLSRPEPMWAELLALAASAQGRVYRAEDPHGALRGLFEVRGLLAKDLAVVALREGLDLPPTDDPMLLAYLLDPSNTTPEGVARRYGGEWTEDAAKRALLAERLHENLLGRLQGEERLLWLYEEVEKPLSRVLAHMEATGVKLDVAYLENLSLEVAAHMRRLEEEVFRLAGRSFRLNSRDQLERVLFDELGLPPIGKTEKTGKRSTSAAVLEALREVHPIVDKILQYREMAKLKGTYIDRLPALVHPKTGRLHTRFNQTATATGRLSSSDPNLQNIPVRTFLGQKIRRAFVAEEGWRLVALDYRQIELRVLAHLSGDENLIRVFQEGKDIHTQTASWMFGLSAEAIDPLMRRAAKTINFGVLYGMSAFRLSQELGIPYEEAQAFIQKYFQGYPKVKAWIEKTLREGRTRGYVETLFGRRRYVPDLNARVKGKREAAERMAFNMPVQGTAADLMKLAMVRLFPQLREVGARMLLQVHDELLLEAPKERAEEVAALAKEVMEGVWPLAVPLEVEVGIGEDWLAAKG

SEQ ID NO: 5459 - DNA, 2523 bp, synthetic construct
  misc_feature 1..2523: note = Variant of DNA polymerase I from Thermus sp. strain 2.9
  source 1..2523: mol_type = other DNA
atgcaccatcatcatcatcatggcggtagcggcgtgttaccggtgttcgagcctaaaggtcgcgtgcttctggttgatggccatcatctcgcgtatcgtaacttctttgccctgaaaggattaaccaccagcctgggcgagccggtacagggtgtctacggctttgcaaagtcgctcctgaaagctctgaaagaagacggtgatgtggtgattgttgtctttgatgcgaaagcgccaagttttcgccacgaagcgtacgaagcttacaaagccgggcgtgctccaacgccggaagactttcctcgccaattggcgcttatgaaggaattagtggatttgcttggcctcgaacgcttggaagttcccggtttcgaggcagacgacgtattagcgactctcgcaaagaaagccgaacgtgagggctatgaagtccagatcttgacagcagatcgcgatcttttccagcttttatctccgcgcatctcggtgttacacccggaagggcatcgtatcaccccggaatggctctgggagaaatatggtttgcgtcccgaacaatgggtggattttcgcgccttagcaggcgatccgagcgacaatattccgggagttaaaggtatcggcgagaagacggcgctcaagctccttaaagaatgggggtcgttggagaacttgcttaagaatttagatcaggtcaaaccagagtcagtgcgtgagaagattcttgctcacctcgaagacctcaaattaagccgcgaattgtcccgtgtacgcaccgatttgccgctcgaagttgatttcggtcgccgccgcgaacctgactgggagggtcttaaagcgtttttagagcgtcttgaatttggttcgctcttgcatgaattcggccttttagaaagcccgttactggccgaagaaatgccttggccaccgcccgagggcgcgtttttaggttaccgtttgagtcgcccggaaccgatgtgggccgaattactggctcttgcagcgtctgcccagggacgtgtgtatcgcgcggaagaccctcatggtgcgctccgcggcctcttcgaagtccgtggactccttgccaaagacttagctgttgttgcattgcgcgaaggtcttgatttacctccgactgatgatccaatgcttcttgcgtacctcttggacccgtcaaacacgacgcccgaaggcgtagcccgtcgttacggcggcgagtggaccgaagatgcagcgaaacgcgcgttattggccgaacgtttgcacgaaaatttattaggacgtttgcaaggcgaggaacgtctcctctggctttacgaagaagtggagaaaccattgagtcgcgtgctcgcgcatatggaagctaccggtgtcaaattagacgtggcgtatttggagaatctcagccttgaagttgctgcccacatgcgccgcttggaggaagaagtattccgtttagcaggccgttcctttcgccttaactctcgcgatcagttagaacgtgtgttgttcgatgaacttggtctccctcctatcggcaagacagagaagaccggtaaacgtagcacttcagcggcggttttagaagctcttcgcgaagtccatcccattgtggacaagatcttgcagtaccgcgaaatggcgaaattgaaaggcacctatattgaccgtcttccggcattagtccacccgaaaacgggacgcctccatacccgcttcaaccaaacagccacggcgaccggtcgtttgtcctcctctgatccaaaccttcagaatattccagtacgtaccccattgggccagaagatccgccgtgcgtttgtagctgaggagggttggcgtttagtggccctcgattatcgtcaaattgaattacgtgtccttgcccatctttctggcgatgagaacctcatccgcgtgtttcaggaaggcaaagacattcacactcaaacggcaagctggatgtttggattatcagctgaagcgatcgatcctttgatgcgtcgtgcagcgaagaccatcaatttcggtgttctctacggtatgagtgcctttcgtttgtcgcaggaattaggcattccctatgaagaagctcaggcgttcattcagaaatactttcaaagctatcccaaagttaaagcatggatcgagaagactctccgtgaaggccgcacacgtggttacgtagagaccttatttggacgtcgccgctatgttcccgatttaaacgctcgcgtgaaaggcaagcgtgaagccgccgaacgcatggcgttcaacatgcctgtacagggcacggcagctgacctcatgaaacttgcaatggtgcgcctttttccacaattgcgtgaagttggtgcccgcatgctcttgcaggtccacgatgaactcttgttagaagcgccaaaagagcgtgcggaagaggtggcagccctcgcgaaagaagttatggaaggcgtgtggcccttagcggtgcctcttgaagtcgaagttggtattggcgaggattggctggctgccaaagga

SEQ ID NO: 5460 - protein, 841 aa, synthetic construct
  REGION 1..841: note = Variant of DNA polymerase I from Thermus sp. strain 2.9
MHHHHHHGGSGVLPVFEPKGRVLLVDGHHLAYRNFFALKGLTTSLGEPVQGVYGFAKSLLKALKEDGDVVIVVFDAKAPSFRHEAYEAYKAGRAPTPEDFPRQLALMKELVDLLGLERLEVPGFEADDVLATLAKKAEREGYEVQILTADRDLFQLLSPRISVLHPEGHRITPEWLWEKYGLRPEQWVDFRALAGDPSDNIPGVKGIGEKTALKLLKEWGSLENLLKNLDQVKPESVREKILAHLEDLKLSRELSRVRTDLPLEVDFGRRREPDWEGLKAFLERLEFGSLLHEFGLLESPLLAEEMPWPPPEGAFLGYRLSRPEPMWAELLALAASAQGRVYRAEDPHGALRGLFEVRGLLAKDLAVVALREGLDLPPTDDPMLLAYLLDPSNTTPEGVARRYGGEWTEDAAKRALLAERLHENLLGRLQGEERLLWLYEEVEKPLSRVLAHMEATGVKLDVAYLENLSLEVAAHMRRLEEEVFRLAGRSFRLNSRDQLERVLFDELGLPPIGKTEKTGKRSTSAAVLEALREVHPIVDKILQYREMAKLKGTYIDRLPALVHPKTGRLHTRFNQTATATGRLSSSDPNLQNIPVRTPLGQKIRRAFVAEEGWRLVALDYRQIELRVLAHLSGDENLIRVFQEGKDIHTQTASWMFGLSAEAIDPLMRRAAKTINFGVLYGMSAFRLSQELGIPYEEAQAFIQKYFQSYPKVKAWIEKTLREGRTRGYVETLFGRRRYVPDLNARVKGKREAAERMAFNMPVQGTAADLMKLAMVRLFPQLREVGARMLLQVHDELLLEAPKERAEEVAALAKEVMEGVWPLAVPLEVEVGIGEDWLAAKG

SEQ ID NO: 5461 - DNA, 2523 bp, synthetic construct
  misc_feature 1..2523: note = Variant of DNA polymerase I from Thermus sp. strain 2.9
  source 1..2523: mol_type = other DNA
atgcaccatcatcatcatcatggcggtagcggcgtgttaccggtgttcgagcctaaaggtcgcgtgcttctggttgatggccatcatctcgcgtatcgtaacttctttgccctgaaaggattaaccaccagcctgggcgagccggtacagggtgtctacggctttgcaaagtcgctcctgaaagctctgaaagaagacggtgatgtggtgattgttgtctttgatgcgaaagcgccaagttttcgccacgaagcgtacgaagcttacaaagccgggcgtgctccaacgccggaagactttcctcgccaattggcgcttatgaaggaattagtggatttgcttggcctcgaacgcttggaagttcccggtttcgaggcagacgacgtattagcgactctcgcaaagaaagccgaacgtgagggctatgaagtccagatcttgacagcagatcgcgatcttttccagcttttatctccgcgcatctcggtgttacacccggaagggcatcgtatcaccccggaatggctctgggagaaatatggtttgcgtcccgaacaatgggtggattttcgcgccttagcaggcgatccgagcgacaatattccgggagttaaaggtatcggcgagaagacggcgctcaagctccttaaagaatgggggtcgttggagaacttgcttaagaatttagatcaggtcaaaccagagtcagtgcgtgagaagattcttgctcacctcgaagacctcaaattaagccgcgaattgtcccgtgtacgcaccgatttgccgctcgaagttgatttcggtcgccgccgcgaacctgactgggagggtcttaaagcgtttttagagcgtcttgaatttggttcgctcttgcatgaattcggccttttagaaagcccgttactggccgaagaagcaccttggccaccgcccgagggcgcgtttttaggttaccgtttgagtcgcccggaaccgatgtgggccgaattactggctcttgcagcgtctgcccagggacgtgtgtatcgcgcggaagaccctcatggtgcgctccgcggcctcttcgaagtccgtggactccttgccaaagacttagctgttgttgcattgcgcgaaggtcttgatttacctccgactgatgatccaatgcttcttgcgtacctcttggacccgtcaaacacgacgcccgaaggcgtagcccgtcgttacggcggcgagtggaccgaagatgcagcgaaacgcgcgttattggccgaacgtttgcacgaaaatttattaggacgtttgcaaggcgaggaacgtctcctctggctttacgaagaagtggagaaaccattgagtcgcgtgctcgcgcatatggaagctaccggtgtcaaattagacgtggcgtatttggagaatcttcaccttatggttgctgcccacatgcgccgcttggaggaagaagtattccgtttagcaggccgttcctttcgccttaactctcgcgatcagttagaacgtgtgttgttcgatgaacttggtctccctcctatcggcaagacagagaagaccggtaaacgtagcacttcagcggcggttttagaagctcttcgcgaagtccatcccattgtggacaagatcttgcagtaccgcgaaatggcgaaattgaaaggcacctatattgaccgtcttccggcattagtccacccgaaaacgggacgcctccatacccgcttcaaccaaacagccacggcgaccggtcgtttgtcctcctctgatccaaaccttcagaatattccagtacgtaccccattgggccagaagatccgccgtgcgtttgtagctgaggagggttggcgtttagtggccctcgattatcgtcaaattgaattacgtgtccttgcccatctttctggcgatgagaacctcatccgcgtgtttcaggaaggcaaagacattcacactcaaacggcaagctggatgtttggattatcagctgaagcgatcgatcctttgatgcgtcgtgcagcgaagaccatcaatttcggtgttctctacggtatgagtgcctttcgtttgtcgcaggaattaggcattccctatgaagaagctcaggcgttcattcagaaatactttcaaagctatcccaaagttaaagcatggatcgagaagactctccgtgaaggccgcacacgtggttacgtagagaccttatttggacgtcgccgctatgttcccgatttaaacgctcgcgtgaaaggcaagcgtgaagccgccgaacgcatggcgttcaacatgcctgtacagggcacggcagctgacctcatgaaacttgcaatggtgcgcctttttccacaattgcgtgaagttggtgcccgcatgctcttgcaggtccacgatgaactcttgttagaagcgccaaaagagcgtgcggaagaggtggcagccctcgcgaaagaagttatggaaggcgtgtggcccttagcggtgcctcttgaagtcgaagttggtattggcgaggattggctggctgccaaagga

SEQ ID NO: 5462 - protein, 841 aa, synthetic construct
  REGION 1..841: note = Variant of DNA polymerase I from Thermus sp. strain 2.9
MHHHHHHGGSGVLPVFEPKGRVLLVDGHHLAYRNFFALKGLTTSLGEPVQGVYGFAKSLLKALKEDGDVVIVVFDAKAPSFRHEAYEAYKAGRAPTPEDFPRQLALMKELVDLLGLERLEVPGFEADDVLATLAKKAEREGYEVQILTADRDLFQLLSPRISVLHPEGHRITPEWLWEKYGLRPEQWVDFRALAGDPSDNIPGVKGIGEKTALKLLKEWGSLENLLKNLDQVKPESVREKILAHLEDLKLSRELSRVRTDLPLEVDFGRRREPDWEGLKAFLERLEFGSLLHEFGLLESPLLAEEAPWPPPEGAFLGYRLSRPEPMWAELLALAASAQGRVYRAEDPHGALRGLFEVRGLLAKDLAVVALREGLDLPPTDDPMLLAYLLDPSNTTPEGVARRYGGEWTEDAAKRALLAERLHENLLGRLQGEERLLWLYEEVEKPLSRVLAHMEATGVKLDVAYLENLHLMVAAHMRRLEEEVFRLAGRSFRLNSRDQLERVLFDELGLPPIGKTEKTGKRSTSAAVLEALREVHPIVDKILQYREMAKLKGTYIDRLPALVHPKTGRLHTRFNQTATATGRLSSSDPNLQNIPVRTPLGQKIRRAFVAEEGWRLVALDYRQIELRVLAHLSGDENLIRVFQEGKDIHTQTASWMFGLSAEAIDPLMRRAAKTINFGVLYGMSAFRLSQELGIPYEEAQAFIQKYFQSYPKVKAWIEKTLREGRTRGYVETLFGRRRYVPDLNARVKGKREAAERMAFNMPVQGTAADLMKLAMVRLFPQLREVGARMLLQVHDELLLEAPKERAEEVAALAKEVMEGVWPLAVPLEVEVGIGEDWLAAKG

SEQ ID NO: 5463 - DNA, 2523 bp, synthetic construct
  misc_feature 1..2523: note = Variant of DNA polymerase I from Thermus sp. strain 2.9
  source 1..2523: mol_type = other DNA
atgcaccatcatcatcatcatggcggtagcggcgtgttaccggtgttcgagcctaaaggtcgcgtgcttctggttgatggccatcatctcgcgtatcgtaacttctttgccctgaaaggattaaccaccagcctgggcgagccggtacagggtgtctacggctttgcaaagtcgctcctgaaagctctgaaagaagacggtgatgtggtgattgttgtctttgatgcgaaagcgccaagttttcgccacgaagcgtacgaagcttacaaagccgggcgtgctccaacgccggaagactttcctcgccaattggcgcttatgaaggaattagtggatttgcttggcctcgaacgcttggaagttcccggtttcgaggcagacgacgtattagcgactctcgcaaagaaagccgaacgtgagggctatgaagtccagatcttgacagcagatcgcgatcttttccagcttttatctccgcgcatctcggtgttacacccggaagggcatcgtatcaccccggaatggctctgggagaaatatggtttgcgtcccgaacaatgggtggattttcgcgccttagcaggcgatccgagcgacaatattccgggagttaaaggtatcggcgagaagacggcgctcaagctccttaaagaatgggggtcgttggagaacttgcttaagaatttagatcaggtcaaaccagagtcagtgcgtgagaagattcttgctcacctcgaagacctcaaattaagccgcgaattgtcccgtgtacgcaccgatttgccgctcgaagttgatttcggtcgccgccgcgaacctgactgggagggtcttaaagcgtttttagagcgtcttgaatttggttcgctcttgcatgaattcggccttttagaaagcccgttactggccgaagaagcaccttggccaccgcccgagggcgcgtttttaggttaccgtttgagtccgccggaaccgatgtgggccgaattactggctcttgcagcgtctgcccagggacgtgtgtatcgcgcggaagaccctcatggtgcgctccgcggcctcttcgaagtccgtggactccttgccaaagacttagctgttgttgcattgcgcgaaggtcttgatttacctccgactgatgatccaatgcttcttgcgtacctcttggacccgtcaaacacgacgcccgaaggcgtagcccgtcgttacggcggcgagtggaccgaagatgcagcgaaacgcgcgttattggccgaacgtttgcacgaaaatttattaggacgtttgcaaggcgaggaacgtctcctctggctttacgaagaagtggagaaaccattgagtcgcgtgctcgcgcatatggaagctaccggtgtcaaattagacgtggcgtatttggagaatctcagccttgaagttgctgcccacatgcgccgcttggaggaagaagtattccgtttagcaggccgttcctttcgccttaactctcgcgatcagttagaacgtgtgttgttcgatgaacttggtctccctcctatcggcaagacagagaagaccggtaaacgtagcacttcagcggcggttttagaagctcttcgcgaagtccatcccattgtggacaagatcttgcagtaccgcgaaatggcgaaattgaaaggcacctatattgaccgtcttccggcattagtccacccgaaaacgggacgcctccatacccgcttcaaccaaacagccacggcgaccggtcgtttgtcctcctctgatccaaaccttcagaatattccagtacgtaccccattgggccagaagatccgccgtgcgtttgtagctgaggagggttggcgtttagtggccctcgattatcgtcaaattgaattacgtgtccttgcccatctttctggcgatgagaacctcatccgcgtgtttcaggaaggcaaagacattcacactcaaacggcaagctggatgtttggattatcagctgaagcgatcgatcctttgatgcgtcgtgcagcgaagaccatcaatttcggtgttctctacggtatgagtgcctttcgtttgtcgcaggaattaggcattccctatgaagaagctcaggcgttcattcagaaatactttcaaagctatcccaaagttaaagcatggatcgagaagactctccgtgaaggccgcacacgtggttacgtagagaccttatttggacgtcgccgctatgttcccgatttaaacgctcgcgtgaaaggcaagcgtgaagccgccgaacgcatggcgttcaacatgcctgtacagggcacggcagctgacctcatgaaacttgcaatggtgcgcctttttccacaattgcgtgaagttggtgcccgcatgctcttgcaggtccacgatgaactcttgttagaagcgccaaaagagcgtgcggaagaggtggcagccctcgcgaaagaagttatggaaggcgtgtggcccttagcggtgcctcttgaagtcgaagttggtattggcgaggattggctggctgccaaagga

SEQ ID NO: 5464 - protein, 841 aa, synthetic construct
  REGION 1..841: note = Variant of DNA polymerase I from Thermus sp. strain 2.9
MHHHHHHGGSGVLPVFEPKGRVLLVDGHHLAYRNFFALKGLTTSLGEPVQGVYGFAKSLLKALKEDGDVVIVVFDAKAPSFRHEAYEAYKAGRAPTPEDFPRQLALMKELVDLLGLERLEVPGFEADDVLATLAKKAEREGYEVQILTADRDLFQLLSPRISVLHPEGHRITPEWLWEKYGLRPEQWVDFRALAGDPSDNIPGVKGIGEKTALKLLKEWGSLENLLKNLDQVKPESVREKILAHLEDLKLSRELSRVRTDLPLEVDFGRRREPDWEGLKAFLERLEFGSLLHEFGLLESPLLAEEAPWPPPEGAFLGYRLSPPEPMWAELLALAASAQGRVYRAEDPHGALRGLFEVRGLLAKDLAVVALREGLDLPPTDDPMLLAYLLDPSNTTPEGVARRYGGEWTEDAAKRALLAERLHENLLGRLQGEERLLWLYEEVEKPLSRVLAHMEATGVKLDVAYLENLSLEVAAHMRRLEEEVFRLAGRSFRLNSRDQLERVLFDELGLPPIGKTEKTGKRSTSAAVLEALREVHPIVDKILQYREMAKLKGTYIDRLPALVHPKTGRLHTRFNQTATATGRLSSSDPNLQNIPVRTPLGQKIRRAFVAEEGWRLVALDYRQIELRVLAHLSGDENLIRVFQEGKDIHTQTASWMFGLSAEAIDPLMRRAAKTINFGVLYGMSAFRLSQELGIPYEEAQAFIQKYFQSYPKVKAWIEKTLREGRTRGYVETLFGRRRYVPDLNARVKGKREAAERMAFNMPVQGTAADLMKLAMVRLFPQLREVGARMLLQVHDELLLEAPKERAEEVAALAKEVMEGVWPLAVPLEVEVGIGEDWLAAKG

SEQ ID NO: 5465 - DNA, 2523 bp, synthetic construct
  misc_feature 1..2523: note = Variant of DNA polymerase I from Thermus sp. strain 2.9
  source 1..2523: mol_type = other DNA
atgcaccatcatcatcatcatggcggtagcggcgtgttaccggtgttcgagcctaaaggtcgcgtgcttctggttgatggccatcatctcgcgtatcgtaacttctttgccctgaaaggattaaccaccagcctgggcgagccggtacagggtgtctacggctttgcaaagtcgctcctgaaagctctgaaagaagacggtgatgtggtgattgttgtctttgatgcgaaagcgccaagttttcgccacgaagcgtacgaagcttacaaagccgggcgtgctccaacgccggaagactttcctcgccaattggcgcttatgaaggaattagtggatttgcttggcctcgaacgcttggaagttcccggtttcgaggcagacgacgtattagcgactctcgcaaagaaagccgaacgtgagggctatgaagtccagatcttgacagcagatcgcgatcttttccagcttttatctccgcgcatctcggtgttacacccggaagggcatcgtatcaccccggaatggctctgggagaaatatggtttgcgtcccgaacaatgggtggattttcgcgccttagcaggcgatccgagcgacaatattccgggagttaaaggtatcggcgagaagacggcgctcaagctccttaaagaatgggggtcgttggagaacttgcttaagaatttagatcaggtcaaaccagagtcagtgcgtgagaagattcttgctcacctcgaagacctcaaattaagccgcgaattgtcccgtgtacgcaccgatttgccgctcgaagttgatttcggtcgccgccgcgaacctgactgggagggtcttaaagcgtttttagagcgtcttgaatttggttcgctcttgcatgaattcggccttttagaaagcccgttactggccgaagaagcaccttggccaccgcccgagggcgcgtttttaggttaccgtttgagtcgcccggaaccgatgtgggccgaattactggctcttgcagcgtctgcccagggacgtgtgtatcgcgcggaagaccctcatggtgcgctccgcggcctcttcgaagtccgtggactccttgccaaagacttagctgttgttgcattgcgcgaaggtcttgatttacctcttactgatgatccaatgcttcttgcgtacctcttggacccgtcaaacacgacgcccgaaggcgtagcccgtcgttacggcggcgagtggaccgaagatgcagcgaaacgcgcgttattggccgaacgtttgcacgaaaatttattaggacgtttgcaaggcgaggaacgtctcctctggctttacgaagaagtggagaaaccattgagtcgcgtgctcgcgcatatggaagctaccggtgtcaaattagacgtggcgtatttggagaatctcagccttgaagttgctgcccacatgcgccgcttggaggaagaagtattccgtttagcaggccgttcctttcgccttaactctcgcgatcagttagaacgtgtgttgttcgatgaacttggtctccctcctatcggcaagacagagaagaccggtaaacgtagcacttcagcggcggttttagaagctcttcgcgaagtccatcccattgtggacaagatcttgcagtaccgcgaaatggcgaaattgaaaggcacctatattgaccgtcttccggcattagtccacccgaaaacgggacgcctccatacccgcttcaaccaaacagccacggcgaccggtcgtttgtcctcctctgatccaaaccttcagaatattccagtacgtaccccattgggccagaagatccgccgtgcgtttgtagctgaggagggttggcgtttagtggccctcgattatcgtcaaattgaattacgtgtccttgcccatctttctggcgatgagaacctcatccgcgtgtttcaggaaggcaaagacattcacactcaaacggcaagctggatgtttggattatcagctgaagcgatcgatcctttgatgcgtcgtgcagcgaagaccatcaatttcggtgttctctacggtatgagtgcctttcgtttgtcgcaggaattaggcattccctatgaagaagctcaggcgttcattcagaaatactttcaaagctatcccaaagttaaagcatggatcgagaagactctccgtgaaggccgcacacgtggttacgtagagaccttatttggacgtcgccgctatgttcccgatttaaacgctcgcgtgaaaggcaagcgtgaagccgccgaacgcatggcgttcaacatgcctgtacagggcacggcagctgacctcatgaaacttgcaatggtgcgcctttttccacaattgcgtgaagttggtgcccgcatgctcttgcaggtccacgatgaactcttgttagaagcgccaaaagagcgtgcggaagaggtggcagccctcgcgaaagaagttatggaaggcgtgtggcccttagcggtgcctcttgaagtcgaagttggtattggcgaggattggctggctgccaaagga

SEQ ID NO: 5466 - protein, 841 aa, synthetic construct
  REGION 1..841: note = Variant of DNA polymerase I from Thermus sp. strain 2.9
MHHHHHHGGSGVLPVFEPKGRVLLVDGHHLAYRNFFALKGLTTSLGEPVQGVYGFAKSLLKALKEDGDVVIVVFDAKAPSFRHEAYEAYKAGRAPTPEDFPRQLALMKELVDLLGLERLEVPGFEADDVLATLAKKAEREGYEVQILTADRDLFQLLSPRISVLHPEGHRITPEWLWEKYGLRPEQWVDFRALAGDPSDNIPGVKGIGEKTALKLLKEWGSLENLLKNLDQVKPESVREKILAHLEDLKLSRELSRVRTDLPLEVDFGRRREPDWEGLKAFLERLEFGSLLHEFGLLESPLLAEEAPWPPPEGAFLGYRLSRPEPMWAELLALAASAQGRVYRAEDPHGALRGLFEVRGLLAKDLAVVALREGLDLPLTDDPMLLAYLLDPSNTTPEGVARRYGGEWTEDAAKRALLAERLHENLLGRLQGEERLLWLYEEVEKPLSRVLAHMEATGVKLDVAYLENLSLEVAAHMRRLEEEVFRLAGRSFRLNSRDQLERVLFDELGLPPIGKTEKTGKRSTSAAVLEALREVHPIVDKILQYREMAKLKGTYIDRLPALVHPKTGRLHTRFNQTATATGRLSSSDPNLQNIPVRTPLGQKIRRAFVAEEGWRLVALDYRQIELRVLAHLSGDENLIRVFQEGKDIHTQTASWMFGLSAEAIDPLMRRAAKTINFGVLYGMSAFRLSQELGIPYEEAQAFIQKYFQSYPKVKAWIEKTLREGRTRGYVETLFGRRRYVPDLNARVKGKREAAERMAFNMPVQGTAADLMKLAMVRLFPQLREVGARMLLQVHDELLLEAPKERAEEVAALAKEVMEGVWPLAVPLEVEVGIGEDWLAAKG

SEQ ID NO: 5467 - DNA, 2523 bp, synthetic construct
  misc_feature 1..2523: note = Variant of DNA polymerase I from Thermus sp. strain 2.9
  source 1..2523: mol_type = other DNA
atgcaccatcatcatcatcatggcggtagcggcgtgttaccggtgttcgagcctaaaggtcgcgtgcttctggttgatggccatcatctcgcgtatcgtaacttctttgccctgaaaggattaaccaccagcctgggcgagccggtacagggtgtctacggctttgcaaagtcgctcctgaaagctctgaaagaagacggtgatgtggtgattgttgtctttgatgcgaaagcgccaagttttcgccacgaagcgtacgaagcttacaaagccgggcgtgctccaacgccggaagactttcctcgccaattggcgcttatgaaggaattagtggatttgcttggcctcgaacgcttggaagttcccggtttcgaggcagacgacgtattagcgactctcgcaaagaaagccgaacgtgagggctatgaagtccagatcttgacagcagatcgcgatcttttccagcttttatctccgcgcatctcggtgttacacccggaagggcatcgtatcaccccggaatggctctgggagaaatatggtttgcgtcccgaacaatgggtggattttcgcgccttagcaggcgatccgagcgacaatattccgggagttaaaggtatcggcgagaagacggcgctcaagctccttaaagaatgggggtcgttggagaacttgcttaagaatttagatcaggtcaaaccagagtcagtgcgtgagaagattcttgctcacctcgaagacctcaaattaagccgcgaattgtcccgtgtacgcaccgatttgccgctcgaagttgatttcggccgccgccgcgaacctgactgggagggtcttaaagcgtttttagagcgtcttgaatttggttcgctcttgcatgaattcggccttttagaaagcccgttactggccgaagaagcaccttggccaccgcccgagggcgcgtttttaggttaccgtttgagtcgcccggaaccgatgtgggccgaattactggctcttgcagcgtctgcccagggacgtgtgtatcgcgcggaagaccctcatggtgcgctccgcggcctcttcgaagtccgtggactccttgccaaagacttagctgttgttgcattgcgcgaaggtcttgatttacctccgactgatgatccaatgcttcttgcgtacctcttggacccgtcaaacacgacgcccgaaggcgtagcccgtcgttacggcggcgagtggaccgaagatgcagcgaaacgcgcgttattggccgaacgtttgcacgaaaatttattaggacgtttgcaaggcgaggaacgtctcctctggctttacgaagaagtggagaaaccattgagtcgcgtgctcgcgcatatggaagctaccggtgtcaaattagacgtggcgtatttggaggcccttagccttgaagttgctgcccacatgcgccgcttggaggaagaagtattccgtttagcaggccgctcctttcgccttaactctcgcgatcagttagaacgtgtgttgttcgatgaacttggtctccctcctatcggcaagacagagaagaccggtaaacgtagcacttcagcggcggttttagaagctcttcgcgaagtccatcccattgtggacaagatcttgcagtaccgcgaaatggcgaaattgaaaggcacctatattgaccgtcttccggcattagtccacccgaaaacgggacgcctccatacccgcttcaaccaaacagccacggcgaccggtcgtttgtcctcctctgatccaaaccttcagaatattccagtacgtaccccattgggccagaagatccgccgtgcgtttgtagctgaggagggttggcgtttagtggccctcgattatagtcaaattgaattacgtgtccttgcccatctttctggcgatgagaacctcatccgcgtgtttcaggaaggcaaagacattcacactcaaacggcaagctggatgtttggattatcagctgaagcgatcgatcctttgatgcgtcgtgcagcgaagaccatcaatttcggtgttctctacggtatgagtgcctttcgtttgtcgcaggaattaggcattccctatgaagaagctcaggcgttcattcagaaatactttcaaagctatcccaaagttaaagcatggatcgagaagactctccgcgaaggccgcacacgtggttacgtagagaccttatttggacgtcgccgctatgttcccgatttaaacgctcgcgtgaaaggcaagcgtgaagccgccgaacgcatggcgttcaacatgcctgtacagggcacggcagctgacctcatgaaacttgcaatggtgcgcctttttccacaattgcgtgaagttggtgcccgcatgctcttgcaggtccacgatgaactcttgttagaagcgccaaaagagcgtgcggaagaggtggcagccctcgcgaaagaagttatggaaggcgtgtggcccttagcggtgcctcttgaagtcgaagttggtattggcgaggattggctggctgccaaagga

SEQ ID NO: 5468 - protein, 841 aa, synthetic construct
  REGION 1..841: note = Variant of DNA polymerase I from Thermus sp. strain 2.9
MHHHHHHGGSGVLPVFEPKGRVLLVDGHHLAYRNFFALKGLTTSLGEPVQGVYGFAKSLLKALKEDGDVVIVVFDAKAPSFRHEAYEAYKAGRAPTPEDFPRQLALMKELVDLLGLERLEVPGFEADDVLATLAKKAEREGYEVQILTADRDLFQLLSPRISVLHPEGHRITPEWLWEKYGLRPEQWVDFRALAGDPSDNIPGVKGIGEKTALKLLKEWGSLENLLKNLDQVKPESVREKILAHLEDLKLSRELSRVRTDLPLEVDFGRRREPDWEGLKAFLERLEFGSLLHEFGLLESPLLAEEAPWPPPEGAFLGYRLSRPEPMWAELLALAASAQGRVYRAEDPHGALRGLFEVRGLLAKDLAVVALREGLDLPPTDDPMLLAYLLDPSNTTPEGVARRYGGEWTEDAAKRALLAERLHENLLGRLQGEERLLWLYEEVEKPLSRVLAHMEATGVKLDVAYLEALSLEVAAHMRRLEEEVFRLAGRSFRLNSRDQLERVLFDELGLPPIGKTEKTGKRSTSAAVLEALREVHPIVDKILQYREMAKLKGTYIDRLPALVHPKTGRLHTRFNQTATATGRLSSSDPNLQNIPVRTPLGQKIRRAFVAEEGWRLVALDYSQIELRVLAHLSGDENLIRVFQEGKDIHTQTASWMFGLSAEAIDPLMRRAAKTINFGVLYGMSAFRLSQELGIPYEEAQAFIQKYFQSYPKVKAWIEKTLREGRTRGYVETLFGRRRYVPDLNARVKGKREAAERMAFNMPVQGTAADLMKLAMVRLFPQLREVGARMLLQVHDELLLEAPKERAEEVAALAKEVMEGVWPLAVPLEVEVGIGEDWLAAKG

SEQ ID NO: 5469 - DNA, 2523 bp, synthetic construct
  misc_feature 1..2523: note = Variant of DNA polymerase I from Thermus sp. strain 2.9
  source 1..2523: mol_type = other DNA
atgcaccatcatcatcatcatggcggtagcggcgtgttaccggtgttcgagcctaaaggtcgcgtgcttctggttgatggccatcatctcgcgtatcgtaacttctttgccctgaaaggattaaccaccagcctgggcgagccggtacagggtgtctacggctttgcaaagtcgctcctgaaagctctgaaagaagacggtgatgtggtgattgttgtctttgatgcgaaagcgccaagttttcgccacgaagcgtacgaagcttacaaagccgggcgtgctccaacgccggaagactttcctcgccaattggcgcttatgaaggaattagtggatttgcttggcctcgaacgcttggaagttcccggtttcgaggcagacgacgtattagcgactctcgcaaagaaagccgaacgtgagggctatgaagtccagatcttgacagcagatcgcgatcttttccagcttttatctccgcgcatctcggtgttacacccggaagggcatcgtatcaccccggaatggctctgggagaaatatggtttgcgtcccgaacaatgggtggattttcgcgccttagcaggcgatccgagcgacaatattccgggagttaaaggtatcggcgagaagacggcgctcaagctccttaaagaatgggggtcgttggagaacttgcttaagaatttagatcaggtcaaaccagagtcagtgcgtgagaagattcttgctcacctcgaagacctcaaattaagccgcgaattgtcccgtgtacgcaccgatttgccgctcgaagttgatttcggtcgccgccgcgaacctgactgggagggtcttaaagcgtttttagagcgtcttgaatttggttcgctcttgcatgaattcggccttttagaaagcccgttactggccgaagaagcaccttggccaccgcccgagggcgcgtttttaggttaccgtttgagtcgcccggaaccgatgtgggccgaattactggctcttgcagcgtctgcccagggacgtgtgtatcgcgcggaagaccctcatggtgcgctccgcggcctcttcgaagtccgtggactccttgccaaagacttagctgttgttgcattgcgcgaaggtcttgatttacctccgactgatgatccaatgcttcttgcgtacctcttggacccgtcaaacacgacgcccgaaggcgtagcccgtcgttacggcggcgagtggaccgaagatgcagcgaaacgcgcgttattggccgaacgtttgcacgaaaatttattaggacgtttgcaaggcgaggaacgtctcctctggctttacgaagaagtggagaaaccattgagtttggtgctcgcgcatatggaagctaccggtgtcaaattagacgtggcgtatttggagaatctcagccttgaagttgctgcccacatgcgccgcttggaggaagaagtattccgtttagcaggccgttcctttcgccttaactctcgcgatcagttagaacgtgtgttgttcgatgaacttggtctccctcctatcggcaagacagagaagaccggtaaacgtagcacttcagcggcggttttagaagctcttcgcgaagtccatcccattgtggacaagatcttgcagtaccgcgaaatggcgaaattgaaaggcacctatattgaccgtcttccggcattagtccacccgaaaacgggacgcctccatacccgcttcaaccaaacagccacggcgaccggtcgtttgtcctcctctgatccaaaccttcagaatattccagtacgtaccccattgggccagaagatccgccgtgcgtttgtagctgaggagggttggcgtttagtggccctcgattatcgtcaaattgaattacgtgtccttgcccatctttctggcgatgagaacctcatccgcgtgtttcaggaaggcaaagacattcacactcaaacggcaagctggatgtttggattatcagctgaagcgatcgatcctttgatgcgtcgtgcagcgaagaccatcaatttcggtgttctctacggtatgagtgcctttcgtttgtcgcaggaattaggcattccctatgaagaagctcaggcgttcattcagaaatactttcaaagctatcccaaagttaaagcatggatcgagaagactctccgtgaaggccgcacacgtggttacgtagagaccttatttggacgtcgccgctatgttcccgatttaaacgctcgcgtgaaaggcaagcgtgaagccgccgaacgcatggcgttcaacatgcctgtacagggcacggcagctgacctcatgaaacttgcaatggtgcgcctttttccacaattgcgtgaagttggtgcccgcatgctcttgcaggtccacgatgaactcttgttagaagcgccaaaagagcgtgcggaagaggtggcagccctcgcgaaagaagttatggaaggcgtgtggcccttagcggtgcctcttgaagtcgaagttggtattggcgaggattggctggctgccaaagga

SEQ ID NO: 5470 - protein, 841 aa, synthetic construct
  REGION 1..841: note = Variant of DNA polymerase I from Thermus sp. strain 2.9
MHHHHHHGGSGVLPVFEPKGRVLLVDGHHLAYRNFFALKGLTTSLGEPVQGVYGFAKSLLKALKEDGDVVIVVFDAKAPSFRHEAYEAYKAGRAPTPEDFPRQLALMKELVDLLGLERLEVPGFEADDVLATLAKKAEREGYEVQILTADRDLFQLLSPRISVLHPEGHRITPEWLWEKYGLRPEQWVDFRALAGDPSDNIPGVKGIGEKTALKLLKEWGSLENLLKNLDQVKPESVREKILAHLEDLKLSRELSRVRTDLPLEVDFGRRREPDWEGLKAFLERLEFGSLLHEFGLLESPLLAEEAPWPPPEGAFLGYRLSRPEPMWAELLALAASAQGRVYRAEDPHGALRGLFEVRGLLAKDLAVVALREGLDLPPTDDPMLLAYLLDPSNTTPEGVARRYGGEWTEDAAKRALLAERLHENLLGRLQGEERLLWLYEEVEKPLSLVLAHMEATGVKLDVAYLENLSLEVAAHMRRLEEEVFRLAGRSFRLNSRDQLERVLFDELGLPPIGKTEKTGKRSTSAAVLEALREVHPIVDKILQYREMAKLKGTYIDRLPALVHPKTGRLHTRFNQTATATGRLSSSDPNLQNIPVRTPLGQKIRRAFVAEEGWRLVALDYRQIELRVLAHLSGDENLIRVFQEGKDIHTQTASWMFGLSAEAIDPLMRRAAKTINFGVLYGMSAFRLSQELGIPYEEAQAFIQKYFQSYPKVKAWIEKTLREGRTRGYVETLFGRRRYVPDLNARVKGKREAAERMAFNMPVQGTAADLMKLAMVRLFPQLREVGARMLLQVHDELLLEAPKERAEEVAALAKEVMEGVWPLAVPLEVEVGIGEDWLAAKG

SEQ ID NO: 5471 - DNA, 2523 bp, synthetic construct
  misc_feature 1..2523: note = Variant of DNA polymerase I from Thermus sp. strain 2.9
  source 1..2523: mol_type = other DNA
atgcaccatcatcatcatcatggcggtagcggcgtgttaccggtgttcgagcctaaaggtcgcgtgcttctggttgatggccatcatctcgcgtatcgtaacttctttgccctgaaaggattaaccaccagcctgggcgagccggtacagggtgtctacggctttgcaaagtcgctcctgaaagctctgaaagaagacggtgatgtggtgattgttgtctttgatgcgaaagcgccaagttttcgccacgaagcgtacgaagcttacaaagccgggcgtgctccaacgccggaagactttcctcgccaattggcgcttatgaaggaattagtggatttgcttggcctcgaacgcttggaagttcccggtttcgaggcagacgacgtattagcgactctcgcaaagaaagccgaacgtgagggctatgaagtccagatcttgacagcagatcgcgatcttttccagcttttatctccgcgcatctcggtgttacacccggaagggcatcgtatcaccccggaatggctctgggagaaatatggtttgcgtcccgaacaatgggtggattttcgcgccttagcaggcgatccgagcgacaatattccgggagttaaaggtatcggcgagaagacggcgctcaagctccttaaagaatgggggtcgttggagaacttgcttaagaatttagatcaggtcaaaccagagtcagtgcgtgagaagattcttgctcacctcgaagacctcaaattaagccgcgaattgtcccgtgtacgcaccgatttgccgctcgaagttgatttcggtcgccgccgcgaacctgactgggagggtcttaaagcgtttttagagcgtcttgaatttggttcgctcttgcatgaattcggccttttagaaagcccgttactggccgaagaagcaccttggccaccgcccgagggcgcgtttttaggttaccgtttgagtcgcccggaaccgatgtgggccgaattactggctcttgcagcgtctgcccagggacgtgtgtatcgcgcggaagaccctcatggtgcgctccgcggcctcttcgaagtccgtggactccttgccaaagacttagctgttgttgcattgcgcgaaggtcttgatttacctccgactgatgatccaatgcttcttgcgtacctcttggacccgtcaaacacgacgcccgaaggcgtagcccgtcgttacggcggcgagtggaccgaagatgcagcgaaacgcgcgttattggccgaacgtttgcacgaaaatttattaggacgtttgcaaggcgaggaacgtctcctctggctttacgaagaagtggagaaaccattgagtcgcgtgctcgcgcatatggaagctaccggtgtcaaattagacgtggcgtatttggagaatcttagccttgaagttgctgcccacatgcgccgcttggaggaagaagtattccgtttagcaggccgttcctttcgccttaactctcgcgatcagttagaacgtgtgttgttcgatgaacttggtctccctcctatcggcaagacagagaagaccggtaaacgtagcacttcagcggcggttttagaagctcttcgcgaagtccatcccattgtggacaagatcttgcagtaccgcgaactggcgaaattgaaaggcacctatattgaccgtcttccggcattagtccacccgaaaacgggacgcctccatacccgcttcaaccaaacagccacggcgaccggtcgtttgtccagttctgatccaaaccttcagaatattccagtacgtaccccattgggccagaagatccgccgtgcgtttgtagctgaggagggttggcgtttagtggccctcgattatagtcaaattgaattacgtgtccttgcccatctttctggcgatgagaacctcatccgcgtgtttcaggaaggcaaagacattcacactcaaacggcaagctggatgtttggattatcagctgaagcgatcgatcctttgatgcgtcgtgcagcgaagaccatcaatttcggtgttctctacggtatgagtgcctttcgtttgtcgcaggaattaggcattccctatgaagaagctcaggcgttcattcagaaatactttcaaagctatcccaaagttaaagcatggatcgagaagactctcgaggaaggccgcacacgtggttacgtagagaccttatttggacgtcgccgctatgttcccgatttaaacgctcgcgtgaaaagcgtacgtgaagccgccgaacgcatggcgttcaacatgcctgtacagggcacggcagctgacctcatgaaacttgcaatggtgcgcctttttccacaattgcgtgaagttggtgcccgcatgctcttgcaggtccacgatgaactcttgttagaagcgccaaaagagcgtgcggaagaggtggcagccctcgcgaaagaagttatggaaggcgtgtggcccttagcggtgcctcttgaagtcgaagttggtattggcgaggattggctggctgccaaagga

SEQ ID NO: 5472 - protein, 841 aa, synthetic construct
  REGION 1..841: note = Variant of DNA polymerase I from Thermus sp. strain 2.9
MHHHHHHGGSGVLPVFEPKGRVLLVDGHHLAYRNFFALKGLTTSLGEPVQGVYGFAKSLLKALKEDGDVVIVVFDAKAPSFRHEAYEAYKAGRAPTPEDFPRQLALMKELVDLLGLERLEVPGFEADDVLATLAKKAEREGYEVQILTADRDLFQLLSPRISVLHPEGHRITPEWLWEKYGLRPEQWVDFRALAGDPSDNIPGVKGIGEKTALKLLKEWGSLENLLKNLDQVKPESVREKILAHLEDLKLSRELSRVRTDLPLEVDFGRRREPDWEGLKAFLERLEFGSLLHEFGLLESPLLAEEAPWPPPEGAFLGYRLSRPEPMWAELLALAASAQGRVYRAEDPHGALRGLFEVRGLLAKDLAVVALREGLDLPPTDDPMLLAYLLDPSNTTPEGVARRYGGEWTEDAAKRALLAERLHENLLGRLQGEERLLWLYEEVEKPLSRVLAHMEATGVKLDVAYLENLSLEVAAHMRRLEEEVFRLAGRSFRLNSRDQLERVLFDELGLPPIGKTEKTGKRSTSAAVLEALREVHPIVDKILQYRELAKLKGTYIDRLPALVHPKTGRLHTRFNQTATATGRLSSSDPNLQNIPVRTPLGQKIRRAFVAEEGWRLVALDYSQIELRVLAHLSGDENLIRVFQEGKDIHTQTASWMFGLSAEAIDPLMRRAAKTINFGVLYGMSAFRLSQELGIPYEEAQAFIQKYFQSYPKVKAWIEKTLEEGRTRGYVETLFGRRRYVPDLNARVKSVREAAERMAFNMPVQGTAADLMKLAMVRLFPQLREVGARMLLQVHDELLLEAPKERAEEVAALAKEVMEGVWPLAVPLEVEVGIGEDWLAAKG

SEQ ID NO: 5473 - DNA, 2523 bp, synthetic construct
  misc_feature 1..2523: note = Variant of DNA polymerase I from Thermus sp. strain 2.9
  source 1..2523: mol_type = other DNA
atgcaccatcatcatcatcatggcggtagcggcgtgttaccggtgttcgagcctaaaggtcgcgtgcttctggttgatggccatcatctcgcgtatcgtaacttctttgccctgaaaggattaaccaccagcctgggcgagccggtacagggtgtctacggctttgcaaagtcgctcctgaaagctctgaaagaagacggtgatgtggtgattgttgtctttgatgcgaaagcgccaagttttcgccacgaagcgtacgaagcttacaaagccgggcgtgctccaacgccggaagactttcctcgccaattggcgcttatgaaggaattagtggatttgcttggcctcgaacgcttggaagttcccggtttcgaggcagacgacgtattagcgactctcgcaaagaaagccgaacgtgagggctatgaagtccagatcttgacagcagatcgcgatcttttccagcttttatctccgcgcatctcggtgttacacccggaagggcatcgtatcaccccggaatggctctgggagaaatatggtttgcgtcccgaacaatgggtggattttcgcgccttagcaggcgatccgagcgacaatattccgggagttaaaggtatcggcgagaagacggcgctcaagctccttaaagaatgggggtcgttggagaacttgcttaagaatttagatcaggtcaaaccagagtcagtgcgtgagaagattcttgctcacctcgaagacctcaaattaagccgcgaattgtcccgtgtacgcaccgatttgccgctcgaagttgatttcggtcgccgccgcgaacctgactgggagggtcttaaagcgtttttagagcgtcttgaatttggttcgctcttgcatgaattcggccttttagaaagcccgttactggccgaagaagcaccttggccaccgcccgagggcgcgtttttaggttaccgtttgagtcgcccggaaccgatgtgggccgaattactggctcttgcagggtctgcccagggacgtgtgtatcgcgcggaagaccctcatggtgcgctccgcggcctcttcgaagtccgtggactccttgccaaagacttagctgttgttgcattgcgcgaaggtcttgatttacctccgactgatgatccaatgcttcttgcgtacctcttggacccgtcaaacacgacgcccgaaggcgtagcccgtcgttacggcggcgagtggaccgaagatgcagcgaaacgcgcgttattggccgaacgtttgcacgaaaatttattaggacgtttgcaaggcgaggaacgtctcctctggctttacgaagaagtggagaaaccattgagtcgcgtgctcgcgcatatggaagctaccggtgtcaaattagacgtggcgtatttggagaatctcagccttgaagttgctgcccacatgcgccgcttggaggaagaagtattccgtttagcaggccgttcctttcgccttaactctcgcgatcagttagaacgtgtgttgttcgatgaacttggtctccctcctatcggcaagacagagaagaccggtaaacgtagcacttcagcggcggttttagaagctcttcgcgaagtccatcccattgtggacaagatcttgcagtaccgcgaaatggcgaaattgaaaggcacctatattgaccgtcttccggcattagtccacccgaaaacgggacgcctccatacccgcttcaaccaaacagccacggcgaccggtcgtttgtcctcctctgatccaaaccttcagaatattccagtacgtaccccattgggccagaagatccgccgtgcgtttgtagctgaggagggttggcgtttagtggccctcgattatcgtcaaattgaattacgtgtccttgcccatctttctggcgatgagaacctcatccgcgtgtttcaggaaggcaaagacattcacactcaaacggcaagctggatgtttggattatcagctgaagcgatcgatcctttgatgcgtcgtgcagcgaagaccatcaatttcggtgttctctacggtatgagtgcctttcgtttgtcgcaggaattaggcattccctatgaagaagctcaggcgttcattcagaaatactttcaaagctatcccaaagttaaagcatggatcgagaagactctccgtgaaggccgcacacgtggttacgtagagaccttatttggacgtcgccgctatgttcccgatttaaacgctcgcgtgaaaggcaagcgtgaagccgccgaacgcatggcgttcaacatgcctgtacagggcacggcagctgacctcatgaaacttgcaatggtgcgcctttttccacaattgcgtgaagttggtgcccgcatgctcttgcaggtccacgatgaactcttgttagaagcgccaaaagagcgtgcggaagaggtggcagccctcgcgaaagaagttatggaaggcgtgtggcccttagcggtgcctcttgaagtcgaagttggtattggcgaggattggctggctgccaaagga

SEQ ID NO: 5474 - protein, 841 aa, synthetic construct
  REGION 1..841: note = Variant of DNA polymerase I from Thermus sp. strain 2.9
MHHHHHHGGSGVLPVFEPKGRVLLVDGHHLAYRNFFALKGLTTSLGEPVQGVYGFAKSLLKALKEDGDVVIVVFDAKAPSFRHEAYEAYKAGRAPTPEDFPRQLALMKELVDLLGLERLEVPGFEADDVLATLAKKAEREGYEVQILTADRDLFQLLSPRISVLHPEGHRITPEWLWEKYGLRPEQWVDFRALAGDPSDNIPGVKGIGEKTALKLLKEWGSLENLLKNLDQVKPESVREKILAHLEDLKLSRELSRVRTDLPLEVDFGRRREPDWEGLKAFLERLEFGSLLHEFGLLESPLLAEEAPWPPPEGAFLGYRLSRPEPMWAELLALAGSAQGRVYRAEDPHGALRGLFEVRGLLAKDLAVVALREGLDLPPTDDPMLLAYLLDPSNTTPEGVARRYGGEWTEDAAKRALLAERLHENLLGRLQGEERLLWLYEEVEKPLSRVLAHMEATGVKLDVAYLENLSLEVAAHMRRLEEEVFRLAGRSFRLNSRDQLERVLFDELGLPPIGKTEKTGKRSTSAAVLEALREVHPIVDKILQYREMAKLKGTYIDRLPALVHPKTGRLHTRFNQTATATGRLSSSDPNLQNIPVRTPLGQKIRRAFVAEEGWRLVALDYRQIELRVLAHLSGDENLIRVFQEGKDIHTQTASWMFGLSAEAIDPLMRRAAKTINFGVLYGMSAFRLSQELGIPYEEAQAFIQKYFQSYPKVKAWIEKTLREGRTRGYVETLFGRRRYVPDLNARVKGKREAAERMAFNMPVQGTAADLMKLAMVRLFPQLREVGARMLLQVHDELLLEAPKERAEEVAALAKEVMEGVWPLAVPLEVEVGIGEDWLAAKG

SEQ ID NO: 5475 - DNA, 2523 bp, synthetic construct
  misc_feature 1..2523: note = Variant of DNA polymerase I from Thermus sp. strain 2.9
  source 1..2523: mol_type = other DNA
atgcaccatcatcatcatcatggcggtagcggcgtgttaccggtgttcgagcctaaaggtcgcgtgcttctggttgatggccatcatctcgcgtatcgtaacttctttgccctgaaaggattaaccaccagcctgggcgagccggtacagggtgtctacggctttgcaaagtcgctcctgaaagctctgaaagaagacggtgatgtggtgattgttgtctttgatgcgaaagcgccaagttttcgccacgaagcgtacgaagcttacaaagccgggcgtgctccaacgccggaagactttcctcgccaattggcgcttatgaaggaattagtggatttgcttggcctcgaacgcttggaagttcccggtttcgaggcagacgacgtattagcgactctcgcaaagaaagccgaacgtgagggctatgaagtccagatcttgacagcagatcgcgatcttttccagcttttatctccgcgcatctcggtgttacacccggaagggcatcgtatcaccccggaatggctctgggagaaatatggtttgcgtcccgaacaatgggtggattttcgcgccttagcaggcgatccgagcgacaatattccgggagttaaaggtatcggcgagaagacggcgctcaagctccttaaagaatgggggtcgttggagaacttgcttaagaatttagatcaggtcaaaccagagtcagtgcgtgagaagattcttgctcacctcgaagacctcaaattaagccgcgaattgtcccgtgtacgcaccgatttgccgctcgaagttgatttcggtcgccgccgcgaacctgactgggagggtcttaaagcgtttttagagcgtcttgaatttggttcgctcttgcatgaattcggccttttagaaagcccgttactggccgaagaagcaccttggccaccgcccgagggcgcgtttttaggttaccgtttgagtcgcccggaaccgatgtgggccgaattactggctcttgcagcgtctgcccagggacgtgtgtatcgcgcggaagaccctcatggtgcgctccgcggcctcttcgaagtccgtggactccttgccaaagacttagctgttgttgcattgcgcgaaggtcttgatttacctccgactgatgatccaatgcttcttgcgtacctcttggacccgtcaaacacgacgcccgaaggcgtagcccgtcgttacggcggcgagtggaccgaagatgcagcgaaacgcgcgttattggccgaacgtttgcacgaaaatttattaggacgtttgcaaggcgaggaacgtctcctctggctttacgaagaagtggagaaaccattgagtcgcgtgctcgcgcatatggaagctaccggtgtcaaattagacgtggcgtatttggagaatctcagccttgaagttgctgcccacatgcgccgcttggaggaagaagtattccgtttagcaggccgttcctttcgccttaactctcgcgatcagttagaacgtgtgttgttcgatgaacttggtctccctcctatcggcaagacagagaagaccggtaaacgtagcacttcagcggcggttttagaagctcttcgcgaagtccatcccattgtggacaagatcttgcagtaccgcgaaatggcgaaattgaaaggcacctatattgaccgtcttccggcattagtccacccgaaaacgggacgcctccatacccgcttcaaccaaacagccacggcgaccggtcgtttgtcctcctctgatccaaaccttcagaatattccagtacgtaccccattgggccagaagatccgccgtgcgtttgtagctgaggagggttggcgtttagtggccctcgattatcgtcaaattgaattacgtgtccttgcccatctttctggcgatgagaacctcatccgcgtgtttcaggaaggcaaagacattcacactcaaacggcaagctggatgtttggattatcagctgaagcgatcgatcctttgatgcgtcgtgcagcgaagaccatcaatttcggtgttctctacggtatgagtgcctttcgtttgtcgcaggaattaggcattccctatgaagaagctcaggcgttcattcagaaatactttcaaagctatcccaaagttaaagcatggatcgagaagactctccgtgaaggccgcacacgtggttacgtagagaccttatttggacgtcgccgctatgttcccgcgttaaacgctcgcgtgaaaggcaagcgtgaagccgccgaacgcatggcgttcaacatgcctgtacagggcacggcagctgacctcatgaaacttgcaatggtgcgcctttttccacaattgcgtgaagttggtgcccgcatgctcttgcaggtccacgatgaactcttgttagaagcgccaaaagagcgtgcggaagaggtggcagccctcgcgaaagaagttatggaaggcgtgtggcccttagcggtgcctcttgaagtcgaagttggtattggcgaggattggctggctgccaaagga

SEQ ID NO: 5476 - protein, 841 aa, synthetic construct
  REGION 1..841: note = Variant of DNA polymerase I from Thermus sp. strain 2.9
MHHHHHHGGSGVLPVFEPKGRVLLVDGHHLAYRNFFALKGLTTSLGEPVQGVYGFAKSLLKALKEDGDVVIVVFDAKAPSFRHEAYEAYKAGRAPTPEDFPRQLALMKELVDLLGLERLEVPGFEADDVLATLAKKAEREGYEVQILTADRDLFQLLSPRISVLHPEGHRITPEWLWEKYGLRPEQWVDFRALAGDPSDNIPGVKGIGEKTALKLLKEWGSLENLLKNLDQVKPESVREKILAHLEDLKLSRELSRVRTDLPLEVDFGRRREPDWEGLKAFLERLEFGSLLHEFGLLESPLLAEEAPWPPPEGAFLGYRLSRPEPMWAELLALAASAQGRVYRAEDPHGALRGLFEVRGLLAKDLAVVALREGLDLPPTDDPMLLAYLLDPSNTTPEGVARRYGGEWTEDAAKRALLAERLHENLLGRLQGEERLLWLYEEVEKPLSRVLAHMEATGVKLDVAYLENLSLEVAAHMRRLEEEVFRLAGRSFRLNSRDQLERVLFDELGLPPIGKTEKTGKRSTSAAVLEALREVHPIVDKILQYREMAKLKGTYIDRLPALVHPKTGRLHTRFNQTATATGRLSSSDPNLQNIPVRTPLGQKIRRAFVAEEGWRLVALDYRQIELRVLAHLSGDENLIRVFQEGKDIHTQTASWMFGLSAEAIDPLMRRAAKTINFGVLYGMSAFRLSQELGIPYEEAQAFIQKYFQSYPKVKAWIEKTLREGRTRGYVETLFGRRRYVPALNARVKGKREAAERMAFNMPVQGTAADLMKLAMVRLFPQLREVGARMLLQVHDELLLEAPKERAEEVAALAKEVMEGVWPLAVPLEVEVGIGEDWLAAKG

SEQ ID NO: 5477 - DNA, 2523 bp, synthetic construct
  misc_feature 1..2523: note = Variant of DNA polymerase I from Thermus sp. strain 2.9
  source 1..2523: mol_type = other DNA
atgcaccatcatcatcatcatggcggtagcggcgtgttaccggtgttcgagcctaaaggtcgcgtgcttctggttgatggccatcatctcgcgtatcgtaacttctttgccctgaaaggattaaccaccagcctgggcgagccggtacagggtgtctacggctttgcaaagtcgctcctgaaagctctgaaagaagacggtgatgtggtgattgttgtctttgatgcgaaagcgccaagttttcgccacgaagcgtacgaagcttacaaagccgggcgtgctccaacgccggaagactttcctcgccaattggcgcttatgaaggaattagtggatttgcttggcctcgaacgcttggaagttcccggtttcgaggcagacgacgtattagcgactctcgcaaagaaagccgaacgtgagggctatgaagtccagatcttgacagcagatcgcgatcttttccagcttttatctccgcgcatctcggtgttacacccggaagggcatcgtatcaccccggaatggctctgggagaaatatggtttgcgtcccgaacaatgggtggattttcgcgccttagcaggcgatccgagcgacaatattccgggagttaaaggtatcggcgagaagacggcgctcaagctccttaaagaatgggggtcgttggagaacttgcttaagaatttagatcaggtcaaaccagagtcagtgcgtgagaagattcttgctcacctcgaagacctcaaattaagccgcgaattgtcccgtgtacgcaccgatttgccgctcgaagttgatttcggtcgccgccgcgaacctgactgggagggtcttaaagcgtttttagagcgtcttgaatttggttcgctcttgcatgaattcggccttttagaaagcccgttactggccgaagaagcaccttggccaccgcccgagggcgcgtttttaggttaccgtttgagtcgcccggaaccgatgtgggccgaattactggctcttgcagcgtctgcccagggacgtgtgtatcgcgcggaagaccctcatggtgcgctccgcggcctcttcgaagtccgtggactccttgccaaagacttagctgttgttgcattgcgcgaaggtcttgatttacctccgactgatgatccaatgcttcttgcgtacctcttggacccgtcaaacacgacgcccgaaggcgtagcccgtcgttacggcggcgagtggaccgaagatgcagcgaaacgcgcgttattggccgaacgtttgcacgaaaatttattaggacgtttgcaaggcgaggaacgtctcctctggctttacgaagaagtggagaaaccattgagtcgcgtgctcgcgcatatggaagctaccggtgtcaaattagacgtggcgtatttggagaatcttcaccttgaagtttgggcccacatgcgccgcttggaggaagaagtattccgtttagcaggccgttcctttcgccttaactctcgcgatcagttagaacgtgtgttgttcgatgaacttggtctccctcctatcggcaagacagagaagaccggtaaacgtagcacttcagcggcggttttagaagctcttcgcgaagtccatcccattgtggacaagatcttgcagtaccgcgaaatggcgaaattgaaaggcacctatattgaccgtcttccggcattagtccacccgaaaacgggacgcctccatacccgcttcaaccaaacagccacggcgaccggtcgtttgtcctcctctgatccaaaccttcagaatattccagtacgtaccccattgggccagaagatccgccgtgcgtttgtagctgaggagggttggcgtttagtggccctcgattatcgtcaaattgaattacgtgtccttgcccatctttctggcgatgagaacctcatccgcgtgtttcaggaaggcaaagacattcacactcaaacggcaagctggatgtttggattatcagctgaagcgatcgatcctttgatgcgtcgtgcagcgaagaccatcaatttcggtgttctctacggtatgagtgcctttcgtttgtcgcaggaattaggcattccctatgaagaagctcaggcgttcattcagaaatactttcaaagctatcccaaagttaaagcatggatcgagaagactctccgtgaaggccgcacacgtggttacgtagagaccttatttggacgtcgccgctatgttcccgatttaaacgctcgcgtgaaaggcaagcgtgaagccgccgaacgcatggcgttcaacatgcctgtacagggcacggcagctgacctcatgaaacttgcaatggtgcgcctttttccacaattgcgtgaagttggtgcccgcatgctcttgcaggtccacgatgaactcttgttagaagcgccaaaagagcgtgcggaagaggtggcagccctcgcgaaagaagttatggaaggcgtgtggcccttagcggtgcctcttgaagtcgaagttggtattggcgaggattggctggctgccaaagga

SEQ ID NO: 5478 - protein, 841 aa, synthetic construct
  REGION 1..841: note = Variant of DNA polymerase I from Thermus sp. strain 2.9
MHHHHHHGGSGVLPVFEPKGRVLLVDGHHLAYRNFFALKGLTTSLGEPVQGVYGFAKSLLKALKEDGDVVIVVFDAKAPSFRHEAYEAYKAGRAPTPEDFPRQLALMKELVDLLGLERLEVPGFEADDVLATLAKKAEREGYEVQILTADRDLFQLLSPRISVLHPEGHRITPEWLWEKYGLRPEQWVDFRALAGDPSDNIPGVKGIGEKTALKLLKEWGSLENLLKNLDQVKPESVREKILAHLEDLKLSRELSRVRTDLPLEVDFGRRREPDWEGLKAFLERLEFGSLLHEFGLLESPLLAEEAPWPPPEGAFLGYRLSRPEPMWAELLALAASAQGRVYRAEDPHGALRGLFEVRGLLAKDLAVVALREGLDLPPTDDPMLLAYLLDPSNTTPEGVARRYGGEWTEDAAKRALLAERLHENLLGRLQGEERLLWLYEEVEKPLSRVLAHMEATGVKLDVAYLENLHLEVWAHMRRLEEEVFRLAGRSFRLNSRDQLERVLFDELGLPPIGKTEKTGKRSTSAAVLEALREVHPIVDKILQYREMAKLKGTYIDRLPALVHPKTGRLHTRFNQTATATGRLSSSDPNLQNIPVRTPLGQKIRRAFVAEEGWRLVALDYRQIELRVLAHLSGDENLIRVFQEGKDIHTQTASWMFGLSAEAIDPLMRRAAKTINFGVLYGMSAFRLSQELGIPYEEAQAFIQKYFQSYPKVKAWIEKTLREGRTRGYVETLFGRRRYVPDLNARVKGKREAAERMAFNMPVQGTAADLMKLAMVRLFPQLREVGARMLLQVHDELLLEAPKERAEEVAALAKEVMEGVWPLAVPLEVEVGIGEDWLAAKG

SEQ ID NO: 5479 - DNA, 2523 bp, synthetic construct
  misc_feature 1..2523: note = Variant of DNA polymerase I from Thermus sp. strain 2.9
  source 1..2523: mol_type = other DNA
atgcaccatcatcatcatcatggcggtagcggcgtgttaccggtgttcgagcctaaaggtcgcgtgcttctggttgatggccatcatctcgcgtatcgtaacttctttgccctgaaaggattaaccaccagccgcggcgagccggtacagggtgtctacggctttgcaaagtcgctcctgaaagctctgaaagaagacggtgatgtggtgattgttgtctttgatgcgaaagcgccaagttttcgccacgaagcgtacgaagcttacaaagccgggcgtgctccaacgccggaagactttcctcgccaattggcgcttatgaaggaattagtggatttgcttggcctcgaacgcttggaagttcccggtttcgaggcagacgacgtattagcgactctcgcaaagaaagccgaacgtgagggctatgaagtccagatcttgacagcagatcgcgatcttttccagcttttatctccgcgcatctcggtgttacacccggaagggcatcgtatcaccccggaatggctctgggagaaatatggtttgcgtcccgaacaatgggtggattttcgcgccttagcaggcgatccgagcgacaatattccgggagttaaaggtatcggcgagaagacggcgctcaagctccttaaagaatgggggtcgttggagaacttgcttaagaatttagatcaggtcaaaccagagtcagtgcgtgagaagattcttgctcacctcgaagacctcaaattaagccgcgaattgtcccgtgtacgcaccgatttgccgctcgaagttgatttcggtcgccgccgcgaacctgactgggagggtcttaaagcgtttttagagcgtcttgaatttggttcgctcttgcatgaattcggccttttagaaagcccgttactggccgaagaagcaccttggccaccgcccgagggcgcgtttttaggttaccgtttgagtcgcccggaaccgatgtgggccgaattactggctcttgcagcgtctgcccagggacgtgtgtatcgcgcggaagaccctcatggtgcgctccgcggcctcttcgaagtccgtggactccttgccaaagacttagctgttgttgcattgcgcgaaggtcttgatttacctccgactgatgatccaatgcttcttgcgtacctcttggacccgtcaaacacgacgcccgaaggcgtagcccgtcgttacggcggcgagtggaccgaagatgcagcgaaacgcgcgttattggccgaacgtttgcacgcaaatttattaggacgtttgcaaggcgaggaacgtctcctctggctttacgaagaagtggagaaaccattgagtcgcgtgctcgcgcatatggaagctaccggtgtcaaattagacgtggcgtatttggagaatctcagccttgaagttgctgcccacatgcgccgcttggaggaagaagtattccgtttagcaggccactcctttcgccttaactctcgcgatcagttagaacgtgtgttgttcgatgaacttggtctccctcctatcggcaagacagagaagaccggtaaacgtagcacttcagcggcggttttagaagctcttcgcgaagtccatcccattgtggacaagatcttgcagtaccgcgaaatggcgaaattgaaaggcacctatattgaccctcttccggcattagtccacccgaaaacgggacgcctccatacccgcttcaaccaaacagccacggcgaccggtcgtttgtcctcctctgatccaaaccttcagaatattccagtacgtaccccattgggccagaagatccgccgtgcgtttgtagctgaggagggttggcgtttagtggccctcgattatcgtcaaattgaattacgtgtccttgcccatctttctggcgatgagaacctcatccgcgtgtttcaggaaggcaaagacattcacactcaaacggcaagctggatgtttggattatcagctgaagcgatcgatcctttgatgcgtcgtgcagcgaagaccatcaatttcggtgttctctacggtatgagtgcctttcgtttgtcgcaggaattaggcattccctatgaagaagctcaggcgttcattcagaaatactttcaaagctatcccaaagttaaagcatggatcgagaagactctccgcgaaggccgcacacgtggttacgtagagaccttatttggacgtcgccgctatgttcccgatttaaacgctcgcgtgaaaggcaagcgtgaagccgccgaacgcatggcgttcaacatgcctgtacagggcacggcagctgacctcatgaaacttgcaatggtgcgcctttttccacaattgcgtgaagttggtgcccgcatgctcttgcaggtccacgatgaactcttgttagaagcgccaaaagagcgtgcggaagaggtggcagccctcgcgaaagaagttatggaaggcgtgtggcccttagcggtgcctcttgaagtcgaagttggtattggcgaggattggctggctgccaaagga

SEQ ID NO: 5480 - protein, 841 aa, synthetic construct
  REGION 1..841: note = Variant of DNA polymerase I from Thermus sp. strain 2.9
MHHHHHHGGSGVLPVFEPKGRVLLVDGHHLAYRNFFALKGLTTSRGEPVQGVYGFAKSLLKALKEDGDVVIVVFDAKAPSFRHEAYEAYKAGRAPTPEDFPRQLALMKELVDLLGLERLEVPGFEADDVLATLAKKAEREGYEVQILTADRDLFQLLSPRISVLHPEGHRITPEWLWEKYGLRPEQWVDFRALAGDPSDNIPGVKGIGEKTALKLLKEWGSLENLLKNLDQVKPESVREKILAHLEDLKLSRELSRVRTDLPLEVDFGRRREPDWEGLKAFLERLEFGSLLHEFGLLESPLLAEEAPWPPPEGAFLGYRLSRPEPMWAELLALAASAQGRVYRAEDPHGALRGLFEVRGLLAKDLAVVALREGLDLPPTDDPMLLAYLLDPSNTTPEGVARRYGGEWTEDAAKRALLAERLHANLLGRLQGEERLLWLYEEVEKPLSRVLAHMEATGVKLDVAYLENLSLEVAAHMRRLEEEVFRLAGHSFRLNSRDQLERVLFDELGLPPIGKTEKTGKRSTSAAVLEALREVHPIVDKILQYREMAKLKGTYIDPLPALVHPKTGRLHTRFNQTATATGRLSSSDPNLQNIPVRTPLGQKIRRAFVAEEGWRLVALDYRQIELRVLAHLSGDENLIRVFQEGKDIHTQTASWMFGLSAEAIDPLMRRAAKTINFGVLYGMSAFRLSQELGIPYEEAQAFIQKYFQSYPKVKAWIEKTLREGRTRGYVETLFGRRRYVPDLNARVKGKREAAERMAFNMPVQGTAADLMKLAMVRLFPQLREVGARMLLQVHDELLLEAPKERAEEVAALAKEVMEGVWPLAVPLEVEVGIGEDWLAAKG

SEQ ID NO: 5481 - DNA, 2523 bp, synthetic construct
  misc_feature 1..2523: note = Variant of DNA polymerase I from Thermus sp. strain 2.9
  source 1..2523: mol_type = other DNA
atgcaccatcatcatcatcatggcggtagcggcgtgttaccggtgttcgagcctaaaggtcgcgtgcttctggttgatggccatcatctcgcgtatcgtaacttctttgccctgaaaggattaaccaccagccgcggcgagccggtacagggtgtctacggctttgcaaagtcgctcctgaaagctctgaaagaagacggtgatgtggtgattgttgtctttgatgcgaaagcgccaagttttcgccacgaagcgtacgaagcttacaaagccgggcgtgctccaacgccggaagactttcctcgccaattggcgcttatgaaggaattagtggatttgcttggcctcgaacgcttggaagttcccggtttcgaggcagacgacgtattagcgactctcgcaaagaaagccgaacgtgagggctatgaagtccagatcttgacagcagatcgcgatcttttccagcttttatctccgcgcatctcggtgttacacccggaagggcatcgtatcaccccggaatggctctgggagaaatatggtttgcgtcccgaacaatgggtggattttcgcgccttagcaggcgatccgagcgacaatattccgggagttaaaggtatcggcgagaagacggcgctcaagctccttaaagaatgggggtcgttggagaacttgcttaagaatttagatcaggtcaaaccagagtcagtgcgtgagaagattcttgctcacctcgaagacctcaaattaagccgcgaattgtcccgtgtacgcaccgatttgccgctcgaagttgatttcggtcgccgccgcgaacctgactgggagggtcttaaagcgtttttagagcgtcttgaatttggttcgctcttgcatgaattcggccttttagaaagcccgttactggccgaagaagcaccttggccaccgcccgagggcgcgtttttaggttaccgtttgagtcgcccggaaccgatgtgggccgaattactggctcttgcagcgtctgcccagggacgtgtgtatcgcgcggaagaccctcatggtgcgctccgcggcctcttcgaagtccgtggactccttgccaaagacttagctgttgttgcattgcgcgaaggtcttgatttacctccgactgatgatccaatgcttcttgcgtacctcttggacccgtcaaacacgacgcccgaaggcgtagcccgtcgttacggcggcgagtggaccgaagatgcagcgaaacgcgcgttattggccgaacgtttgcacgcaaatttattaggacgtttgcaaggcgaggaacgtctcctctggctttacgaagaagtggagaaaccattgagtcgcgtgctcgcgcatatggaagctaccggtgtcaaattagacgtggcgtatttggaggcccttagccttgaagttgctgcccacatgcgccgcttggaggaagaagtattccgtttagcaggccgttcctttcgccttaactctcgcgatcagttagaacgtgtgttgttcgatgaacttggtctccctcctatcggcaagacagagaagaccggtaaacgtagcacttcagcggcggttttagaagctcttcgcgaagtccatcccattgtggacaagatcttgcagtaccgcgaaatggcgaaattgaaaggcacctatattgaccgtcttccggcattagtccacccgaaaacgggacgcctccatacccgcttcaaccaaacagccacggcgaccggtcgtttgtccagttctgatccaaaccttcagaatattccagtacgtaccccattgggccagaagatccgccgtgcgtttgtagctgaggagggttggcgtttagtggccctcgattatagtcaaattgaattacgtgtccttgcccatctttctggcgatgagaacctcatccgcgtgtttcaggaaggcaaagacattcacactcaaacggcaagctggatgtttggattatcagctgaagcgatcgatcctttgatgcgtcgtgcagcgaagaccatcaatttcggtgttctctacggtatgagtgcctttcgtttgtcgcaggaattaggcattccctatgaagaagctcaggcgttcattcagaaatactttcaaagctatcccaaagttaaagcatggatcgagaagactctccgcgaaggccgcacacgtggttacgtagagaccttatttggacgtcgccgctatgttcccgatttaaacgctcgcgtgaaaggcaagcgtgaagccgccgaacgcatggcgttcaacatgcctgtacagggcacggcagctgacctcatgaaacttgcaatggtgcgcctttttccacaattgcgtgaagttggtgcccgcatgctcttgcaggtccacgatgaactcttgttagaagcgccaaaagagcgtgcggaagaggtggcagccctcgcgaaagaagttatggaaggcgtgtggcccttagcggtgcctcttgaagtcgaagttggtattggcgaggattggctggctgccaaagga

SEQ ID NO: 5482 - protein, 841 aa, synthetic construct
  REGION 1..841: note = Variant of DNA polymerase I from Thermus sp. strain 2.9
MHHHHHHGGSGVLPVFEPKGRVLLVDGHHLAYRNFFALKGLTTSRGEPVQGVYGFAKSLLKALKEDGDVVIVVFDAKAPSFRHEAYEAYKAGRAPTPEDFPRQLALMKELVDLLGLERLEVPGFEADDVLATLAKKAEREGYEVQILTADRDLFQLLSPRISVLHPEGHRITPEWLWEKYGLRPEQWVDFRALAGDPSDNIPGVKGIGEKTALKLLKEWGSLENLLKNLDQVKPESVREKILAHLEDLKLSRELSRVRTDLPLEVDFGRRREPDWEGLKAFLERLEFGSLLHEFGLLESPLLAEEAPWPPPEGAFLGYRLSRPEPMWAELLALAASAQGRVYRAEDPHGALRGLFEVRGLLAKDLAVVALREGLDLPPTDDPMLLAYLLDPSNTTPEGVARRYGGEWTEDAAKRALLAERLHANLLGRLQGEERLLWLYEEVEKPLSRVLAHMEATGVKLDVAYLEALSLEVAAHMRRLEEEVFRLAGRSFRLNSRDQLERVLFDELGLPPIGKTEKTGKRSTSAAVLEALREVHPIVDKILQYREMAKLKGTYIDRLPALVHPKTGRLHTRFNQTATATGRLSSSDPNLQNIPVRTPLGQKIRRAFVAEEGWRLVALDYSQIELRVLAHLSGDENLIRVFQEGKDIHTQTASWMFGLSAEAIDPLMRRAAKTINFGVLYGMSAFRLSQELGIPYEEAQAFIQKYFQSYPKVKAWIEKTLREGRTRGYVETLFGRRRYVPDLNARVKGKREAAERMAFNMPVQGTAADLMKLAMVRLFPQLREVGARMLLQVHDELLLEAPKERAEEVAALAKEVMEGVWPLAVPLEVEVGIGEDWLAAKG

SEQ ID NO: 5483 - DNA, 2523 bp, synthetic construct
  misc_feature 1..2523: note = Variant of DNA polymerase I from Thermus sp. strain 2.9
  source 1..2523: mol_type = other DNA
atgcaccatcatcatcatcatggcggtagcggcgtgttaccggtgttcgagcctaaaggtcgcgtgcttctggttgatggccatcatctcgcgtatcgtaacttctttgccctgaaaggattaaccaccagccgcggcgagccggtacagggtgtctacggctttgcaaagtcgctcctgaaagctctgaaagaagacggtgatgtggtgattgttgtctttgatgcgaaagcgccaagttttcgccacgaagcgtacgaagcttacaaagccgggcgtgctccaacgccggaagactttcctcgccaattggcgcttatgaaggaattagtggatttgcttggcctcgaacgcttggaagttcccggtttcgaggcagacgacgtattagcgactctcgcaaagaaagccgaacgtgagggctatgaagtccagatcttgacagcagatcgcgatcttttccagcttttatctccgcgcatctcggtgttacacccggaagggcatcgtatcaccccggaatggctctgggagaaatatggtttgcgtcccgaacaatgggtggattttcgcgccttagcaggcgatccgagcgacaatattccgggagttaaaggtatcggcgagaagacggcgctcaagctccttaaagaatgggggtcgttggagaacttgcttaagaatttagatcaggtcaaaccagagtcagtgcgtgagaagattcttgctcacctcgaagacctcaaattaagccgcgaattgtcccgtgtacgcaccgatttgccgctcgaagttgatttcggccgccgccgcgaacctgactgggagggtcttaaagcgtttttagagcgtcttgaatttggttcgctcttgcatgaattcggccttttagaaagcccgttactggccgaagaagcaccttggccaccgcccgagggcgcgtttttaggttaccgtttgagtcgcccggaaccgatgtgggccgaattactggctcttgcagcgtctgcccagggacgtgtgtatcgcgcggaagaccctcatggtgcgctccgcggcctcttcgaagtccgtggactccttgccaaagacttagctgttgttgcattgcgcgaaggtcttgatttacctccgactgatgatccaatgcttcttgcgtacctcttggacccgtcaaacacgacgcccgaaggcgtagcccgtcgttacggcggcgagtggaccgaagatgcagcgaaacgcgcgttattggccgaacgtttgcacgaaaatttattaggacgtttgcaaggcgaggaacgtctcctctggctttacgaagaagtggagaaaccattgagtcgcgtgctcgcgcatatggaagctaccggtgtcaaattagacgtggcgtatttggagaatctcagccttgaagttgctgccgaaatgcgccgcttggaggaagaagtattccgtttagcaggccactcctttcgccttaactctcgcgatcagttagaacgtgtgttgttcgatgaacttggtctccctcctatcggcaagacagagaagaccggtaaacgtagcacttcagcggcggttttagaagctcttcgcgaagtccatcccattgtggacaagatcttgcagtaccgcgaactggcgaaattgaaaggcacctatattgaccgtcttccggcattagtccacccgaaaacgggacgcctccatacccgcttcaaccaaacagccacggcgaccggtcgtttgtccagttctgatccaaaccttcagaatattccagtacgtaccccattgggccagaagatccgccgtgcgtttgtagctgaggagggttggcgtttagtggccctcgattatcgtcaaattgaattacgtgtccttgcccatctttctggcgatgagaacctcatccgcgtgtttcaggaaggcaaagacattcacactcaaacggcaagctggatgtttggattatcagctgaagcgatcgatcctttgatgcgtcgtgcagcgaagaccatcaatttcggtgttctctacggtatgagtgcctttcgtttgtcgcaggaattaggcattccctatgaagaagctcaggcgttcattcagaaatactttcaaagctatcccaaagttaaagcatggatcgagaagactctccgcgaaggccgcacacgtggttacgtagagaccttatttggacgtcgccgctatgttcccgatttaaacgctcgcgtgaaaggcgtacgtgaagccgccgaacgcatggcgttcaacatgcctgtacagggcacggcagctgacctcatgaaacttgcaatggtgcgcctttttccacaattgcgtgaagttggtgcccgcatgctcttgcaggtccacgatgaactcttgttagaagcgccaaaagagcgtgcggaagaggtggcagccctcgcgaaagaagttatggaaggcgtgtggcccttagcggtgcctcttgaagtcgaagttggtattggcgaggattggctggctgccaaagga

SEQ ID NO: 5484 - protein, 841 aa, synthetic construct
  REGION 1..841: note = Variant of DNA polymerase I from Thermus sp. strain 2.9
MHHHHHHGGSGVLPVFEPKGRVLLVDGHHLAYRNFFALKGLTTSRGEPVQGVYGFAKSLLKALKEDGDVVIVVFDAKAPSFRHEAYEAYKAGRAPTPEDFPRQLALMKELVDLLGLERLEVPGFEADDVLATLAKKAEREGYEVQILTADRDLFQLLSPRISVLHPEGHRITPEWLWEKYGLRPEQWVDFRALAGDPSDNIPGVKGIGEKTALKLLKEWGSLENLLKNLDQVKPESVREKILAHLEDLKLSRELSRVRTDLPLEVDFGRRREPDWEGLKAFLERLEFGSLLHEFGLLESPLLAEEAPWPPPEGAFLGYRLSRPEPMWAELLALAASAQGRVYRAEDPHGALRGLFEVRGLLAKDLAVVALREGLDLPPTDDPMLLAYLLDPSNTTPEGVARRYGGEWTEDAAKRALLAERLHENLLGRLQGEERLLWLYEEVEKPLSRVLAHMEATGVKLDVAYLENLSLEVAAEMRRLEEEVFRLAGHSFRLNSRDQLERVLFDELGLPPIGKTEKTGKRSTSAAVLEALREVHPIVDKILQYRELAKLKGTYIDRLPALVHPKTGRLHTRFNQTATATGRLSSSDPNLQNIPVRTPLGQKIRRAFVAEEGWRLVALDYRQIELRVLAHLSGDENLIRVFQEGKDIHTQTASWMFGLSAEAIDPLMRRAAKTINFGVLYGMSAFRLSQELGIPYEEAQAFIQKYFQSYPKVKAWIEKTLREGRTRGYVETLFGRRRYVPDLNARVKGVREAAERMAFNMPVQGTAADLMKLAMVRLFPQLREVGARMLLQVHDELLLEAPKERAEEVAALAKEVMEGVWPLAVPLEVEVGIGEDWLAAKG

SEQ ID NO: 5485 - DNA, 2523 bp, synthetic construct
  misc_feature 1..2523: note = Variant of DNA polymerase I from Thermus sp. strain 2.9
  source 1..2523: mol_type = other DNA
atgcaccatcatcatcatcatggcggtagcggcgtgttaccggtgttcgagcctaaaggtcgcgtgcttctggttgatggccatcatctcgcgtatcgtaacttctttgccctgaaaggattaaccaccagcctgggcgagccggtacagggtgtctacggctttgcaaagtcgctcctgaaagctctgaaagaagacggtgatgtggtgattgttgtctttgatgcgaaagcgccaagttttcgccacgaagcgtacgaagcttacaaagccgggcgtgctccaacgccggaagactttcctcgccaattggcgcttatgaaggaattagtggatttgcttggcctcgaacgcttggaagttcccggtttcgaggcagacgacgtattagcgactctcgcaaagaaagccgaacgtgagggctatgaagtccagatcttgacagcagatcgcgatcttttccagcttttatctccgcgcatctcggtgttacacccggaagggcatcgtatcaccccggaatggctctgggagaaatatggtttgcgtcccgaacaatgggtggattttcgcgccttagcaggcgatccgagcgacaatattccgggagttaaaggtatcggcgagaagacggcgctcaagctccttaaagaatgggggtcgttggagaacttgcttaagaatttagatcaggtcaaaccagagtcagtgcgtgagaagattcttgctcacctcgaagacctcaaattaagccgcgaattgtcccgtgtacgcaccgatttgccgctcgaagttgatttcggtcgccgccgcgaacctgactgggagggtcttaaagcgtttttagagcgtcttgaatttggttcgctcttgcatgaattcggccttttagaaagcccgttactggccgaagaagcaccttggccaccgcccgagggcgcgtttttaggttaccgtttgagtcgcccggaaccgatgtgggccgaattactggctcttgcagcgtctgcccagggacgtgtgtatcgcgcggaagaccctcatggtgcgctccgcggcctcttcgaagtccgtaccctccttgccaaagacttagctgttgttgcattgcgcgaaggtcttgatttacctccgactgatgatccaatgcttcttgcgtacctcttggacccgtcaaacacgacgcccgaaggcgtagcccgtcgttacggcggcgagtggaccgaagatgcagcgaaacgcgcgttattggccgaacgtttgcacgaaaatttattaggacgtttgcaaggcgaggaacgtctcctctggctttacgaagaagtggagaaaccattgagtcgcgtgctcgcgcatatggaagctaccggtgtcaaattagacgtggcgtatttggagaatctcagccttgaagttgctgcccacatgcgccgcttggaggaagaagtattccgtttagcaggccgttcctttcgccttaactctcgcgatcagttagaacgtgtgttgttcgatgaacttggtctccctcctatcggcaagacagagaagaccggtaaacgtagcacttcagcggcggttttagaagctcttcgcgaagtccatcccattgtggacaagatcttgcagtaccgcgaaatggcgaaattgaaaggcacctatattgaccgtcttccggcattagtccacccgaaaacgggacgcctccatacccgcttcaaccaaacagccacggcgaccggtcgtttgtcctcctctgatccaaaccttcagaatattccagtacgtaccccattgggccagaagatccgccgtgcgtttgtagctgagccgggttgggcgttagtggccctcgattatcgtcaaattgaattacgtgtccttgcccatctttctggcgatgagaacctcatccgcgtgtttcaggaaggcaaagacattcacactcaaacggcaagctggatgtttggattatcagctgaagcgatcgatcctttgatgcgtcgtgcagcgaagaccatcaatttcggtgttctctacggtatgagtgcctttcgtttgtcgcaggaattaggcattcccctggaagaagctcagggtttcattcagaaatactttcaaagctatcccaaagttaaagcatggatcgagaagactctccgtgaaggccgcacacgtggttacgtagagaccttatttggacgtcgccgctatgttcccgatttaaacggtcgcgtgaaaggcaagcgtgaagccgccgaacgcatggcgttcaacatgcctgtacagggcacggcagctgacctcatgaaacttgcaatggtgcgcctttttccacaattgcgtgaagttggtgcccgcatgctgttgcaggtccacgatgaactcttgttagaagcgccaaaagagcgtgcggaagaggtggcagccctcgcgaaagaagttatggaaggcgtgtggcccttagcggtgcctcttgaagtcgaagttggtattggcgaggattggctggctgccaaagga

SEQ ID NO: 5486 - protein, 841 aa, synthetic construct
  REGION 1..841: note = Variant of DNA polymerase I from Thermus sp. strain 2.9
MHHHHHHGGSGVLPVFEPKGRVLLVDGHHLAYRNFFALKGLTTSLGEPVQGVYGFAKSLLKALKEDGDVVIVVFDAKAPSFRHEAYEAYKAGRAPTPEDFPRQLALMKELVDLLGLERLEVPGFEADDVLATLAKKAEREGYEVQILTADRDLFQLLSPRISVLHPEGHRITPEWLWEKYGLRPEQWVDFRALAGDPSDNIPGVKGIGEKTALKLLKEWGSLENLLKNLDQVKPESVREKILAHLEDLKLSRELSRVRTDLPLEVDFGRRREPDWEGLKAFLERLEFGSLLHEFGLLESPLLAEEAPWPPPEGAFLGYRLSRPEPMWAELLALAASAQGRVYRAEDPHGALRGLFEVRTLLAKDLAVVALREGLDLPPTDDPMLLAYLLDPSNTTPEGVARRYGGEWTEDAAKRALLAERLHENLLGRLQGEERLLWLYEEVEKPLSRVLAHMEATGVKLDVAYLENLSLEVAAHMRRLEEEVFRLAGRSFRLNSRDQLERVLFDELGLPPIGKTEKTGKRSTSAAVLEALREVHPIVDKILQYREMAKLKGTYIDRLPALVHPKTGRLHTRFNQTATATGRLSSSDPNLQNIPVRTPLGQKIRRAFVAEPGWALVALDYRQIELRVLAHLSGDENLIRVFQEGKDIHTQTASWMFGLSAEAIDPLMRRAAKTINFGVLYGMSAFRLSQELGIPLEEAQGFIQKYFQSYPKVKAWIEKTLREGRTRGYVETLFGRRRYVPDLNGRVKGKREAAERMAFNMPVQGTAADLMKLAMVRLFPQLREVGARMLLQVHDELLLEAPKERAEEVAALAKEVMEGVWPLAVPLEVEVGIGEDWLAAKG

SEQ ID NO: 5487 - DNA, 2523 bp, synthetic construct
  misc_feature 1..2523: note = Variant of DNA polymerase I from Thermus sp. strain 2.9
  source 1..2523: mol_type = other DNA
atgcaccatcatcatcatcatggcggtagcggcgtgttaccggtgttcgagcctaaaggtcgcgtgcttctggttgatggccatcatctcgcgtatcgtaacttctttgccctgaaaggattaaccaccagcctgggcgagccggtacagggtgtctacggctttgcaaagtcgctcctgaaagctctgaaagaagacggtgatgtggtgattgttgtctttgatgcgaaagcgccaagttttcgccacgaagcgtacgaagcttacaaagccgggcgtgctccaacgccggaagactttcctcgccaattggcgcttatgaaggaattagtggatttgcttggcctcgaacgcttggaagttcccggtttcgaggcagacgacgtattagcgactctcgcaaagaaagccgaacgtgagggctatgaagtccagatcttgacagcagatcgcgatcttttccagcttttatctccgcgcatctcggtgttacacccggaagggcatcgtatcaccccggaatggctctgggagaaatatggtttgcgtcccgaacaatgggtggattttcgcgccttagcaggcgatccgagcgacaatattccgggagttaaaggtatcggcgagaagacggcgctcaagctccttaaagaatgggggtcgttggagaacttgcttaagaatttagatcaggtcaaaccagagtcagtgcgtgagaagattcttgctcacctcgaagacctcaaattaagccgcgaattgtcccgtgtacgcaccgatttgccgctcgaagttgatttcggtcgccgccgcgaacctgactgggagggtcttaaagcgtttttagagcgtcttgaatttggttcgctcttgcatgaattcggccttttagaaagcccgttactggccgaagaagcaccttggccaccgcccgagggcgcgtttttaggttaccgtttgagtcgcccggaaccgatgtgggccgaattactggctcttgcagcgtctgcccagggacgtgtgtatcgcgcggaagaccctcatggtgcgctccgcggcctcttcgaagtccgtggactccttgccaaagacttagctgttgttgcattgcgcgaaggtcttgatttacctccgactgatgatccaatgcttcttgcgtacctcttggacccgtcaaacacgacgcccgaaggcgtagcccgtcgttacggcggcgagtggaccgaagatgcagcgaaacgcgcgttattggccgaacgtttgcacgaaaatttattaggacgtttgcaaggcgagcagcgtctcctctggctttacgaagaagtggagaaaccattgagtcgcgtgctcgcgcatatggaagctaccggtgtcaaattagacgtggcgtatttggagaatctcagccttgaagttgctgcccacatgcgccgcttggaggaagaagtattccgtttagcaggccgttcctttcgccttaactctcgcgatcagttagaacgtgtgttgttcgatgaacttggtctccctcctatcggcaagacagagaagaccggtaaacgtagcacttcagcggcggttttagaagctcttcgcgaagtccatcccattgtggacaagatcttgcagtaccgcgaaatggcgaaattgaaaggcacctatattgaccgtcttccggcattagtccacccgaaaacgggacgcctccatacccgcttcaaccaaacagccacggcgaccggtcgtttgtcctcctctgatccaaaccttcagaatattccagtacgtaccccattgggccagaagatccgccgtgcgtttgtagctgaggagggttggcgtttagtggccctcgattatcgtcaaattgaattacgtgtccttgcccatctttctggcgatgagaacctcatccgcgtgtttcaggaaggcaaagacattcacactcaaacggcaagctggatgtttggattatcagctgaagcgatcgatcctttgatgcgtcgtgcagcgaagaccatcaatttcggtgttctctacggtatgagtgcctttcgtttgtcgcaggaattaggcattccctatgaagaagctcaggcgttcattcagaaatactttcaaagctatcccaaagttaaagcatggatcgagaagactctccgtgaaggccgcacacgtggttacgtagagaccttatttggacgtcgccgctatgttcccgatttaaacgctcgcgtgaaaggcaagcgtgaagccgccgaacgcatggcgttcaacatgcctgtacagggcacggcagctgacctcatgaaacttgcaatggtgcgcctttttccacaattgcgtgaagttggtgcccgcatgctcttgcaggtccacgatgaactcttgttagaagcgccaaaagagcgtgcggaagaggtggcagccctcgcgaaagaagttatggaaggcgtgtggcccttagcggtgcctcttgaagtcgaagttggtattggcgaggattggctggctgccaaagga

SEQ ID NO: 5488 - protein, 841 aa, synthetic construct
  REGION 1..841: note = Variant of DNA polymerase I from Thermus sp. strain 2.9
MHHHHHHGGSGVLPVFEPKGRVLLVDGHHLAYRNFFALKGLTTSLGEPVQGVYGFAKSLLKALKEDGDVVIVVFDAKAPSFRHEAYEAYKAGRAPTPEDFPRQLALMKELVDLLGLERLEVPGFEADDVLATLAKKAEREGYEVQILTADRDLFQLLSPRISVLHPEGHRITPEWLWEKYGLRPEQWVDFRALAGDPSDNIPGVKGIGEKTALKLLKEWGSLENLLKNLDQVKPESVREKILAHLEDLKLSRELSRVRTDLPLEVDFGRRREPDWEGLKAFLERLEFGSLLHEFGLLESPLLAEEAPWPPPEGAFLGYRLSRPEPMWAELLALAASAQGRVYRAEDPHGALRGLFEVRGLLAKDLAVVALREGLDLPPTDDPMLLAYLLDPSNTTPEGVARRYGGEWTEDAAKRALLAERLHENLLGRLQGEQRLLWLYEEVEKPLSRVLAHMEATGVKLDVAYLENLSLEVAAHMRRLEEEVFRLAGRSFRLNSRDQLERVLFDELGLPPIGKTEKTGKRSTSAAVLEALREVHPIVDKILQYREMAKLKGTYIDRLPALVHPKTGRLHTRFNQTATATGRLSSSDPNLQNIPVRTPLGQKIRRAFVAEEGWRLVALDYRQIELRVLAHLSGDENLIRVFQEGKDIHTQTASWMFGLSAEAIDPLMRRAAKTINFGVLYGMSAFRLSQELGIPYEEAQAFIQKYFQSYPKVKAWIEKTLREGRTRGYVETLFGRRRYVPDLNARVKGKREAAERMAFNMPVQGTAADLMKLAMVRLFPQLREVGARMLLQVHDELLLEAPKERAEEVAALAKEVMEGVWPLAVPLEVEVGIGEDWLAAKG

SEQ ID NO: 5489 - DNA, 2523 bp, synthetic construct
  misc_feature 1..2523: note = Variant of DNA polymerase I from Thermus sp. strain 2.9
  source 1..2523: mol_type = other DNA
atgcaccatcatcatcatcatggcggtagcggcgtgttaccggtgttcgagcctaaaggtcgcgtgcttctggttgatggccatcatctcgcgtatcgtaacttctttgccctgaaaggattaaccaccagcctgggcgagccggtacagggtgtctacggctttgcaaagtcgctcctgaaagctctgaaagaagacggtgatgtggtgattgttgtctttgatgcgaaagcgccaagttttcgccacgaagcgtacgaagcttacaaagccgggcgtgctccaacgccggaagactttcctcgccaattggcgcttatgaaggaattagtggatttgcttggcctcgaacgcttggaagttcccggtttcgaggcagacgacgtattagcgactctcgcaaagaaagccgaacgtgagggctatgaagtccagatcttgacagcagatcgcgatcttttccagcttttatctccgcgcatctcggtgttacacccggaagggcatcgtatcaccccggaatggctctgggagaaatatggtttgcgtcccgaacaatgggtggattttcgcgccttagcaggcgatccgagcgacaatattccgggagttaaaggtatcggcgagaagacggcgctcaagctccttaaagaatgggggtcgttggagaacttgcttaagaatttagatcaggtcaaaccagagtcagtgcgtgagaagattcttgctcacctcgaagacctcaaattaagccgcgaattgtcccgtgtacgcaccgatttgccgctcgaagttgatttcggtcgccgccgcgaacctgactgggagggtcttaaagcgtttttagagcgtcttgaatttggttcgctcttgcatgaattcggccttttagaaagcccgttactggccgaagaagcaccttggccaccgcccgagggcgcgtttttaggttaccgtttgagtcgcccggaaccgatgtgggccgaattactggctcttgcagcgtctgcccagggacgtgtgtatcgcgcggaagaccctcatggtgcgctccgcggcctcttcgaagtccgtggactccttgccaaagacttagctgttgttgcattgcgcgaaggtcttgatttacctaggactgatgatccaatgcttcttgcgtacctcttggacccgtcaaacacgacgcccgaaggcgtagcccgtcgttacggcggcgagtggaccgaagatgcagcgaaacgcgcgttattggccgaacgtttgcacgaaaatttattaggacgtttgcaaggcgaggaacgtctcctctggctttacgaagaagtggagaaaccattgagtcgcgtgctcgcgcatatggaagctaccggtgtcaaattagacgtggcgtatttggagaatctcagccttgaagttgctgcccacatgcgccgcttggaggaagaagtattccgtttagcaggccgttcctttcgccttaactctcgcgatcagttagaacgtgtgttgttcgatgaacttggtctccctcctatcggcaagacagagaagaccggtaaacgtagcacttcagcggcggttttagaagctcttcgcgaagtccatcccattgtggacaagatcttgcagtaccgcgaaatggcgaaattgaaaggcacctatattgaccgtcttccggcattagtccacccgaaaacgggacgcctccatacccgcttcaaccaaacagccacggcgaccggtcgtttgtcctcctctgatccaaaccttcagaatattccagtacgtaccccattgggccagaagatccgccgtgcgtttgtagctgaggagggttggcgtttagtggccctcgattatcgtcaaattgaattacgtgtccttgcccatctttctggcgatgagaacctcatccgcgtgtttcaggaaggcaaagacattcacactcaaacggcaagctggatgtttggattatcagctgaagcgatcgatcctttgatgcgtcgtgcagcgaagaccatcaatttcggtgttctctacggtatgagtgcctttcgtttgtcgcaggaattaggcattccctatgaagaagctcaggcgttcattcagaaatactttcaaagctatcccaaagttaaagcatggatcgagaagactctccgtgaaggccgcacacgtggttacgtagagaccttatttggacgtcgccgctatgttcccgatttaaacgctcgcgtgaaaggcaagcgtgaagccgccgaacgcatggcgttcaacatgcctgtacagggcacggcagctgacctcatgaaacttgcaatggtgcgcctttttccacaattgcgtgaagttggtgcccgcatgctcttgcaggtccacgatgaactcttgttagaagcgccaaaagagcgtgcggaagaggtggcagccctcgcgaaagaagttatggaaggcgtgtggcccttagcggtgcctcttgaagtcgaagttggtattggcgaggattggctggctgccaaagga

SEQ ID NO: 5490 - protein, 841 aa, synthetic construct
  REGION 1..841: note = Variant of DNA polymerase I from Thermus sp. strain 2.9
MHHHHHHGGSGVLPVFEPKGRVLLVDGHHLAYRNFFALKGLTTSLGEPVQGVYGFAKSLLKALKEDGDVVIVVFDAKAPSFRHEAYEAYKAGRAPTPEDFPRQLALMKELVDLLGLERLEVPGFEADDVLATLAKKAEREGYEVQILTADRDLFQLLSPRISVLHPEGHRITPEWLWEKYGLRPEQWVDFRALAGDPSDNIPGVKGIGEKTALKLLKEWGSLENLLKNLDQVKPESVREKILAHLEDLKLSRELSRVRTDLPLEVDFGRRREPDWEGLKAFLERLEFGSLLHEFGLLESPLLAEEAPWPPPEGAFLGYRLSRPEPMWAELLALAASAQGRVYRAEDPHGALRGLFEVRGLLAKDLAVVALREGLDLPRTDDPMLLAYLLDPSNTTPEGVARRYGGEWTEDAAKRALLAERLHENLLGRLQGEERLLWLYEEVEKPLSRVLAHMEATGVKLDVAYLENLSLEVAAHMRRLEEEVFRLAGRSFRLNSRDQLERVLFDELGLPPIGKTEKTGKRSTSAAVLEALREVHPIVDKILQYREMAKLKGTYIDRLPALVHPKTGRLHTRFNQTATATGRLSSSDPNLQNIPVRTPLGQKIRRAFVAEEGWRLVALDYRQIELRVLAHLSGDENLIRVFQEGKDIHTQTASWMFGLSAEAIDPLMRRAAKTINFGVLYGMSAFRLSQELGIPYEEAQAFIQKYFQSYPKVKAWIEKTLREGRTRGYVETLFGRRRYVPDLNARVKGKREAAERMAFNMPVQGTAADLMKLAMVRLFPQLREVGARMLLQVHDELLLEAPKERAEEVAALAKEVMEGVWPLAVPLEVEVGIGEDWLAAKG

SEQ ID NO: 5491 - DNA, 2523 bp, synthetic construct
  misc_feature 1..2523: note = Variant of DNA polymerase I from Thermus sp. strain 2.9
  source 1..2523: mol_type = other DNA
atgcaccatcatcatcatcatggcggtagcggcgtgttaccggtgttcgagcctaaaggtcgcgtgcttctggttgatggccatcatctcgcgtatcgtaacttctttgccctgaaaggattaaccaccagcctgggcgagccggtacagggtgtctacggctttgcaaagtcgctcctgaaagctctgaaagaagacggtgatgtggtgattgttgtctttgatgcgaaagcgccaagttttcgccacgaagcgtacgaagcttacaaagccgggcgtgctccaacgccggaagactttcctcgccaattggcgcttatgaaggaattagtggatttgcttggcctcgaacgcttggaagttcccggtttcgaggcagacgacgtattagcgactctcgcaaagaaagccgaacgtgagggctatgaagtccagatcttgacagcagatcgcgatcttttccagcttttatctccgcgcatctcggtgttacacccggaagggcatcgtatcaccccggaatggctctgggagaaatatggtttgcgtcccgaacaatgggtggattttcgcgccttagcaggcgatccgagcgacaatattccgggagttaaaggtatcggcgagaagacggcgctcaagctccttaaagaatgggggtcgttggagaacttgcttaagaatttagatcaggtcaaaccagagtcagtgcgtgagaagattcttgctcacctcgaagacctcaaattaagccgcgaattgtcccgtgtacgcaccgatttgccgctcgaagttgatttcggtcgccgccgcgaacctgactgggagggtcttaaagcgtttttagagcgtcttgaatttggttcgctcttgcatgaattcggccttttagaaagcccgttactggccgaagaagcaccttggccaccgcccgagggcgcgtttttaggttaccgtttgagtcgcccggaaccgatgtgggccgaattactggctcttgcagcgtctgcccagggacgtgtgtatcgcgcggaagaccctcatggtgcgctccgcggcctcttcgaagtccgtggactccttgccaaagacttagctgttgttgcattgcgcgaaggtcttgatttacctccgactgatgatccaatgcttcttgcgtacctcttggacccgtcaaacacgacgcccgaaggcgtagcccgtcgttacggcggcgagtggaccgaagatgcagcgaaacgcgcgttattggccgaacgtttgcacgaagagttattaggacgtttgcaaggcgaggaacgtctcctctggctttacgaagaagtggagaaaccattgagtcgcgtgctcgcgcatatggaagctaccggtgtcaaattagacgtggcgtatttggagaatctcagccttgaagttgctgcccacatgcgccgcttggaggaagaagtattccgtttagcaggccgttcctttcgccttaactctcgcgatcagttagaacgtgtgttgttcgatgaacttggtctccctcctatcggcaagacagagaagaccggtaaacgtagcacttcagcggcggttttagaagctcttcgcgaagtccatcccattgtggacaagatcttgcagtaccgcgaaatggcgaaattgaaaggcacctatattgaccgtcttccggcattagtccacccgaaaacgggacgcctccatacccgcttcaaccaaacagccacggcgaccggtcgtttgtcctcctctgatccaaaccttcagaatattccagtacgtaccccattgggccagaagatccgccgtgcgtttgtagctgaggagggttggcgtttagtggccctcgattatcgtcaaattgaattacgtgtccttgcccatctttctggcgatgagaacctcatccgcgtgtttcaggaaggcaaagacattcacactcaaacggcaagctggatgtttggattatcagctgaagcgatcgatcctttgatgcgtcgtgcagcgaagaccatcaatttcggtgttctctacggtatgagtgcctttcgtttgtcgcaggaattaggcattccctatgaagaagctcaggcgttcattcagaaatactttcaaagctatcccaaagttaaagcatggatcgagaagactctccgtgaaggccgcacacgtggttacgtagagaccttatttggacgtcgccgctatgttcccgatttaaacgctcgcgtgaaaggcaagcgtgaagccgccgaacgcatggcgttcaacatgcctgtacagggcacggcagctgacctcatgaaacttgcaatggtgcgcctttttccacaattgcgtgaagttggtgcccgcatgctcttgcaggtccacgatgaactcttgttagaagcgccaaaagagcgtgcggaagaggtggcagccctcgcgaaagaagttatggaaggcgtgtggcccttagcggtgcctcttgaagtcgaagttggtattggcgaggattggctggctgccaaagga

SEQ ID NO: 5492 - protein, 841 aa, synthetic construct
  REGION 1..841: note = Variant of DNA polymerase I from Thermus sp. strain 2.9
MHHHHHHGGSGVLPVFEPKGRVLLVDGHHLAYRNFFALKGLTTSLGEPVQGVYGFAKSLLKALKEDGDVVIVVFDAKAPSFRHEAYEAYKAGRAPTPEDFPRQLALMKELVDLLGLERLEVPGFEADDVLATLAKKAEREGYEVQILTADRDLFQLLSPRISVLHPEGHRITPEWLWEKYGLRPEQWVDFRALAGDPSDNIPGVKGIGEKTALKLLKEWGSLENLLKNLDQVKPESVREKILAHLEDLKLSRELSRVRTDLPLEVDFGRRREPDWEGLKAFLERLEFGSLLHEFGLLESPLLAEEAPWPPPEGAFLGYRLSRPEPMWAELLALAASAQGRVYRAEDPHGALRGLFEVRGLLAKDLAVVALREGLDLPPTDDPMLLAYLLDPSNTTPEGVARRYGGEWTEDAAKRALLAERLHEELLGRLQGEERLLWLYEEVEKPLSRVLAHMEATGVKLDVAYLENLSLEVAAHMRRLEEEVFRLAGRSFRLNSRDQLERVLFDELGLPPIGKTEKTGKRSTSAAVLEALREVHPIVDKILQYREMAKLKGTYIDRLPALVHPKTGRLHTRFNQTATATGRLSSSDPNLQNIPVRTPLGQKIRRAFVAEEGWRLVALDYRQIELRVLAHLSGDENLIRVFQEGKDIHTQTASWMFGLSAEAIDPLMRRAAKTINFGVLYGMSAFRLSQELGIPYEEAQAFIQKYFQSYPKVKAWIEKTLREGRTRGYVETLFGRRRYVPDLNARVKGKREAAERMAFNMPVQGTAADLMKLAMVRLFPQLREVGARMLLQVHDELLLEAPKERAEEVAALAKEVMEGVWPLAVPLEVEVGIGEDWLAAKG

SEQ ID NO: 5493 - DNA, 2523 bp, synthetic construct
  misc_feature 1..2523: note = Variant of DNA polymerase I from Thermus sp. strain 2.9
  source 1..2523: mol_type = other DNA
atgcaccatcatcatcatcatggcggtagcggcgtgttaccggtgttcgagcctaaaggtcgcgtgcttctggttgatggccatcatctcgcgtatcgtaacttctttgccctgaaaggattaaccaccagcctgggcgagccggtacagggtgtctacggctttgcaaagtcgctcctgaaagctctgaaagaagacggtgatgtggtgattgttgtctttgatgcgaaagcgccaagttttcgccacgaagcgtacgaagcttacaaagccgggcgtgctccaacgccggaagactttcctcgccaattggcgcttatgaaggaattagtggatttgcttggcctcgaacgcttggaagttcccggtttcgaggcagacgacgtattagcgactctcgcaaagaaagccgaacgtgagggctatgaagtccagatcttgacagcagatcgcgatcttttccagcttttatctccgcgcatctcggtgttacacccggaagggcatcgtatcaccccggaatggctctgggagaaatatggtttgcgtcccgaacaatgggtggattttcgcgccttagcaggcgatccgagcgacaatattccgggagttaaaggtatcggcgagaagacggcgctcaagctccttaaagaatgggggtcgttggagaacttgcttaagaatttagatcaggtcaaaccagagtcagtgcgtgagaagattcttgctcacctcgaagacctcaaattaagccgcgaattgtcccgtgtacgcaccgatttgccgctcgaagttgatttcggtcgccgccgcgaacctgactgggagggtcttaaagcgtttttagagcgtcttgaatttggttcgctcttgcatgaattcggccttttagaaagcccgttactggccgaagaagcaccttggccaccgcccgagggcgcgtttttaggttaccgtttgagtcgcccggaaccgatgtgggccgaattactggctcttgcagcgtctgcccagggacgtgtgtatcgcgcggaagaccctcatggtgcgctccgcggcctcttcgaagtccgtaccctccttgccaaagacttagctgttgttgcattgcgcgaaggtcttgatttacctccgactgatgatccaatgcttcttgcgtacctcttggacccgtcaaacacgacgcccgaaggcgtagcccgtcgttacggcggcgagtggtgggaagatgcaggcaaacgcgcgttattggccgaacgtttgcacgaaaatttattaggacgtttgcaaggcgaggaacgtctcctctggctttacgaagaagtggagaaaccattgagtcgcgtgctcgcgcatatggaagctaccggtgtcaaattagacgtggcgtatttggagaatctcagccttgaagttgctgcccacatgcgccgcttggaggaagaagtattccgtttagcaggccgttcctttcgccttaactctcgcgatcagttagaacgtgtgttgttcgatgaacttggtctccctcctatcggcaagacagagaagaccggtaaacgtagcacttcagcggcggttttagaagctcttcgcgaagtccatcccattgtggacaagatcttgcagtaccgcgaaatggcgaaattgaaaggcacctatattgaccgtcttccggcattagtccacccgaaaacgggacgcctccatacccgcttcaaccaaacagccacggcgaccggtcgtttgtcctcctctgatccaaaccttcagaatattccagtacgtaccccattgggccagaagatccgccgtgcgtttgtagctgagccgggttggcgtttagtggccctcgattatcgtcaaattgaattacgtgtccttgcccatctttctggcgatgagaacctcatccgcgtgtttcaggaaggcaaagacattcacactcaaacggcaagctggatgtttggattatcagctgaagcgatcgatcctttgatgcgtcgtgcagcgaagaccatcaatttcggtgttctctacggtatgagtgcctttcgtttgtcgcaggaattaggcattccctatgaagaagctcaggctttcattcagaaatactttcaaggctatcccaaagttaaagcatggatcgagaagactctccgtgaaggccgcacacgtggttacgtagagaccttatttggacgtcgccgctatgttcccgatttaaactcgcgcgtgaaaggcaagcgtgaagccgccgaacgcatggcgttcaacatgcctgtacagggcacggcagctgacctcatgaaacttgcaatggtgcgcctttttccacaattgcgtgaagttggtgcccgcatgctgttgcaggtccacgatgaactcttgttagaagcgccaaaagagcgtgcggaagaggtggcagccctcgcgaaagaagttatggaaggcgtgtggcccttagcggtgcctcttgaagtcgaagttggtattggcgaggattggctggctgccaaagga

SEQ ID NO: 5494 - protein, 841 aa, synthetic construct
  REGION 1..841: note = Variant of DNA polymerase I from Thermus sp. strain 2.9
MHHHHHHGGSGVLPVFEPKGRVLLVDGHHLAYRNFFALKGLTTSLGEPVQGVYGFAKSLLKALKEDGDVVIVVFDAKAPSFRHEAYEAYKAGRAPTPEDFPRQLALMKELVDLLGLERLEVPGFEADDVLATLAKKAEREGYEVQILTADRDLFQLLSPRISVLHPEGHRITPEWLWEKYGLRPEQWVDFRALAGDPSDNIPGVKGIGEKTALKLLKEWGSLENLLKNLDQVKPESVREKILAHLEDLKLSRELSRVRTDLPLEVDFGRRREPDWEGLKAFLERLEFGSLLHEFGLLESPLLAEEAPWPPPEGAFLGYRLSRPEPMWAELLALAASAQGRVYRAEDPHGALRGLFEVRTLLAKDLAVVALREGLDLPPTDDPMLLAYLLDPSNTTPEGVARRYGGEWWEDAGKRALLAERLHENLLGRLQGEERLLWLYEEVEKPLSRVLAHMEATGVKLDVAYLENLSLEVAAHMRRLEEEVFRLAGRSFRLNSRDQLERVLFDELGLPPIGKTEKTGKRSTSAAVLEALREVHPIVDKILQYREMAKLKGTYIDRLPALVHPKTGRLHTRFNQTATATGRLSSSDPNLQNIPVRTPLGQKIRRAFVAEPGWRLVALDYRQIELRVLAHLSGDENLIRVFQEGKDIHTQTASWMFGLSAEAIDPLMRRAAKTINFGVLYGMSAFRLSQELGIPYEEAQAFIQKYFQGYPKVKAWIEKTLREGRTRGYVETLFGRRRYVPDLNSRVKGKREAAERMAFNMPVQGTAADLMKLAMVRLFPQLREVGARMLLQVHDELLLEAPKERAEEVAALAKEVMEGVWPLAVPLEVEVGIGEDWLAAKG

SEQ ID NO: 5495 - DNA, 2523 bp, synthetic construct
  misc_feature 1..2523: note = Variant of DNA polymerase I from Thermus sp. strain 2.9
  source 1..2523: mol_type = other DNA
atgcaccatcatcatcatcatggcggtagcggcgtgttaccggtgttcgagcctaaaggtcgcgtgcttctggttgatggccatcatctcgcgtatcgtaacttctttgccctgaaaggattaaccaccagcctgggcgagccggtacagggtgtctacggctttgcaaagtcgctcctgaaagctctgaaagaagacggtgatgtggtgattgttgtctttgatgcgaaagcgccaagttttcgccacgaagcgtacgaagcttacaaagccgggcgtgctccaacgccggaagactttcctcgccaattggcgcttatgaaggaattagtggatttgcttggcctcgaacgcttggaagttcccggtttcgaggcagacgacgtattagcgactctcgcaaagaaagccgaacgtgagggctatgaagtccagatcttgacagcagatcgcgatcttttccagcttttatctccgcgcatctcggtgttacacccggaagggcatcgtatcaccccggaatggctctgggagaaatatggtttgcgtcccgaacaatgggtggattttcgcgccttagcaggcgatccgagcgacaatattccgggagttaaaggtatcggcgagaagacggcgctcaagctccttaaagaatgggggtcgttggagaacttgcttaagaatttagatcaggtcaaaccagagtcagtgcgtgagaagattcttgctcacctcgaagacctcaaattaagccgcgaattgtcccgtgtacgcaccgatttgccgctcgaagttgatttcggtcgccgccgcgaacctgactgggagggtcttaaagcgtttttagagcgtcttgaatttggttcgctcttgcatgaattcggccttttagaaagcccgttactggccgaagaagcaccttggccaccgcccgagggcgcgtttttaggttaccgtttgagtcgcccggaaccgatgtgggccaaattactggctcttgcagcgtctgcccagggacgtgtgtatcgcgcggaagaccctcatggtgcgctccgcggcctcttcgaagtccgtaccctccttgccaaagacttagctgttgttgcattgcgcgaaggtcttgatttacctccgactgatgatccaatgcttcttgcgtacctcttggacccgtcaaacacgacgcccgaaggcgtagcccgtcgttacggcggcgagtggaccgaagatgcagccaaacgcgcgttattggccgaacgtttgcacgaaaatttattaggacgtttgcaaggcgaggagcgtctcctgtggctttacgaagaagtggagaaaccattgagtcgcgtgctcgcgcatatggaagctaccggtgtcaaattagacgtggcgtatttggagaatctcagccttgaagttgctgcccacatgcgccgcttggaggaagaagtattccgtttagcaggccgttcctttcgccttaactctcgcgatcagttagaacgtgtgttgttcgatgaacttggtctccctcctatcggcaagacagagaagaccggtaaacgtagcacttcagcggcggttttagaagctcttcgcgaagtccatcccattgtggacaagatcttgcagtaccgcgaaatggcgaaattgaaaggcacctatattgaccgtcttccggcattagtccacccgaaaacgggacgcctccatacccgcttcaaccaaacagccacggcgaccggtcgtttgtcctcctctgatccaaaccttcagaatattccagtacgtaccccattgggccagaagatccgccgtgcgtttgtagctgagccgggttggcgtttagtggccctcgattatcgtcaaattgaattacgtgtccttgcccatctttctggcgatgagaacctcatccgcgtgtttcaggaaggcaaagacattcacactcaaacggcaagctggatgtttggattatcagctgaagcgatcgatcctttgatgcgtcgtgcagcgaagaccatcaatttcggtgttctctacggtatgagtgcctttcgtttgtcgcaggaattaggcattccctatgaagaagctcagggtttcattcagaaatactttcaaagctatcccaaagttaaagcatggatcgagaagactctccgtgaaggccgcacacgtggttacgtagagaccttatttggacgtcgccgctatgttcccgatttaaactcgcgcgtgaaaggcaagcgtgaagccgccgaacgcatggcgttcaacatgcctgtacagggcacggcagctgacctcatgaaacttgcaatggtgcgcctttttccacaattgcgtgaagttggtgcccgcatgctgttgcaggtccacgatgaactcttgttagaagcgccaaaagagcgtgcggaagaggtggcagccctcgcgaaagaagttatggaaggcgtgtggcccttagcggtgcctcttgaagtcgaagttggtattggcgaggattggctggctgccaaagga

SEQ ID NO: 5496 - protein, 841 aa, synthetic construct
  REGION 1..841: note = Variant of DNA polymerase I from Thermus sp. strain 2.9
MHHHHHHGGSGVLPVFEPKGRVLLVDGHHLAYRNFFALKGLTTSLGEPVQGVYGFAKSLLKALKEDGDVVIVVFDAKAPSFRHEAYEAYKAGRAPTPEDFPRQLALMKELVDLLGLERLEVPGFEADDVLATLAKKAEREGYEVQILTADRDLFQLLSPRISVLHPEGHRITPEWLWEKYGLRPEQWVDFRALAGDPSDNIPGVKGIGEKTALKLLKEWGSLENLLKNLDQVKPESVREKILAHLEDLKLSRELSRVRTDLPLEVDFGRRREPDWEGLKAFLERLEFGSLLHEFGLLESPLLAEEAPWPPPEGAFLGYRLSRPEPMWAKLLALAASAQGRVYRAEDPHGALRGLFEVRTLLAKDLAVVALREGLDLPPTDDPMLLAYLLDPSNTTPEGVARRYGGEWTEDAAKRALLAERLHENLLGRLQGEERLLWLYEEVEKPLSRVLAHMEATGVKLDVAYLENLSLEVAAHMRRLEEEVFRLAGRSFRLNSRDQLERVLFDELGLPPIGKTEKTGKRSTSAAVLEALREVHPIVDKILQYREMAKLKGTYIDRLPALVHPKTGRLHTRFNQTATATGRLSSSDPNLQNIPVRTPLGQKIRRAFVAEPGWRLVALDYRQIELRVLAHLSGDENLIRVFQEGKDIHTQTASWMFGLSAEAIDPLMRRAAKTINFGVLYGMSAFRLSQELGIPYEEAQGFIQKYFQSYPKVKAWIEKTLREGRTRGYVETLFGRRRYVPDLNSRVKGKREAAERMAFNMPVQGTAADLMKLAMVRLFPQLREVGARMLLQVHDELLLEAPKERAEEVAALAKEVMEGVWPLAVPLEVEVGIGEDWLAAKG

SEQ ID NO: 5497 - DNA, 2523 bp, synthetic construct
  misc_feature 1..2523: note = Variant of DNA polymerase I from Thermus sp. strain 2.9
  source 1..2523: mol_type = other DNA
atgcaccatcatcatcatcatggcggtagcggcgtgttaccggtgttcgagcctaaaggtcgcgtgcttctggttgatggccatcatctcgcgtatcgtaacttctttgccctgaaaggattaaccaccagccgcggcgagccggtacagggtgtctacggctttgcaaagtcgctcctgaaagctctgaaagaagacggtgatgtggtgattgttgtctttgatgcgaaagcgccaagttttcgccacgaagcgtacgaagcttacaaagccgggcgtgctccaacgccggaagactttcctcgccaattggcgcttatgaaggaattagtggatttgcttggcctcgaacgcttggaagttcccggtttcgaggcagacgacgtattagcgactctcgcaaagaaagccgaacgtgagggctatgaagtccagatcttgacagcagatcgcgatcttttccagcttttatctccgcgcatctcggtgttacacccggaagggcatcgtatcaccccggaatggctctgggagaaatatggtttgcgtcccgaacaatgggtggattttcgcgccttagcaggcgatccgagcgacaatattccgggagttaaaggtatcggcgagaagacggcgctcaagctccttaaagaatgggggtcgttggagaacttgcttaagaatttagatcaggtcaaaccagagtcagtgcgtgagaagattcttgctcacctcgaagacctcaaattaagccgcgaattgtcccgtgtacgcaccgatttgccgctcgaagttgatttcggccgccgccgcgaacctgactgggagggtcttaaagcgtttttagagcgtcttgaatttggttcgctcttgcatgaattcggccttttagaaagcccgttaccggccgaagaagcaccttggccaccgcccgagggcgcgtttttaggttaccgtttgagtcgcccggaaccgatgtgggccgaattactggctcttgcagcgtctgcccagggacgtgtgtatcgcgcggaagaccctcatggtgcgctccgcggcctcttcgaagtccgtggactccttgccaaagacttagctgttgttgcattgcgcgaaggtcttgatttacctccgactgatgatccaatgcttcttgcgtacctcttggacccgtcaaacacgacgcccgaaggcgtagcccgtcgttacggcggcgagtggaccgaagatgcagcgaaacgcgcgttattggccgaacgtttgcacgaaaatttattaggacgtttgcaaggcgaggaacgtctcctctggctttacgaagaagtggagaaaccattgagtcgcgtgctcgcgcatatggaagctaccggtgtcaaattagacgtggcgtatttggagaatctcagccttgaagttgctgcccacatgcgccgcttggaggaagaagtattccgtttagcaggccgttcctttcgccttaactctcgcgatcagttagaacgtgtgttgttcgatgaacttggtctccctcctatcggcaagacagagaagaccggtaaacgtagcacttcagcggcggttttagaagctcttcgcgaagtccatcccattgtggacaagatcttgcagtaccgcgaaatggcgaaattgaaaggcacctatattgaccgtcttccggcattagtccacccgaaaacgggacgcctccatacccgcttcaaccaaacagccacggcgaccggtcgtttgtcctcctctgatccaaaccttcagaatattccagtacgtaccccattgggccagaagatccgccgtgcgtttgtagctgaggagggttggcgtttagtggccctcgattatcgtcaaattgaattacgtgtccttgcccatctttctggcgatgagaacctcatccgcgtgtttcaggaaggcaaagacattcacactcaaacggcaagctggatgtttggattatcagctgaagcgatcgatcctttgatgcgtcgtgcagcgaagaccatcaatttcggtgttctctacggtatgagtgcctttcgtttgtcgcaggaattaggcattccctatgaagaagctcaggcgttcattcagaaatactttcaaagctatcccaaagttaaagcatggatcgagaagactctccgtgaaggccgcacacgtggttacgtagagaccttatttggacgtcgccgctatgttcccgatttaaacgctcgcgtgaaaggcaaacgtgaagccgccgaacgcatggcgttcaacatgcctgtacagggcacggcagctgacctcatgaaacttgcaatggtgcgcctttttccacaattgcgtgaagttggtgcccgcatgctcttgcaggtccacgatgaactcttgttagaagcgccaaaagagcgtgcggaagaggtggcagccctcgcgaaagaagttatggaaggcgtgtggcccttagcggtgcctcttgaagtcgaagttggtattggcgaggattggctggctgccaaagga

SEQ ID NO: 5498 - protein, 841 aa, synthetic construct
  REGION 1..841: note = Variant of DNA polymerase I from Thermus sp. strain 2.9
MHHHHHHGGSGVLPVFEPKGRVLLVDGHHLAYRNFFALKGLTTSRGEPVQGVYGFAKSLLKALKEDGDVVIVVFDAKAPSFRHEAYEAYKAGRAPTPEDFPRQLALMKELVDLLGLERLEVPGFEADDVLATLAKKAEREGYEVQILTADRDLFQLLSPRISVLHPEGHRITPEWLWEKYGLRPEQWVDFRALAGDPSDNIPGVKGIGEKTALKLLKEWGSLENLLKNLDQVKPESVREKILAHLEDLKLSRELSRVRTDLPLEVDFGRRREPDWEGLKAFLERLEFGSLLHEFGLLESPLPAEEAPWPPPEGAFLGYRLSRPEPMWAELLALAASAQGRVYRAEDPHGALRGLFEVRGLLAKDLAVVALREGLDLPPTDDPMLLAYLLDPSNTTPEGVARRYGGEWTEDAAKRALLAERLHENLLGRLQGEERLLWLYEEVEKPLSRVLAHMEATGVKLDVAYLENLSLEVAAHMRRLEEEVFRLAGRSFRLNSRDQLERVLFDELGLPPIGKTEKTGKRSTSAAVLEALREVHPIVDKILQYREMAKLKGTYIDRLPALVHPKTGRLHTRFNQTATATGRLSSSDPNLQNIPVRTPLGQKIRRAFVAEEGWRLVALDYRQIELRVLAHLSGDENLIRVFQEGKDIHTQTASWMFGLSAEAIDPLMRRAAKTINFGVLYGMSAFRLSQELGIPYEEAQAFIQKYFQSYPKVKAWIEKTLREGRTRGYVETLFGRRRYVPDLNARVKGKREAAERMAFNMPVQGTAADLMKLAMVRLFPQLREVGARMLLQVHDELLLEAPKERAEEVAALAKEVMEGVWPLAVPLEVEVGIGEDWLAAKG

SEQ ID NO: 5499 - DNA, 2523 bp, synthetic construct
  misc_feature 1..2523: note = Variant of DNA polymerase I from Thermus sp. strain 2.9
  source 1..2523: mol_type = other DNA
atgcaccatcatcatcatcatggcggtagcggcgtgttaccggtgttcgagcctaaaggtcgcgtgcttctggttgatggccatcatctcgcgtatcgtaacttctttgccctgaaaggattaaccaccagcctgggcgagccggtacagggtgtctacggctttgcaaagtcgctcctgaaagctctgaaagaagacggtgatgtggtgattgttgtctttgatgcgaaagcgccaagttttcgccacgaagcgtacgaagcttacaaagccgggcgtgctccaacgccggaagactttcctcgccaattggcgcttatgaaggaattagtggatttgcttggcctcgaacgcttggaagttcccggtttcgaggcagacgacgtattagcgactctcgcaaagaaagccgaacgtgagggctatgaagtccagatcttgacagcagatcgcgatcttttccagcttttatctccgcgcatctcggtgttacacccggaagggcatcgtatcaccccggaatggctctgggagaaatatggtttgcgtcccgaacaatgggtggattttcgcgccttagcaggcgatccgagcgacaatattccgggagttaaaggtatcggcgagaagacggcgctcaagctccttaaagaatgggggtcgttggagaacttgcttaagaatttagatcaggtcaaaccagagtcagtgcgtgagaagattcttgctcacctcgaagacctcaaattaagccgcgaattgtcccgtgtacgcaccgatttgccgctcgaagttgatttcggtcgccgccgcgaacctgactgggagggtcttaaagcgtttttagagcgtcttgaatttggttcgctcttgcatgaattcggccttttagaaagcccgttactggccgaagaagcaccttggccaccgcccgagggcgcgtttttaggttaccgtttgagtcgcccggaaccgatgtgggccgaattactggctcttgcagcgtctgcccagggacgtgtgtatcgcgcggaagaccctcatggtgcgctccgcggcctcttcgaagtccgtggcctccttgccaaagacttagctgttgttgcattgcgcgaaggtcttgatttacctccgactgatgatccaatgcttcttgcgtacctcttggacccgtcaaacacgacgcccgaaggcgtagcccgtcgttacggcggcgagtggtgggaagatgcagccaaacgcgcgttattggccgaacgtttgcacgaaaatttattaggacgtttgcaaggcgaggagcgtctcctgtggctttacgaagaagtggagaaaccattgagtcgcgtgctcgcgcatatggaagctaccggtgtcaaattagacgtggcgtatttggagaatctcagccttgaagttgctgcccacatgcgccgcttggaggaagaagtattccgtttagcaggccgttcctttcgccttaactctcgcgatcagttagaacgtgtgttgttcgatgaacttggtctccctcctatcggcaagacagagaagaccggtaaacgtagcacttcagcggcggttttagaagctcttcgcgaagtccatcccattgtggacaagatcttgcagtaccgcgaaatggcgaaattgaaaggcacctatattgaccgtcttccggcattagtccacccgaaaacgggacgcctccatacccgcttcaaccaaacagccacggcgaccggtcgtttgtcctcctctgatccaaaccttcagaatattccagtacgtaccccattgggccagaagatccgccgtgcgtttgtagctgaggagggttggcgtttagtggccctcgattatcgtcaaattgaattacgtgtccttgcccatctttctggcgatgagaacctcatccgcgtgtttcaggaaggcaaagacattcacactcaaacggcaagctggatgtttggattatcagctgaagcgatcgatcctttgatgcgtcgtgcagcgaagaccatcaatttcggtgttctctacggtatgagtgcctttcgtttgtcgcaggaattaggcattccctatgaagaagctcaggcgttcattcagaaatactttcaaagctatcccaaagttaaagcatggatcgagaagactctccgtgaaggccgcacacgtggttacgtagagaccttatttggacgtcgccgctatgttcccgatttaaactcgcgcgtgaaaggcaagcgtgaagccgccgaacgcatggcgttcaacatgcctgtacagggcacggcagctgacctcatgaaacttgcaatggtgcgcctttttccacaattgcgtgaagttggtgcccgcatgctgttgcaggtccacgatgaactcttgttagaagcgccaaaagagcgtgcggaagaggtggcagccctcgcgaaagaagttatggaaggcgtgtggcccttagcggtgcctcttgaagtcgaagttggtattggcgaggattggctggctgccaaagga

SEQ ID NO: 5500 - protein, 841 aa, synthetic construct
  REGION 1..841: note = Variant of DNA polymerase I from Thermus sp. strain 2.9
MHHHHHHGGSGVLPVFEPKGRVLLVDGHHLAYRNFFALKGLTTSLGEPVQGVYGFAKSLLKALKEDGDVVIVVFDAKAPSFRHEAYEAYKAGRAPTPEDFPRQLALMKELVDLLGLERLEVPGFEADDVLATLAKKAEREGYEVQILTADRDLFQLLSPRISVLHPEGHRITPEWLWEKYGLRPEQWVDFRALAGDPSDNIPGVKGIGEKTALKLLKEWGSLENLLKNLDQVKPESVREKILAHLEDLKLSRELSRVRTDLPLEVDFGRRREPDWEGLKAFLERLEFGSLLHEFGLLESPLLAEEAPWPPPEGAFLGYRLSRPEPMWAELLALAASAQGRVYRAEDPHGALRGLFEVRGLLAKDLAVVALREGLDLPPTDDPMLLAYLLDPSNTTPEGVARRYGGEWWEDAAKRALLAERLHENLLGRLQGEERLLWLYEEVEKPLSRVLAHMEATGVKLDVAYLENLSLEVAAHMRRLEEEVFRLAGRSFRLNSRDQLERVLFDELGLPPIGKTEKTGKRSTSAAVLEALREVHPIVDKILQYREMAKLKGTYIDRLPALVHPKTGRLHTRFNQTATATGRLSSSDPNLQNIPVRTPLGQKIRRAFVAEEGWRLVALDYRQIELRVLAHLSGDENLIRVFQEGKDIHTQTASWMFGLSAEAIDPLMRRAAKTINFGVLYGMSAFRLSQELGIPYEEAQAFIQKYFQSYPKVKAWIEKTLREGRTRGYVETLFGRRRYVPDLNSRVKGKREAAERMAFNMPVQGTAADLMKLAMVRLFPQLREVGARMLLQVHDELLLEAPKERAEEVAALAKEVMEGVWPLAVPLEVEVGIGEDWLAAKG

SEQ ID NO: 5501 - DNA, 2523 bp, synthetic construct
  misc_feature 1..2523: note = Variant of DNA polymerase I from Thermus sp. strain 2.9
  source 1..2523: mol_type = other DNA
atgcaccatcatcatcatcatggcggtagcggcgtgttaccggtgttcgagcctaaaggtcgcgtgcttctggttgatggccatcatctcgcgtatcgtaacttctttgccctgaaaggattaaccaccagcctgggcgagccggtacagggtgtctacggctttgcaaagtcgctcctgaaagctctgaaagaagacggtgatgtggtgattgttgtctttgatgcgaaagcgccaagttttcgccacgaagcgtacgaagcttacaaagccgggcgtgctccaacgccggaagactttcctcgccaattggcgcttatgaaggaattagtggatttgcttggcctcgaacgcttggaagttcccggtttcgaggcagacgacgtattagcgactctcgcaaagaaagccgaacgtgagggctatgaagtccagatcttgacagcagatcgcgatcttttccagcttttatctccgcgcatctcggtgttacacccggaagggcatcgtatcaccccggaatggctctgggagaaatatggtttgcgtcccgaacaatgggtggattttcgcgccttagcaggcgatccgagcgacaatattccgggagttaaaggtatcggcgagaagacggcgctcaagctccttaaagaatgggggtcgttggagaacttgcttaagaatttagatcaggtcaaaccagagtcagtgcgtgagaagattcttgctcacctcgaagacctcaaattaagccgcgaattgtcccgtgtacgcaccgatttgccgctcgaagttgatttcggtcgccgccgcgaacctgactgggagggtcttaaagcgtttttagagcgtcttgaatttggttcgctcttgcatgaattcggccttttagaaagcccgttactggccgaagaagcaccttggccaccgcccgagggcgcgtttttaggttaccgtttgagtcgcccggaaccgatgtgggccgaattactggctcttgcagcgtctgcccagggacgtgtgtatcgcgcggaagaccctcatggtgcgctccgcggcctcttcgaagtccgtggactccttgccaaagacttagctgttgttgcattgcgcgaaggtcttgatttacctccgactgatgatccaatgcttcttgcgtacctcttggacccgtcacgtacgacgcccgaaggcgtagcccgtcgttacggcggcgagtggaccgaagatgcagcgaaacgcgcgttattggccgaacgtttgcacgaaaatttattaggacgtttgcaaggcgaggaacgtctcctctggctttacgaagaagtggagaaaccattgagtcgcgtgctcgcgcatatggaagctaccggtgtcaaattagacgtggcgtatttggagaatctcagccttgaagttgctgcccacatgcgccgcttggaggaagaagtattccgtttagcaggccgttcctttcgccttaactctcgcgatcagttagaacgtgtgttgttcgatgaacttggtctccctcctatcggcaagacagagaagaccggtaaacgtagcacttcagcggcggttttagaagctcttcgcgaagtccatcccattgtggacaagatcttgcagtaccgcgaaatggcgaaattgaaaggcacctatattgaccgtcttccggcattagtccacccgaaaacgggacgcctccatacccgcttcaaccaaacagccacggcgaccggtcgtttgtcctcctctgatccaaaccttcagaatattccagtacgtaccccattgggccagaagatccgccgtgcgtttgtagctgaggagggttggcgtttagtggccctcgattatcgtcaaattgaattacgtgtccttgcccatctttctggcgatgagaacctcatccgcgtgtttcaggaaggcaaagacattcacactcaaacggcaagctggatgtttggattatcagctgaagcgatcgatcctttgatgcgtcgtgcagcgaagaccatcaatttcggtgttctctacggtatgagtgcctttcgtttgtcgcaggaattaggcattccctatgaagaagctcaggcgttcattcagaaatactttcaaagctatcccaaagttaaagcatggatcgagaagactctccgtgaaggccgcacacgtggttacgtagagaccttatttggacgtcgccgctatgttcccgatttaaacgctcgcgtgaaaggcaagcgtgaagccgccgaacgcatggcgttcaacatgcctgtacagggcacggcagctgacctcatgaaacttgcaatggtgcgcctttttccacaattgcgtgaagttggtgcccgcatgctcttgcaggtccacgatgaactcttgttagaagcgccaaaagagcgtgcggaagaggtggcagccctcgcgaaagaagttatggaaggcgtgtggcccttagcggtgcctcttgaagtcgaagttggtattggcgaggattggctggctgccaaagga

SEQ ID NO: 5502 - protein, 841 aa, synthetic construct
  REGION 1..841: note = Variant of DNA polymerase I from Thermus sp. strain 2.9
MHHHHHHGGSGVLPVFEPKGRVLLVDGHHLAYRNFFALKGLTTSLGEPVQGVYGFAKSLLKALKEDGDVVIVVFDAKAPSFRHEAYEAYKAGRAPTPEDFPRQLALMKELVDLLGLERLEVPGFEADDVLATLAKKAEREGYEVQILTADRDLFQLLSPRISVLHPEGHRITPEWLWEKYGLRPEQWVDFRALAGDPSDNIPGVKGIGEKTALKLLKEWGSLENLLKNLDQVKPESVREKILAHLEDLKLSRELSRVRTDLPLEVDFGRRREPDWEGLKAFLERLEFGSLLHEFGLLESPLLAEEAPWPPPEGAFLGYRLSRPEPMWAELLALAASAQGRVYRAEDPHGALRGLFEVRGLLAKDLAVVALREGLDLPPTDDPMLLAYLLDPSRTTPEGVARRYGGEWTEDAAKRALLAERLHENLLGRLQGEERLLWLYEEVEKPLSRVLAHMEATGVKLDVAYLENLSLEVAAHMRRLEEEVFRLAGRSFRLNSRDQLERVLFDELGLPPIGKTEKTGKRSTSAAVLEALREVHPIVDKILQYREMAKLKGTYIDRLPALVHPKTGRLHTRFNQTATATGRLSSSDPNLQNIPVRTPLGQKIRRAFVAEEGWRLVALDYRQIELRVLAHLSGDENLIRVFQEGKDIHTQTASWMFGLSAEAIDPLMRRAAKTINFGVLYGMSAFRLSQELGIPYEEAQAFIQKYFQSYPKVKAWIEKTLREGRTRGYVETLFGRRRYVPDLNARVKGKREAAERMAFNMPVQGTAADLMKLAMVRLFPQLREVGARMLLQVHDELLLEAPKERAEEVAALAKEVMEGVWPLAVPLEVEVGIGEDWLAAKG

SEQ ID NO: 5503 - DNA, 2523 bp, synthetic construct
  misc_feature 1..2523: note = Variant of DNA polymerase I from Thermus sp. strain 2.9
  source 1..2523: mol_type = other DNA
atgcaccatcatcatcatcatggcggtagcggcgtgttaccggtgttcgagcctaaaggtcgcgtgcttctggttgatggccatcatctcgcgtatcgtaacttctttgccctgaaaggattaaccaccagcctgggcgagccggtacagggtgtctacggctttgcaaagtcgctcctgaaagctctgaaagaagacggtgatgtggtgattgttgtctttgatgcgaaagcgccaagttttcgccacgaagcgtacgaagcttacaaagccgggcgtgctccaacgccggaagactttcctcgccaattggcgcttatgaaggaattagtggatttgcttggcctcgaacgcttggaagttcccggtttcgaggcagacgacgtattagcgactctcgcaaagaaagccgaacgtgagggctatgaagtccagatcttgacagcagatcgcgatcttttccagcttttatctccgcgcatctcggtgttacacccggaagggcatcgtatcaccccggaatggctctgggagaaatatggtttgcgtcccgaacaatgggtggattttcgcgccttagcaggcgatccgagcgacaatattccgggagttaaaggtatcggcgagaagacggcgctcaagctccttaaagaatgggggtcgttggagaacttgcttaagaatttagatcaggtcaaaccagagtcagtgcgtgagaagattcttgctcacctcgaagacctcaaattaagccgcgaattgtcccgtgtacgcaccgatttgccgctcgaagttgatttcggtcgccgccgcgaacctgactgggagggtcttaaagcgtttttagagcgtcttgaatttggttcgctcttgcatgaattcggccttttagaaagcccgttactggccgaagaagcaccttggccaccgcccgagggcgcgtttttaggttaccgtttgattcgcccggaaccgatgtgggccgaattactggctcttgcagcgtctgcccagggacgtgtgtatcgcgcggaagaccctcatggtgcgctccgcggcctcttcgaagtccgtggactccttgccaaagacttagctgttgttgcattgcgcgaaggtcttgatttacctccgactgatgatccaatgcttcttgcgtacctcttggacccgtcaaacacgacgcccgaaggcgtagcccgtcgttacggcggcgagtggaccgaagatgcagcgaaacgcgcgttattggccgaacgtttgcacgaaaatttattaggacgtttgcaaggcgaggaacgtctcctctggctttacgaagaagtggagaaaccattgagtcgcgtgctcgcgcatatggaagctaccggtgtcaaattagacgtggcgtatttggagaatctcagccttgaagttgctgcccacatgcgccgcttggaggaagaagtattccgtttagcaggccgttcctttcgccttaactctcgcgatcagttagaacgtgtgttgttcgatgaacttggtctccctcctatcggcaagacagagaagaccggtaaacgtagcacttcagcggcggttttagaagctcttcgcgaagtccatcccattgtggacaagatcttgcagtaccgcgaaatggcgaaattgaaaggcacctatattgaccgtcttccggcattagtccacccgaaaacgggacgcctccatacccgcttcaaccaaacagccacggcgaccggtcgtttgtcctcctctgatccaaaccttcagaatattccagtacgtaccccattgggccagaagatccgccgtgcgtttgtagctgaggagggttggcgtttagtggccctcgattatcgtcaaattgaattacgtgtccttgcccatctttctggcgatgagaacctcatccgcgtgtttcaggaaggcaaagacattcacactcaaacggcaagctggatgtttggattatcagctgaagcgatcgatcctttgatgcgtcgtgcagcgaagaccatcaatttcggtgttctctacggtatgagtgcctttcgtttgtcgcaggaattaggcattccctatgaagaagctcaggcgttcattcagaaatactttcaaagctatcccaaagttaaagcatggatcgagaagactctccgtgaaggccgcacacgtggttacgtagagaccttatttggacgtcgccgctatgttcccgatttaaacgctcgcgtgaaaggcaagcgtgaagccgccgaacgcatggcgttcaacatgcctgtacagggcacggcagctgacctcatgaaacttgcaatggtgcgcctttttccacaattgcgtgaagttggtgcccgcatgctcttgcaggtccacgatgaactcttgttagaagcgccaaaagagcgtgcggaagaggtggcagccctcgcgaaagaagttatggaaggcgtgtggcccttagcggtgcctcttgaagtcgaagttggtattggcgaggattggctggctgccaaagga

SEQ ID NO: 5504 - protein, 841 aa, synthetic construct
  REGION 1..841: note = Variant of DNA polymerase I from Thermus sp. strain 2.9
MHHHHHHGGSGVLPVFEPKGRVLLVDGHHLAYRNFFALKGLTTSLGEPVQGVYGFAKSLLKALKEDGDVVIVVFDAKAPSFRHEAYEAYKAGRAPTPEDFPRQLALMKELVDLLGLERLEVPGFEADDVLATLAKKAEREGYEVQILTADRDLFQLLSPRISVLHPEGHRITPEWLWEKYGLRPEQWVDFRALAGDPSDNIPGVKGIGEKTALKLLKEWGSLENLLKNLDQVKPESVREKILAHLEDLKLSRELSRVRTDLPLEVDFGRRREPDWEGLKAFLERLEFGSLLHEFGLLESPLLAEEAPWPPPEGAFLGYRLIRPEPMWAELLALAASAQGRVYRAEDPHGALRGLFEVRGLLAKDLAVVALREGLDLPPTDDPMLLAYLLDPSNTTPEGVARRYGGEWTEDAAKRALLAERLHENLLGRLQGEERLLWLYEEVEKPLSRVLAHMEATGVKLDVAYLENLSLEVAAHMRRLEEEVFRLAGRSFRLNSRDQLERVLFDELGLPPIGKTEKTGKRSTSAAVLEALREVHPIVDKILQYREMAKLKGTYIDRLPALVHPKTGRLHTRFNQTATATGRLSSSDPNLQNIPVRTPLGQKIRRAFVAEEGWRLVALDYRQIELRVLAHLSGDENLIRVFQEGKDIHTQTASWMFGLSAEAIDPLMRRAAKTINFGVLYGMSAFRLSQELGIPYEEAQAFIQKYFQSYPKVKAWIEKTLREGRTRGYVETLFGRRRYVPDLNARVKGKREAAERMAFNMPVQGTAADLMKLAMVRLFPQLREVGARMLLQVHDELLLEAPKERAEEVAALAKEVMEGVWPLAVPLEVEVGIGEDWLAAKG

SEQ ID NO: 5505 - DNA, 2523 bp, synthetic construct
  misc_feature 1..2523: note = Variant of DNA polymerase I from Thermus sp. strain 2.9
  source 1..2523: mol_type = other DNA
atgcaccatcatcatcatcatggcgttagcggcgtgttaccggtgttcgagcctaaaggtcgcgtgcttctggttgatggccatcatctcgcgtatcgtaacttctttgccctgaaaggattaaccaccagcctgggcgagccggtacagggtgtctacggctttgcaaagtcgctcctgaaagctctgaaagaagacggtgatgtggtgattgttgtctttgatgcgaaagcgccaagttttcgccacgaagcgtacgaagcttacaaagccgggcgtgctccaacgccggaagactttcctcgccaattggcgcttatgaaggaattagtggatttgcttggcctcgaacgcttggaagttcccggtttcgaggcagacgacgtattagcgactctcgcaaagaaagccgaacgtgagggctatgaagtccagatcttgacagcagatcgcgatcttttccagcttttatctccgcgcatctcggtgttacacccggaagggcatcgtatcaccccggaatggctctgggagaaatatggtttgcgtcccgaacaatgggtggattttcgcgccttagcaggcgatccgagcgacaatattccgggagttaaaggtatcggcgagaagacggcgctcaagctccttaaagaatgggggtcgttggagaacttgcttaagaatttagatcaggtcaaaccagagtcagtgcgtgagaagattcttgctcacctcgaagacctcaaattaagccgcgaattgtcccgtgtacgcaccgatttgccgctcgaagttgatttcggtcgccgccgcgaacctgactgggagggtcttaaagcgtttttagagcgtcttgaatttggttcgctcttgcatgaattcggccttttagaaagcccgttactggccgaagaagcaccttggccaccgcccgagggcgcgtttttaggttaccgtttgagtcgcccggaaccgatgtgggccgaattactggctcttgcagcgtctgcccagggacgtgtgtatcgcgcggaagaccctcatggtgcgctccgcggcctcttcgaagtccgtggactccttgccaaagacttagctgttgttgcattgcgcgaaggtcttgatttacctccgactgatgatccaatgcttcttgcgtacctcttggacccgtcaaacacgacgcccgaaggcgtagcccgtcgttacggcggcgagtggaccgaagatgcagcgaaacgcgcgttattggccgaacgtttgcacgaaaatttattaggacgtttgcaaggcgaggaacgtctcctctggctttacgaagaagtggagaaaccattgagtcgcgtgctcgcgcatatggaagctaccggtgtcaaattagacgtggcgtatttggagaatctcagccttgaagttgctgcccacatgcgccgcttggaggaagaagtattccgtttagcaggccgttcctttcgccttaactctcgcgatcagttagaacgtgtgttgttcgatgaacttggtctccctcctatcggcaagacagagaagaccggtaaacgtagcacttcagcggcggttttagaagctcttcgcgaagtccatcccattgtggacaagatcttgcagtaccgcgaaatggcgaaattgaaaggcacctatattgaccgtcttccggcattagtccacccgaaaacgggacgcctccatacccgcttcaaccaaacagccacggcgaccggtcgtttgtcctcctctgatccaaaccttcagaatattccagtacgtaccccattgggccagaagatccgccgtgcgtttgtagctgaggagggttggcgtttagtggccctcgattatcgtcaaattgaattacgtgtccttgcccatctttctggcgatgagaacctcatccgcgtgtttcaggaaggcaaagacattcacactcaaacggcaagctggatgtttggattatcagctgaagcgatcgatcctttgatgcgtcgtgcagcgaagaccatcaatttcggtgttctctacggtatgagtgcctttcgtttgtcgggtgaattaggcattccctatgaagaagctcaggcgttcattcagaaatactttcaaagctatcccaaagttaaagcatggatcgagaagactctccgtgaaggccgcacacgtggttacgtagagaccttatttggacgtcgccgctatgttcccgatttaaacgctcgcgtgaaaggcaagcgtgaagccgccgaacgcatggcgttcaacatgcctgtacagggcacggcagctgacctcatgaaacttgcaatggtgcgcctttttccacaattgcgtgaagttggtgcccgcatgctcttgcaggtccacgatgaactcttgttagaagcgccaaaagagcgtgcggaagaggtggcagccctcgcgaaagaagttatggaaggcgtgtggcccttagcggtgcctcttgaagtcgaagttggtattggcgaggattggctggctgccaaagga

SEQ ID NO: 5506 - protein, 841 aa, synthetic construct
  REGION 1..841: note = Variant of DNA polymerase I from Thermus sp. strain 2.9
MHHHHHHGVSGVLPVFEPKGRVLLVDGHHLAYRNFFALKGLTTSLGEPVQGVYGFAKSLLKALKEDGDVVIVVFDAKAPSFRHEAYEAYKAGRAPTPEDFPRQLALMKELVDLLGLERLEVPGFEADDVLATLAKKAEREGYEVQILTADRDLFQLLSPRISVLHPEGHRITPEWLWEKYGLRPEQWVDFRALAGDPSDNIPGVKGIGEKTALKLLKEWGSLENLLKNLDQVKPESVREKILAHLEDLKLSRELSRVRTDLPLEVDFGRRREPDWEGLKAFLERLEFGSLLHEFGLLESPLLAEEAPWPPPEGAFLGYRLSRPEPMWAELLALAASAQGRVYRAEDPHGALRGLFEVRGLLAKDLAVVALREGLDLPPTDDPMLLAYLLDPSNTTPEGVARRYGGEWTEDAAKRALLAERLHENLLGRLQGEERLLWLYEEVEKPLSRVLAHMEATGVKLDVAYLENLSLEVAAHMRRLEEEVFRLAGRSFRLNSRDQLERVLFDELGLPPIGKTEKTGKRSTSAAVLEALREVHPIVDKILQYREMAKLKGTYIDRLPALVHPKTGRLHTRFNQTATATGRLSSSDPNLQNIPVRTPLGQKIRRAFVAEEGWRLVALDYRQIELRVLAHLSGDENLIRVFQEGKDIHTQTASWMFGLSAEAIDPLMRRAAKTINFGVLYGMSAFRLSGELGIPYEEAQAFIQKYFQSYPKVKAWIEKTLREGRTRGYVETLFGRRRYVPDLNARVKGKREAAERMAFNMPVQGTAADLMKLAMVRLFPQLREVGARMLLQVHDELLLEAPKERAEEVAALAKEVMEGVWPLAVPLEVEVGIGEDWLAAKG

SEQ ID NO: 5507 - DNA, 2523 bp, synthetic construct
  misc_feature 1..2523: note = Variant of DNA polymerase I from Thermus sp. strain 2.9
  source 1..2523: mol_type = other DNA
atgcaccatcatcatcatcatggcggtagcggcgtgttaccggtgttcgagcctaaaggtcgcgtgcttctggttgatggccatcatctcgcgtatcgtaacttctttgccctgaaaggattaaccaccagcctgggcgagccggtacagggtgtctacggctttgcaaagtcgctcctgaaagctctgaaagaagacggtgatgtggtgattgttgtctttgatgcgaaagcgccaagttttcgccacgaagcgtacgaagcttacaaagccgggcgtgctccaacgccggaagactttcctcgccaattggcgcttatgaaggaattagtggatttgcttggcctcgaacgcttggaagttcccggtttcgaggcagacgacgtattagcgactctcgcaaagaaagccgaacgtgagggctatgaagtccagatcttgacagcagatcgcgatcttttccagcttttatctccgcgcatctcggtgttacacccggaagggcatcgtatcaccccggaatggctctgggagaaatatggtttgcgtcccgaacaatgggtggattttcgcgccttagcaggcgatccgagcgacaatattccgggagttaaaggtatcggcgagaagacggcgctcaagctccttaaagaatgggggtcgttggagaacttgcttaagaatttagatcaggtcaaaccagagtcagtgcgtgagaagattcttgctcacctcgaagacctcaaattaagccgcgaattgtcccgtgtacgcaccgatttgccgctcgaagttgatttcggtcgccgccgcgaacctgactgggagggtcttaaagcgtttttagagcgtcttgaatttggttcgctcttgcatgaattcggccttttagaaagcccgttactggccgaagaagcaccttggccaccgcccgagggcgcgtttttaggttaccgtttgagtcgcccggaaccgatgtgggccgaattactggtgcttgcagcgtctgcccagggacgtgtgtatcgcgcggaagaccctcatggtgcgctccgcggcctcttcgaagtccgtggactccttgccaaagacttagctgttgttgcattgcgcgaaggtcttgatttacctccgactgatgatccaatgcttcttgcgtacctcttggacccgtcaaacacgacgcccgaaggcgtagcccgtcgttacggcggcgagtggaccgaagatgcagcgaaacgcgcgttattggccgaacgtttgcacgaaaatttattaggacgtttgcaaggcgaggaacgtctcctctggctttacgaagaagtggagaaaccattgagtcgcgtgctcgcgcatatggaagctaccggtgtcaaattagacgtggcgtatttggagaatctcagccttgaagttgctgcccacatgcgccgcttggaggaagaagtattccgtttagcaggccgttcctttcgccttaactctcgcgatcagttagaacgtgtgttgttcgatgaacttggtctccctcctatcggcaagacagagaagaccggtaaacgtagcacttcagcggcggttttagaagctcttcgcgaagtccatcccattgtggacaagatcttgcagtaccgcgaaatggcgaaattgaaaggcacctatattgaccgtcttccggcattagtccacccgaaaacgggacgcctccatacccgcttcaaccaaacagccacggcgaccggtcgtttgtcctcctctgatccaaaccttcagaatattccagtacgtaccccattgggccagaagatccgccgtgcgtttgtagctgaggagggttggcgtttagtggccctcgattatcgtcaaattgaattacgtgtccttgcccatctttctggcgatgagaacctcatccgcgtgtttcaggaaggcaaagacattcacactcaaacggcaagctggatgtttggattatcagctgaagcgatcgatcctttgatgcgtcgtgcagcgaagaccatcaatttcggtgttctctacggtatgagtgcctttcgtttgtcgcaggaattaggcattccctatgaagaagctcaggcgttcattcagaaatactttcaaagctatcccaaagttaaagcatggatcgagaagactctccgtgaaggccgcacacgtggttacgtagagaccttatttggacgtcgccgctatgttcccgatttaaacgctcgcgtgaaaggcaagcgtgaagccgccgaacgcatggcgttcaacatgcctgtacagggcacggcagctgacctcatgaaacttgcaatggtgcgcctttttccacaattgcgtgaagttggtgcccgcatgctcttgcaggtccacgatgaactcttgttagaagcgccaaaagagcgtgcggaagaggtggcagccctcgcgaaagaagttatggaaggcgtgtggcccttagcggtgcctcttgaagtcgaagttggtattggcgaggattggctggctgccaaagga

SEQ ID NO: 5508 - protein, 841 aa, synthetic construct
  REGION 1..841: note = Variant of DNA polymerase I from Thermus sp. strain 2.9
MHHHHHHGGSGVLPVFEPKGRVLLVDGHHLAYRNFFALKGLTTSLGEPVQGVYGFAKSLLKALKEDGDVVIVVFDAKAPSFRHEAYEAYKAGRAPTPEDFPRQLALMKELVDLLGLERLEVPGFEADDVLATLAKKAEREGYEVQILTADRDLFQLLSPRISVLHPEGHRITPEWLWEKYGLRPEQWVDFRALAGDPSDNIPGVKGIGEKTALKLLKEWGSLENLLKNLDQVKPESVREKILAHLEDLKLSRELSRVRTDLPLEVDFGRRREPDWEGLKAFLERLEFGSLLHEFGLLESPLLAEEAPWPPPEGAFLGYRLSRPEPMWAELLVLAASAQGRVYRAEDPHGALRGLFEVRGLLAKDLAVVALREGLDLPPTDDPMLLAYLLDPSNTTPEGVARRYGGEWTEDAAKRALLAERLHENLLGRLQGEERLLWLYEEVEKPLSRVLAHMEATGVKLDVAYLENLSLEVAAHMRRLEEEVFRLAGRSFRLNSRDQLERVLFDELGLPPIGKTEKTGKRSTSAAVLEALREVHPIVDKILQYREMAKLKGTYIDRLPALVHPKTGRLHTRFNQTATATGRLSSSDPNLQNIPVRTPLGQKIRRAFVAEEGWRLVALDYRQIELRVLAHLSGDENLIRVFQEGKDIHTQTASWMFGLSAEAIDPLMRRAAKTINFGVLYGMSAFRLSQELGIPYEEAQAFIQKYFQSYPKVKAWIEKTLREGRTRGYVETLFGRRRYVPDLNARVKGKREAAERMAFNMPVQGTAADLMKLAMVRLFPQLREVGARMLLQVHDELLLEAPKERAEEVAALAKEVMEGVWPLAVPLEVEVGIGEDWLAAKG

SEQ ID NO: 5509 - DNA, 2523 bp, synthetic construct
  misc_feature 1..2523: note = Variant of DNA polymerase I from Thermus sp. strain 2.9
  source 1..2523: mol_type = other DNA
atgcaccatcatcatcatcatggcggtagcggcgtgttaccggtgttcgagcctaaaggtcgcgtgcttctggttgatggccatcatctcgcgtatcgtaacttctttgccctgaaaggattaaccaccagcctgggcgagccggtacagggtgtctacggctttgcaaagtcgctcctgaaagctctgaaagaagacggtgatgtggtgattgttgtctttgatgcgaaagcgccaagttttcgccacgaagcgtacgaagcttacaaagccgggcgtgctccaacgccggaagactttcctcgccaattggcgcttatgaaggaattagtggatttgcttggcctcgaacgcttggaagttcccggtttcgaggcagacgacgtattagcgactctcgcaaagaaagccgaacgtgagggctatgaagtccagatcttgacagcagatcgcgatcttttccagcttttatctccgcgcatctcggtgttacacccggaagggcatcgtatcaccccggaatggctctgggagaaatatggtttgcgtcccgaacaatgggtggattttcgcgccttagcaggcgatccgagcgacaatattccgggagttaaaggtatcggcgagaagacggcgctcaagctccttaaagaatgggggtcgttggagaacttgcttaagaatttagatcaggtcaaaccagagtcagtgcgtgagaagattcttgctcacctcgaagacctcaaattaagccgcgaattgtcccgtgtacgcaccgatttgccgctcgaagttgatttcggtcgccgccgcgaacctgactgggagggtcttaaagcgtttttagagcgtcttgaatttggttcgctcttgcatgaattcggccttttagaaagcccgttactggccgaagaagcaccttggccaccgcccgagggcgcgtttttaggttaccgtttgagtcgcccggaaccgatgtgggccgaattactggctcttgcagcgtctgcccagggacgtgtgtatcgcgcggaagaccctcatggtgcgctccgcggcctcttcgaagtccgtggactccttgccaaagacttagctgttgttgcattgcgcgaaggtcttgatttacctccgactgatgatccaatgcttcttgcgtacctcttggacccgtcaaacacgacgcccgaaggcgtagcccgtcgttacggcggcgagtggaccgaagatgcagcgaaacgcgcgttattggccgaacgtttgcacgaaaatttattaggacgtttgcaaggcgaggaacgtctcctctggctttacgaagaagtggagaaaccattgagtcgcgtgctcgcgcatatggaagctaccggtgtcaaattagacgtggcgtatttggagaatctcagccttgaagttgctgcccacatgcgccgcttggaggaagaagtattccgtttagcaggccgttcctttcgccttaactctcgcgatcagttagaacgtgtgttgttcgatgaacttggtctccctcctatcggcaagacagagaagaccggtaaacgtagcacttcagcggcggttttagaagctcttcgcgaagtccatcccattgtggcgaagatcttgcagtaccgcgaaatggcgaaattgaaaggcacctatattgaccgtcttccggcattagtccacccgaaaacgggacgcctccatacccgcttcaaccaaacagccacggcgaccggtcgtttgtcctcctctgatccaaaccttcagaatattccagtacgtaccccattgggccagaagatccgccgtgcgtttgtagctgaggagggttggcgtttagtggccctcgattatcgtcaaattgaattacgtgtccttgcccatctttctggcgatgagaacctcatccgcgtgtttcaggaaggcaaagacattcacactcaaacggcaagctggatgtttggattatcagctgaagcgatcgatcctttgatgcgtcgtgcagcgaagaccatcaatttcggtgttctctacggtatgagtgcctttcgtttgtcgcaggaattaggcattccctatgaagaagctcaggcgttcattcagaaatactttcaaagctatcccaaagttaaagcatggatcgagaagactctccgtgaaggccgcacacgtggttacgtagagaccttatttggacgtcgccgctatgttcccgatttaaacgctcgcgtgaaaggcaagcgtgaagccgccgaacgcatggcgttcaacatgcctgtacagggcacggcagctgacctcatgaaacttgcaatggtgcgcctttttccacaattgcgtgaagttggtgcccgcatgctcttgcaggtccacgatgaactcttgttagaagcgccaaaagagcgtgcggaagaggtggcagccctcgcgaaagaagttatggaaggcgtgtggcccttagcggtgcctcttgaagtcgaagttggtattggcgaggattggctggctgccaaagga

SEQ ID NO: 5510 - protein, 841 aa, synthetic construct
  REGION 1..841: note = Variant of DNA polymerase I from Thermus sp. strain 2.9
MHHHHHHGGSGVLPVFEPKGRVLLVDGHHLAYRNFFALKGLTTSLGEPVQGVYGFAKSLLKALKEDGDVVIVVFDAKAPSFRHEAYEAYKAGRAPTPEDFPRQLALMKELVDLLGLERLEVPGFEADDVLATLAKKAEREGYEVQILTADRDLFQLLSPRISVLHPEGHRITPEWLWEKYGLRPEQWVDFRALAGDPSDNIPGVKGIGEKTALKLLKEWGSLENLLKNLDQVKPESVREKILAHLEDLKLSRELSRVRTDLPLEVDFGRRREPDWEGLKAFLERLEFGSLLHEFGLLESPLLAEEAPWPPPEGAFLGYRLSRPEPMWAELLALAASAQGRVYRAEDPHGALRGLFEVRGLLAKDLAVVALREGLDLPPTDDPMLLAYLLDPSNTTPEGVARRYGGEWTEDAAKRALLAERLHENLLGRLQGEERLLWLYEEVEKPLSRVLAHMEATGVKLDVAYLENLSLEVAAHMRRLEEEVFRLAGRSFRLNSRDQLERVLFDELGLPPIGKTEKTGKRSTSAAVLEALREVHPIVAKILQYREMAKLKGTYIDRLPALVHPKTGRLHTRFNQTATATGRLSSSDPNLQNIPVRTPLGQKIRRAFVAEEGWRLVALDYRQIELRVLAHLSGDENLIRVFQEGKDIHTQTASWMFGLSAEAIDPLMRRAAKTINFGVLYGMSAFRLSQELGIPYEEAQAFIQKYFQSYPKVKAWIEKTLREGRTRGYVETLFGRRRYVPDLNARVKGKREAAERMAFNMPVQGTAADLMKLAMVRLFPQLREVGARMLLQVHDELLLEAPKERAEEVAALAKEVMEGVWPLAVPLEVEVGIGEDWLAAKG

SEQ ID NO: 5511 - DNA, 2523 bp, synthetic construct
  misc_feature 1..2523: note = Variant of DNA polymerase I from Thermus sp. strain 2.9
  source 1..2523: mol_type = other DNA
atgcaccatcatcatcatcatggcggtagcggcgtgttaccggtgttcgagcctaaaggtcgcgtgcttctggttgatggccatcatctcgcgtatcgtaacttctttgccctgaaaggattaaccaccagcctgggcgagccggtacagggtgtctacggctttgcaaagtcgctcctgaaagctctgaaagaagacggtgatgtggtgattgttgtctttgatgcgaaagcgccaagttttcgccacgaagcgtacgaagcttacaaagccgggcgtgcttcaacgccggaagactttcctcgccaattggcgcttatgaaggaattagtggatttgcttggcctcgaacgcttggaagttcccggtttcgaggcagacgacgtattagcgactctcgcaaagaaagccgaacgtgagggctatgaagtccagatcttgacagcagatcgcgatcttttccagcttttatctccgcgcatctcggtgttacacccggaagggcatcgtatcaccccggaatggctctgggagaaatatggtttgcgtcccgaacaatgggtggattttcgcgccttagcaggcgatccgagcgacaatattccgggagttaaaggtatcggcgagaagacggcgctcaagctccttaaagaatgggggtcgttggagaacttgcttaagaatttagatcaggtcaaaccagagtcagtgcgtgagaagattcttgctcacctcgaagacctcaaattaagccgcgaattgtcccgtgtacgcaccgatttgccgctcgaagttgatttccgccgccgccgcgaacctgactgggagggtcttaaagcgtttttagagcgtcttgaatttggttcgctcttgcatgaattcggccttttagaaagcccgttaccggccgaagaagcaccttggccaccgcccgagggcgcgtttttaggttaccgtttgagtcgcccggaaccgatgtgggccgaattactggctcttgcagcgtctgcccagggacgtgtgtatcgcgcggaagaccctcatggtgcgctccgcggcctcttcgaagtccgtggactccttgccaaagacttagctgttgttgcattgcgcgaaggtcttgatttacctccgactgatgatccaatgcttcttgcgtacctcttggacccgtcaaacacgacgcccgaaggcgtagcccgtcgttacggcggcgagtggaccgaagatgcagcgaaacgcgcgttattggccgaacgtttgcacgcaaatttattaggacgtttgcaaggcgaggaacgtctcctctggctttacgaagaagtggagaaaccattgagtcgcgtgctcgcgcatatggaagctaccggtgtcaaattagacgtggcgtatttggagaatctcagccttgaagttgctgcccatatgcgccgcttggaggaagaagtattccgtttagcaggccactcctttcgccttaactctcgcgatcagttagaacgtgtgttgttcgatgaacttggtctccctcctatcggcaagacagagaagaccggtaaacgtagcacttcagcggcggttttagaagctcttcgcgaagtccatcccattgtggacaagatcttgcagtaccgcgaactggcgaaattgaaaggcacctatattgaccctcttccggcattagtccacccgaaaacgggacgcctccatacccgcttcaaccaaacagccacggcgaccggtcgtttgtccagttctgatccaaaccttcagaatattccagtacgtaccccattgggccagaagatccgccgtgcgtttgtagctgaggagggttggcgtttagtggccctcgattatcgtcaaattgaattacgtgtccttgcccatctttctggcgatgagaacctcatccgcgtgtttcaggaaggcaaagacattcacactcaaacggcaagctggatgtttggattatcagctgaagcgatcgatcctttgatgcgtcgtgcagcgaagaccatcaatttcggtgttctctacggtatgagtgcctttcgtttgtcgcaggaattaggcattccctatgaagaagctcaggcgttcattcagaaatactttcaaagctatcccaaagttaaagcatggatcgagaagactctcgaggaaggccgcacacgtggttacgtagagaccttatttggacgtcgccgctatgttcccgatttaaacgctcgcgtgaaaagcgtacgtgaagccgccgaacgcatggcgttcaacatgcctgtacagggcacggcagctgacctcatgaaacttgcaatggtgcgcctttttccacaattgcgtgaagttggtgcccgcatgctcttgcaggtccacgatgaactcttgttagaagcgccaaaagagcgtgcggaagaggtggcagccctcgcgaaagaagttatggaaggcgtgtggcccttagcggtgcctcttgaagtcgaagttggtattggcgaggattggctggctgccaaagga

SEQ ID NO: 5512 - protein, 841 aa, synthetic construct
  REGION 1..841: note = Variant of DNA polymerase I from Thermus sp. strain 2.9
MHHHHHHGGSGVLPVFEPKGRVLLVDGHHLAYRNFFALKGLTTSLGEPVQGVYGFAKSLLKALKEDGDVVIVVFDAKAPSFRHEAYEAYKAGRASTPEDFPRQLALMKELVDLLGLERLEVPGFEADDVLATLAKKAEREGYEVQILTADRDLFQLLSPRISVLHPEGHRITPEWLWEKYGLRPEQWVDFRALAGDPSDNIPGVKGIGEKTALKLLKEWGSLENLLKNLDQVKPESVREKILAHLEDLKLSRELSRVRTDLPLEVDFRRRREPDWEGLKAFLERLEFGSLLHEFGLLESPLPAEEAPWPPPEGAFLGYRLSRPEPMWAELLALAASAQGRVYRAEDPHGALRGLFEVRGLLAKDLAVVALREGLDLPPTDDPMLLAYLLDPSNTTPEGVARRYGGEWTEDAAKRALLAERLHANLLGRLQGEERLLWLYEEVEKPLSRVLAHMEATGVKLDVAYLENLSLEVAAHMRRLEEEVFRLAGHSFRLNSRDQLERVLFDELGLPPIGKTEKTGKRSTSAAVLEALREVHPIVDKILQYRELAKLKGTYIDPLPALVHPKTGRLHTRFNQTATATGRLSSSDPNLQNIPVRTPLGQKIRRAFVAEEGWRLVALDYRQIELRVLAHLSGDENLIRVFQEGKDIHTQTASWMFGLSAEAIDPLMRRAAKTINFGVLYGMSAFRLSQELGIPYEEAQAFIQKYFQSYPKVKAWIEKTLEEGRTRGYVETLFGRRRYVPDLNARVKSVREAAERMAFNMPVQGTAADLMKLAMVRLFPQLREVGARMLLQVHDELLLEAPKERAEEVAALAKEVMEGVWPLAVPLEVEVGIGEDWLAAKG

SEQ ID NO: 5513 - DNA, 2523 bp, synthetic construct
  misc_feature 1..2523: note = Variant of DNA polymerase I from Thermus sp. strain 2.9
  source 1..2523: mol_type = other DNA
atgcaccatcatcatcatcatggcggtagcggcgtgttaccggtgttcgagcctaaaggtcgcgtgcttctggttgatggccatcatctcgcgtatcgtaacttctttgccctgaaaggattaaccaccagcctgggcgagccggtacagggtgtctacggctttgcaaagtcgctcctgaaagctctgaaagaagacggtgatgtggtgattgttgtctttgatgcgaaagcgccaagttttcgccacgaagcgtacgaagcttacaaagccgggcgtgctccaacgccggaagactttcctcgccaattggcgcttatgaaggaattagtggatttgcttggcctcgaacgcttggaagttcccggtttcgaggcagacgacgtattagcgactctcgcaaagaaagccgaacgtgagggctatgaagtccagatcttgacagcagatcgcgatcttttccagcttttatctccgcgcatctcggtgttacacccggaagggcatcgtatcaccccggaatggctctgggagaaatatggtttgcgtcccgaacaatgggtggattttcgcgccttagcaggcgatccgagcgacaatattccgggagttaaaggtatcggcgagaagacggcgctcaagctccttaaagaatgggggtcgttggagaacttgcttaagaatttagatcaggtcaaaccagagtcagtgcgtgagaagattcttgctcacctcgaagacctcaaattaagccgcgaattgtcccgtgtacgcaccgatttgccgctcgaagttgatttcggtcgccgccgcgaacctgactgggagggtcttaaagcgtttttagagcgtcttgaatttggttcgctcttgcatgaattcggccttttagaaagcccgttactggccgaagaagcaccttggccaccgcccgagggcgcgtttttaggttaccgtttgagtcgcccggaaccgatgtgggccgaattactggctcttgcagcgtctgcccagggacgtgtgtatcgcgcggaagaccctcatggtgcgctccgcggcctcttcgaagtccgtggcctccttgccaaagacttagctgttgttgcattgcgcgaaggtcttgatttacctccgactgatgatccaatgcttcttgcgtacctcttggacccgtcaaacacgacgcccgaaggcgtagcccgtcgttacggcggcgagtggaccgaagatgcagccaaacgcgcgttattggccgaacgtttgcacgaaaatttattaggacgtttgcaaggcgaggcgcgtctcctgtggctttacgaagaagtggagaaaccattgagtcgcgtgctcgcgcatatggaagctaccggtgtcaaattagacgtggcgtatttggagaatctcctgcttgaagttgctgcccacatgcgccgcttggaggaagaagtattccgtttagcaggccgttcctttcgccttaactctcgcgatcagttagaacgtgtgttgttcgatgaacttggtctccctcctatcggcaagacagagaagaccggtaaacgtagcacttcagcggcggttttagaagctcttcgcgaagtccatcccattgtggacaagatcttgcagtaccgcgaaatggcgaaattgaaaggcacctatattgaccgtcttccggcattagtccacccgaaaacgggacgcctccatacccgcttcaaccaaacagccacggcgaccggtcgtttgtcctcctctgatccaaaccttcagaatattccagtacgtaccccattgggccagaagatccgccgtgcgtttgtagctgagccgggttggcgtttagtggccctcgattatcgtcaaattgaattacgtgtccttgcccatctttctggcgatgagaacctcatccgcgtgtttcaggaaggcaaagacattcacactcaaacggcaagctggatgtttggattatcagctgaagcgatcgatcctttgatgcgtcgtgcagcgaagaccatcaatttcggtgttctctacggtatgagtgcctttcgtttgtcgcaggaattaggcattccctatgaagaagctcaggctttcattcagaaatactttcaaagctatcccaaagttaaagcatggatcgagaagactctccgtgaaggccgcacacgtggttacgtagagaccttatttggacgtcgccgctatgttcccgatttaaacgctcgcgtgaaaggcaagcgtgaagccgccgaacgcatggcgttcaacatgcctgtacagggcacggcagctgacctcatgaaacttgcaatggtgcgcctttttccacaattgcgtgaagttggtgcccgcatgctcttgcaggtccacgatgaactcttgttagaagcgccaaaagagcgtgcggaagaggtggcagccctcgcgaaagaagttatggaaggcgtgtggcccttagcggtgcctcttgaagtcgaagttggtattggcgaggattggctggctgccaaagga

SEQ ID NO: 5514 - protein, 841 aa, synthetic construct
  REGION 1..841: note = Variant of DNA polymerase I from Thermus sp. strain 2.9
MHHHHHHGGSGVLPVFEPKGRVLLVDGHHLAYRNFFALKGLTTSLGEPVQGVYGFAKSLLKALKEDGDVVIVVFDAKAPSFRHEAYEAYKAGRAPTPEDFPRQLALMKELVDLLGLERLEVPGFEADDVLATLAKKAEREGYEVQILTADRDLFQLLSPRISVLHPEGHRITPEWLWEKYGLRPEQWVDFRALAGDPSDNIPGVKGIGEKTALKLLKEWGSLENLLKNLDQVKPESVREKILAHLEDLKLSRELSRVRTDLPLEVDFGRRREPDWEGLKAFLERLEFGSLLHEFGLLESPLLAEEAPWPPPEGAFLGYRLSRPEPMWAELLALAASAQGRVYRAEDPHGALRGLFEVRGLLAKDLAVVALREGLDLPPTDDPMLLAYLLDPSNTTPEGVARRYGGEWTEDAAKRALLAERLHENLLGRLQGEARLLWLYEEVEKPLSRVLAHMEATGVKLDVAYLENLLLEVAAHMRRLEEEVFRLAGRSFRLNSRDQLERVLFDELGLPPIGKTEKTGKRSTSAAVLEALREVHPIVDKILQYREMAKLKGTYIDRLPALVHPKTGRLHTRFNQTATATGRLSSSDPNLQNIPVRTPLGQKIRRAFVAEPGWRLVALDYRQIELRVLAHLSGDENLIRVFQEGKDIHTQTASWMFGLSAEAIDPLMRRAAKTINFGVLYGMSAFRLSQELGIPYEEAQAFIQKYFQSYPKVKAWIEKTLREGRTRGYVETLFGRRRYVPDLNARVKGKREAAERMAFNMPVQGTAADLMKLAMVRLFPQLREVGARMLLQVHDELLLEAPKERAEEVAALAKEVMEGVWPLAVPLEVEVGIGEDWLAAKG

SEQ ID NO: 5515 - DNA, 2523 bp, synthetic construct
  misc_feature 1..2523: note = Variant of DNA polymerase I from Thermus sp. strain 2.9
  source 1..2523: mol_type = other DNA
atgcaccatcatcatcatcatggcggtagcggcgtgttaccggtgttcgagcctaaaggtcgcgtgcttctggttgatggccatcatctcgcgtatcgtaacttctttgccctgaaaggattaaccaccagcctgggcgagccggtacagggtgtctacggctttgcaaagtcgctcctgaaagctctgaaagaagacggtgatgtggtgattgttgtctttgatgcgaaagcgccaagttttcgccacgaagcgtacgaagcttacaaagccgggcgtgctccaacgccggaagactttcctcgccaattggcgcttatgaaggaattagtggatttgcttggcctcgaacgcttggaagttcccggtttcgaggcagacgacgtattagcgactctcgcaaagaaagccgaacgtgagggctatgaagtccagatcttgacagcagatcgcgatcttttccagcttttatctccgcgcatctcggtgttacacccggaagggcatcgtatcaccccggaatggctctgggagaaatatggtttgcgtcccgaacaatgggtggattttcgcgccttagcaggcgatccgagcgacaatattccgggagttaaaggtatcggcgagaagacggcgctcaagctccttaaagaatgggggtcgttggagaacttgcttaagaatttagatcaggtcaaaccagagtcagtgcgtgagaagattcttgctcacctcgaagacctcaaattaagccgcgaattgtcccgtgtacgcaccgatttgccgctcgaagttgatttcggtcgccgccgcgaacctgactgggagggtcttaaagcgtttttagagcgtcttgaatttggttcgctcttgcatgaattcggccttttagaaagcccgttactggccgaagaagcaccttggccaccgcccgagggcgcgtttttaggttaccgtttgagtcgcccggaaccgatgtgggccgaattactggctcttgcagcgtctgcccagggacgtgtgtatcgcgcggaagaccctcatggtgcgctccgcggcctcttcgaagtccgtaccctccttgccaaagacttagctgttgttgcattgcgcgaaggtcttgatttacctccgactgatgatccaatgcttcttgcgtacctcttggacccgtcaaacacgacgcccgaaggcgtagcccgtcgttacggcggcgagtggaccgaagatgcaggcaaacgcgcgttattggccgaacgtttgcacgaaaatttattaggacgtttgcaaggcgaggagcgtctcctgtggctttacgaagaagtggagaaaccattgagtcgcgtgctcgcgcatatggaagctaccggtgtcaaattagacgtggcgtatttggagaatctcagccttgaagttgctgcccacatgcgccgcttggaggaagaagtattccgtttagcaggccgttcctttcgccttaactctcgcgatcagttagaacgtgtgttgttcgatgaacttggtctccctcctatcggcaagacagagaagaccggtaaacgtagcacttcagcggcggttttagaagctcttcgcgaagtccatcccattgtggacaagatcttgcagtaccgcgaaatggcgaaattgaaaggcacctatattgaccgtcttccggcattagtccacccgaaaacgggacgcctccatacccgcttcaaccaaacagccacggcgaccggtcgtttgtcctcctctgatccaaaccttcagaatattccagtacgtacctttttgggccagaagatccgccgtgcgtttgtagctgagaagggttggcgtttagtggccctcgattatcgtcaaattgaattacgtgtccttgcccatctttctggcgatgagaacctcatccgcgtgtttcaggaaggcaaagacattcacactcaaacggcaagctggatgtttggattatcagctgaagcgatcgatcctttgatgcgtcgtgcagcgaagaccatcaatttcggtgttctctacggtatgagtgcctttcgtttgtcgcaggaattaggcattccctatgaagaagctcaggcgttcattcagaaatactttcaaagctatcccaaagttaaagcatggatcgagaagactctccgtgaaggccgcacacgtggttacgtagagaccttatttggacgtcgccgctatgttcccgatttaaactcgcgcgtgaaaggcaagcgtgaagccgccgaacgcatggcgttcaacatgcctgtacagggcacggcagctgacctcatgaaacttgcaatggtgcgcctttttccacaattgcgtgaagttggtgcccgcatgctgttgcaggtccacgatgaactcttgttagaagcgccaaaagagcgtgcggaagaggtggcagccctcgcgaaagaagttatggaaggcgtgtggcccttagcggtgcctcttgaagtcgaagttggtattggcgaggattggctggctgccaaagga

SEQ ID NO: 5516 - protein, 841 aa, synthetic construct
  REGION 1..841: note = Variant of DNA polymerase I from Thermus sp. strain 2.9
MHHHHHHGGSGVLPVFEPKGRVLLVDGHHLAYRNFFALKGLTTSLGEPVQGVYGFAKSLLKALKEDGDVVIVVFDAKAPSFRHEAYEAYKAGRAPTPEDFPRQLALMKELVDLLGLERLEVPGFEADDVLATLAKKAEREGYEVQILTADRDLFQLLSPRISVLHPEGHRITPEWLWEKYGLRPEQWVDFRALAGDPSDNIPGVKGIGEKTALKLLKEWGSLENLLKNLDQVKPESVREKILAHLEDLKLSRELSRVRTDLPLEVDFGRRREPDWEGLKAFLERLEFGSLLHEFGLLESPLLAEEAPWPPPEGAFLGYRLSRPEPMWAELLALAASAQGRVYRAEDPHGALRGLFEVRTLLAKDLAVVALREGLDLPPTDDPMLLAYLLDPSNTTPEGVARRYGGEWTEDAGKRALLAERLHENLLGRLQGEERLLWLYEEVEKPLSRVLAHMEATGVKLDVAYLENLSLEVAAHMRRLEEEVFRLAGRSFRLNSRDQLERVLFDELGLPPIGKTEKTGKRSTSAAVLEALREVHPIVDKILQYREMAKLKGTYIDRLPALVHPKTGRLHTRFNQTATATGRLSSSDPNLQNIPVRTFLGQKIRRAFVAEKGWRLVALDYRQIELRVLAHLSGDENLIRVFQEGKDIHTQTASWMFGLSAEAIDPLMRRAAKTINFGVLYGMSAFRLSQELGIPYEEAQAFIQKYFQSYPKVKAWIEKTLREGRTRGYVETLFGRRRYVPDLNSRVKGKREAAERMAFNMPVQGTAADLMKLAMVRLFPQLREVGARMLLQVHDELLLEAPKERAEEVAALAKEVMEGVWPLAVPLEVEVGIGEDWLAAKG

SEQ ID NO: 5517 - DNA, 2523 bp, synthetic construct
  misc_feature 1..2523: note = Variant of DNA polymerase I from Thermus sp. strain 2.9
  source 1..2523: mol_type = other DNA
atgcaccatcatcatcatcatggcggtagcggcgtgttaccggtgttcgagcctaaaggtcgcgtgcttctggttgatggccatcatctcgcgtatcgtaacttctttgccctgaaaggattaaccaccagcctgggcgagccggtacagggtgtctacggctttgcaaagtcgctcctgaaagctctgaaagaagacggtgatgtggtgattgttgtctttgatgcgaaagcgccaagttttcgccacgaagcgtacgaagcttacaaagccgggcgtgctccaacgccggaagactttcctcgccaattggcgcttatgaaggaattagtggatttgcttggcctcgaacgcttggaagttcccggtttcgaggcagacgacgtattagcgactctcgcaaagaaagccgaacgtgagggctatgaagtccagatcttgacagcagatcgcgatcttttccagcttttatctccgcgcatctcggtgttacacccggaagggcatcgtatcaccccggaatggctctgggagaaatatggtttgcgtcccgaacaatgggtggattttcgcgccttagcaggcgatccgagcgacaatattccgggagttaaaggtatcggcgagaagacggcgctcaagctccttaaagaatgggggtcgttggagaacttgcttaagaatttagatcaggtcaaaccagagtcagtgcgtgagaagattcttgctcacctcgaagacctcaaattaagccgcgaattgtcccgtgtacgcaccgatttgccgctcgaagttgatttcggtcgccgccgcgaacctgactgggagggtcttaaagcgtttttagagcgtcttgaatttggttcgctcttgcatgaattcggccttttagaaagcccgttactggccgaagaagcaccttggccaccgcccgagggcgcgtttttaggttaccgtttgagtcgcccggaaccgatgtgggccgaattactggctcttgcagcgtctgcccagggacgtgtgtatcgcgcggaagaccctcatggtgcgctccgcggcctcttcgaagtccgtggactccttgccaaagacttagctgttgttgcattgcgcgaaggtcttgatttacctccgactgatgatccaatgcttcttgcgtacctcttggacccgtcaaacacgacgcccgaaggcgtagcccgtcgttacggcggcgagtggaccgaagatgcaggcaaacgcgcgttattggccgaacgtttgcacgaaaatttattaggacgtttgcaaggcgaggaacgtctcctctggctttacgaagaagtggagaaaccattgagtcgcgtgctcgcgcatatggaagctaccggtgtcaaattagacgtggcgtatttggagaatctcagccttgaagttgctgcccacatgcgccgcttggaggaagaagtattccgtttagcaggccgttcctttcgccttaactctcgcgatcagttagaacgtgtgttgttcgatgaacttggtctccctcctatcggcaagacagagaagaccggtaaacgtagcacttcagcggcggttttagaagctcttcgcgaagtccatcccattgtggacaagatcttgcagtaccgcgaaatggcgaaattgaaaggcacctatattgaccgtcttccggcattagtccacccgaaaacgggacgcctccatacccgcttcaaccaaacagccacggcgaccggtcgtttgtcctcctctgatccaaaccttcagaatattccagtacgtaccccattgggccagaagatccgccgtgcgtttgtagctgaggagggttggcgtttagtggccctcgattatcgtcaaattgaattacgtgtccttgcccatctttctggcgatgagaacctcatccgcgtgtttcaggaaggcaaagacattcacactcaaacggcaagctggatgtttggattatcagctgaagcgatcgatcctttgatgcgtcgtgcagcgaagaccatcaatttcggtgttctctacggtatgagtgcctttcgtttgtcgcaggaattaggcattccctatgaagaagctcaggcgttcattcagaaatactttcaaggctatcccaaagttaaagcatggatcgagaagactctccgtgaaggccgcacacgtggttacgtagagaccttatttggacgtcgccgctatgttcccgatttaaacggtcgcgtgaaaggcaagcgtgaagccgccgaacgcatggcgttcaacatgcctgtacagggcacggcagctgacctcatgaaacttgcaatggtgcgcctttttccacaattgcgtgaagttggtgcccgcatgctgttgcaggtccacgatgaactcttgttagaagcgccaaaagagcgtgcggaagaggtggcagccctcgcgaaagaagttatggaaggcgtgtggcccttagcggtgcctcttgaagtcgaagttggtattggcgaggattggctggctgccaaagga

SEQ ID NO: 5518 - protein, 841 aa, synthetic construct
  REGION 1..841: note = Variant of DNA polymerase I from Thermus sp. strain 2.9
MHHHHHHGGSGVLPVFEPKGRVLLVDGHHLAYRNFFALKGLTTSLGEPVQGVYGFAKSLLKALKEDGDVVIVVFDAKAPSFRHEAYEAYKAGRAPTPEDFPRQLALMKELVDLLGLERLEVPGFEADDVLATLAKKAEREGYEVQILTADRDLFQLLSPRISVLHPEGHRITPEWLWEKYGLRPEQWVDFRALAGDPSDNIPGVKGIGEKTALKLLKEWGSLENLLKNLDQVKPESVREKILAHLEDLKLSRELSRVRTDLPLEVDFGRRREPDWEGLKAFLERLEFGSLLHEFGLLESPLLAEEAPWPPPEGAFLGYRLSRPEPMWAELLALAASAQGRVYRAEDPHGALRGLFEVRGLLAKDLAVVALREGLDLPPTDDPMLLAYLLDPSNTTPEGVARRYGGEWTEDAGKRALLAERLHENLLGRLQGEERLLWLYEEVEKPLSRVLAHMEATGVKLDVAYLENLSLEVAAHMRRLEEEVFRLAGRSFRLNSRDQLERVLFDELGLPPIGKTEKTGKRSTSAAVLEALREVHPIVDKILQYREMAKLKGTYIDRLPALVHPKTGRLHTRFNQTATATGRLSSSDPNLQNIPVRTPLGQKIRRAFVAEEGWRLVALDYRQIELRVLAHLSGDENLIRVFQEGKDIHTQTASWMFGLSAEAIDPLMRRAAKTINFGVLYGMSAFRLSQELGIPYEEAQAFIQKYFQGYPKVKAWIEKTLREGRTRGYVETLFGRRRYVPDLNGRVKGKREAAERMAFNMPVQGTAADLMKLAMVRLFPQLREVGARMLLQVHDELLLEAPKERAEEVAALAKEVMEGVWPLAVPLEVEVGIGEDWLAAKG

SEQ ID NO: 5519 - DNA, 2523 bp, synthetic construct
  misc_feature 1..2523: note = Variant of DNA polymerase I from Thermus sp. strain 2.9
  source 1..2523: mol_type = other DNA
atgcaccatcatcatcatcatggcggtagcggcgtgttaccggtgttcgagcctaaaggtcgcgtgcttctggttgatggccatcatctcgcgtatcgtaacttctttgccctgaaaggattaaccaccagcctgggcgagccggtacagggtgtctacggctttgcaaagtcgctcctgaaagctctgaaagaagacggtgatgtggtgattgttgtctttgatgcgaaagcgccaagttttcgccacgaagcgtacgaagcttacaaagccgggcgtgctccaacgccggaagactttcctcgccaattggcgcttatgaaggaattagtggatttgcttggcctcgaacgcttggaagttcccggtttcgaggcagacgacgtattagcgactctcgcaaagaaagccgaacgtgagggctatgaagtccagatcttgacagcagatcgcgatcttttccagcttttatctccgcgcatctcggtgttacacccggaagggcatcgtatcaccccggaatggctctgggagaaatatggtttgcgtcccgaacaatgggtggattttcgcgccttagcaggcgatccgagcgacaatattccgggagttaaaggtatcggcgagaagacggcgctcaagctccttaaagaatgggggtcgttggagaacttgcttaagaatttagatcaggtcaaaccagagtcagtgcgtgagaagattcttgctcacctcgaagacctcaaattaagccgcgaattgtcccgtgtacgcaccgatttgccgctcgaagttgatttcggtcgccgccgcgaacctgactgggagggtcttaaagcgtttttagagcgtcttgaatttggttcgctcttgcatgaattcggccttttagaaagcccgttactggccgaagaagcaccttggccaccgcccgagggcgcgtttttaggttaccgtttgagtcgcccggaaccgatgtgggccgaattactggctcttgcagcgtctgcccagggacgtgtgtatcgcgcggaagaccctcatggtgcgctccgcggcctcttcgaagtccgtggactccttgccaaagacttagctgttgttgcattgcgcgaaggtcttgatttacctccgactgatgatccaatgcttcttgcgtacctcttggacccgtcaaacacgacgcccgaaggcgtagcccgtcgttacggcggcgagtgggcggaagatgcagcgaaacgcgcgttattggccgaacgtttgcacgaaaatttattaggacgtttgcaaggcgaggaacgtctcctctggctttacgaagaagtggagaaaccattgagtcgcgtgctcgcgcatatggaagctaccggtgtcaaattagacgtggcgtatttggagaatctcagccttgaagttgctgcccacatgcgccgcttggaggaagaagtattccgtttagcaggccgttcctttcgccttaactctcgcgatcagttagaacgtgtgttgttcgatgaacttggtctccctcctatcggcaagacagagaagaccggtaaacgtagcacttcagcggcggttttagaagctcttcgcgaagtccatcccattgtggacaagatcttgcagtaccgcgaaatggcgaaattgaaaggcacctatattgaccgtcttccggcattagtccacccgaaaacgggacgcctccatacccgcttcaaccaaacagccacggcgaccggtcgtttgtcctcctctgatccaaaccttcagaatattccagtacgtaccccattgggccagaagatccgccgtgcgtttgtagctgaggagggttggcgtttagtggccctcgattatcgtcaaattgaattacgtgtccttgcccatctttctggcgatgagaacctcatccgcgtgtttcaggaaggcaaagacattcacactcaaacggcaagctggatgtttggattatcagctgaagcgatcgatcctttgatgcgtcgtgcagcgaagaccatcaatttcggtgttctctacggtatgagtgcctttcgtttgtcgcaggaattaggcattccctatgaagaagctcaggcgttcattcagaaatactttcaaagctatcccaaagttaaagcatggatcgagaagactctccgtgaaggccgcacacgtggttacgtagagaccttatttggacgtcgccgctatgttcccgatttaaacgctcgcgtgaaaggcaagcgtgaagccgccgaacgcatggcgttcaacatgcctgtacagggcacggcagctgacctcatgaaacttgcaatggtgcgcctttttccacaattgcgtgaagttggtgcccgcatgctcttgcaggtccacgatgaactcttgttagaagcgccaaaagagcgtgcggaagaggtggcagccctcgcgaaagaagttatggaaggcgtgtggcccttagcggtgcctcttgaagtcgaagttggtattggcgaggattggctggctgccaaagga

SEQ ID NO: 5520 - protein, 841 aa, synthetic construct
  REGION 1..841: note = Variant of DNA polymerase I from Thermus sp. strain 2.9
MHHHHHHGGSGVLPVFEPKGRVLLVDGHHLAYRNFFALKGLTTSLGEPVQGVYGFAKSLLKALKEDGDVVIVVFDAKAPSFRHEAYEAYKAGRAPTPEDFPRQLALMKELVDLLGLERLEVPGFEADDVLATLAKKAEREGYEVQILTADRDLFQLLSPRISVLHPEGHRITPEWLWEKYGLRPEQWVDFRALAGDPSDNIPGVKGIGEKTALKLLKEWGSLENLLKNLDQVKPESVREKILAHLEDLKLSRELSRVRTDLPLEVDFGRRREPDWEGLKAFLERLEFGSLLHEFGLLESPLLAEEAPWPPPEGAFLGYRLSRPEPMWAELLALAASAQGRVYRAEDPHGALRGLFEVRGLLAKDLAVVALREGLDLPPTDDPMLLAYLLDPSNTTPEGVARRYGGEWAEDAAKRALLAERLHENLLGRLQGEERLLWLYEEVEKPLSRVLAHMEATGVKLDVAYLENLSLEVAAHMRRLEEEVFRLAGRSFRLNSRDQLERVLFDELGLPPIGKTEKTGKRSTSAAVLEALREVHPIVDKILQYREMAKLKGTYIDRLPALVHPKTGRLHTRFNQTATATGRLSSSDPNLQNIPVRTPLGQKIRRAFVAEEGWRLVALDYRQIELRVLAHLSGDENLIRVFQEGKDIHTQTASWMFGLSAEAIDPLMRRAAKTINFGVLYGMSAFRLSQELGIPYEEAQAFIQKYFQSYPKVKAWIEKTLREGRTRGYVETLFGRRRYVPDLNARVKGKREAAERMAFNMPVQGTAADLMKLAMVRLFPQLREVGARMLLQVHDELLLEAPKERAEEVAALAKEVMEGVWPLAVPLEVEVGIGEDWLAAKG

SEQ ID NO: 5521 - DNA, 2523 bp, synthetic construct
  misc_feature 1..2523: note = Variant of DNA polymerase I from Thermus sp. strain 2.9
  source 1..2523: mol_type = other DNA
atgcaccatcatcatcatcatggcggtagcggcgtgttaccggtgttcgagcctaaaggtcgcgtgcttctggttgatggccatcatctcgcgtatcgtaacttctttgccctgaaaggattaaccaccagcctgggcgagccggtacagggtgtctacggctttgcaaagtcgctcctgaaagctctgaaagaagacggtgatgtggtgattgttgtctttgatgcgaaagcgccaagttttcgccacgaagcgtacgaagcttacaaagccgggcgtgctccaacgccggaagactttcctcgccaattggcgcttatgaaggaattagtggatttgcttggcctcgaacgcttggaagttcccggtttcgaggcagacgacgtattagcgactctcgcaaagaaagccgaacgtgagggctatgaagtccagatcttgacagcagatcgcgatcttttccagcttttatctccgcgcatctcggtgttacacccggaagggcatcgtatcaccccggaatggctctgggagaaatatggtttgcgtcccgaacaatgggtggattttcgcgccttagcaggcgatccgagcgacaatattccgggagttaaaggtatcggcgagaagacggcgctcaagctccttaaagaatgggggtcgttggagaacttgcttaagaatttagatcaggtcaaaccagagtcagtgcgtgagaagattcttgctcacctcgaagacctcaaattaagccgcgaattgtcccgtgtacgcaccgatttgccgctcgaagttgatttcggtcgccgccgcgaacctgactgggagggtcttaaagcgtttttagagcgtcttgaatttggttcgctcttgcatgaattcggccttttagaaagcccgttactggccgaagaagcaccttggccaccgcccgagggcgcgtttttaggttaccgtttgagtcgcccggaaccgatgtgggccgaattactggctcttgcatgttctgcccagggacgtgtgtatcgcgcggaagaccctcatggtgcgctccgcggcctcttcgaagtccgtggactccttgccaaagacttagctgttgttgcattgcgcgaaggtcttgatttacctccgactgatgatccaatgcttcttgcgtacctcttggacccgtcaaacacgacgcccgaaggcgtagcccgtcgttacggcggcgagtggaccgaagatgcagcgaaacgcgcgttattggccgaacgtttgcacgaaaatttattaggacgtttgcaaggcgaggaacgtctcctctggctttacgaagaagtggagaaaccattgagtcgcgtgctcgcgcatatggaagctaccggtgtcaaattagacgtggcgtatttggagaatctcagccttgaagttgctgcccacatgcgccgcttggaggaagaagtattccgtttagcaggccgttcctttcgccttaactctcgcgatcagttagaacgtgtgttgttcgatgaacttggtctccctcctatcggcaagacagagaagaccggtaaacgtagcacttcagcggcggttttagaagctcttcgcgaagtccatcccattgtggacaagatcttgcagtaccgcgaaatggcgaaattgaaaggcacctatattgaccgtcttccggcattagtccacccgaaaacgggacgcctccatacccgcttcaaccaaacagccacggcgaccggtcgtttgtcctcctctgatccaaaccttcagaatattccagtacgtaccccattgggccagaagatccgccgtgcgtttgtagctgaggagggttggcgtttagtggccctcgattatcgtcaaattgaattacgtgtccttgcccatctttctggcgatgagaacctcatccgcgtgtttcaggaaggcaaagacattcacactcaaacggcaagctggatgtttggattatcagctgaagcgatcgatcctttgatgcgtcgtgcagcgaagaccatcaatttcggtgttctctacggtatgagtgcctttcgtttgtcgcaggaattaggcattccctatgaagaagctcaggcgttcattcagaaatactttcaaagctatcccaaagttaaagcatggatcgagaagactctccgtgaaggccgcacacgtggttacgtagagaccttatttggacgtcgccgctatgttcccgatttaaacgctcgcgtgaaaggcaagcgtgaagccgccgaacgcatggcgttcaacatgcctgtacagggcacggcagctgacctcatgaaacttgcaatggtgcgcctttttccacaattgcgtgaagttggtgcccgcatgctcttgcaggtccacgatgaactcttgttagaagcgccaaaagagcgtgcggaagaggtggcagccctcgcgaaagaagttatggaaggcgtgtggcccttagcggtgcctcttgaagtcgaagttggtattggcgaggattggctggctgccaaagga

SEQ ID NO: 5522 - protein, 841 aa, synthetic construct
  REGION 1..841: note = Variant of DNA polymerase I from Thermus sp. strain 2.9
MHHHHHHGGSGVLPVFEPKGRVLLVDGHHLAYRNFFALKGLTTSLGEPVQGVYGFAKSLLKALKEDGDVVIVVFDAKAPSFRHEAYEAYKAGRAPTPEDFPRQLALMKELVDLLGLERLEVPGFEADDVLATLAKKAEREGYEVQILTADRDLFQLLSPRISVLHPEGHRITPEWLWEKYGLRPEQWVDFRALAGDPSDNIPGVKGIGEKTALKLLKEWGSLENLLKNLDQVKPESVREKILAHLEDLKLSRELSRVRTDLPLEVDFGRRREPDWEGLKAFLERLEFGSLLHEFGLLESPLLAEEAPWPPPEGAFLGYRLSRPEPMWAELLALACSAQGRVYRAEDPHGALRGLFEVRGLLAKDLAVVALREGLDLPPTDDPMLLAYLLDPSNTTPEGVARRYGGEWTEDAAKRALLAERLHENLLGRLQGEERLLWLYEEVEKPLSRVLAHMEATGVKLDVAYLENLSLEVAAHMRRLEEEVFRLAGRSFRLNSRDQLERVLFDELGLPPIGKTEKTGKRSTSAAVLEALREVHPIVDKILQYREMAKLKGTYIDRLPALVHPKTGRLHTRFNQTATATGRLSSSDPNLQNIPVRTPLGQKIRRAFVAEEGWRLVALDYRQIELRVLAHLSGDENLIRVFQEGKDIHTQTASWMFGLSAEAIDPLMRRAAKTINFGVLYGMSAFRLSQELGIPYEEAQAFIQKYFQSYPKVKAWIEKTLREGRTRGYVETLFGRRRYVPDLNARVKGKREAAERMAFNMPVQGTAADLMKLAMVRLFPQLREVGARMLLQVHDELLLEAPKERAEEVAALAKEVMEGVWPLAVPLEVEVGIGEDWLAAKG

SEQ ID NO: 5523 - DNA, 2523 bp, synthetic construct
  misc_feature 1..2523: note = Variant of DNA polymerase I from Thermus sp. strain 2.9
  source 1..2523: mol_type = other DNA
atgcaccatcatcatcatcatggcggtagcggcgtgttaccggtgttcgagcctaaaggtcgcgtgcttctggttgatggccatcatctcgcgtatcgtaacttctttgccctgaaaggattaaccaccagcctgggcgagccggtacagggtgtctacggctttgcaaagtcgctcctgaaagctctgaaagaagacggtgatgtggtgattgttgtctttgatgcgaaagcgccaagttttcgccacgaagcgtacgaagcttacaaagccgggcgtgctccaacgccggaagactttcctcgccaattggcgcttatgaaggaattagtggatttgcttggcctcgaacgcttggaagttcccggtttcgaggcagacgacgtattagcgactctcgcaaagaaagccgaacgtgagggctatgaagtccagatcttgacagcagatcgcgatcttttccagcttttatctccgcgcatctcggtgttacacccggaagggcatcgtatcaccccggaatggctctgggagaaatatggtttgcgtcccgaacaatgggtggattttcgcgccttagcaggcgatccgagcgacaatattccgggagttaaaggtatcggcgagaagacggcgctcaagctccttaaagaatgggggtcgttggagaacttgcttaagaatttagatcaggtcaaaccagagtcagtgcgtgagaagattcttgctcacctcgaagacctcaaattaagccgcgaattgtcccgtgtacgcaccgatttgccgctcgaagttgatttcggtcgccgccgcgaacctgactgggagggtcttaaagcgtttttagagcgtcttgaatttggttcgctcttgcatgaattcggccttttagaaagcccgttactggccgaagaagcaccttggccaccgcccgagggcgcgtttttaggttaccgtttgagtcgcccggaaccgatgtgggccgaattactggctcttgcagcgtctgcccagggacgtgtgtatcgcgcggaagaccctcatggtgcgctccgcggcctcttcgaagtccgtggactccttgccaaagacttagctgttgttgcattgcgcgaaggtcttgatttacctccgactgatgatccaatgcttcttgcgtacctcttggacccgtcaaacacgacgcccgaaggcgtagcccgtcgttacggcggcgagtggaccgaagatgcagcgaaacgcgcgttattggccgaacgtttgcacgaaaatttattaggacgtttgcaaggcgaggaacgtctcctctggctttacgaagaagtggagaaaccattgagtcgcgtgctcgcgcatatggaagctaccggtgtcaaattagacgtggcgtatttggagaatctcagccttgaagttgctgcccacatgcgccgcttggaggaagaagtattccgtttagcaggccgttcctttcgccttaactctcgcgatcagttagaacgtgtgttgttcgatgaacttggtctccctcctatcggcaagacagagaagaccggtaaacgtagcacttcagcggcggttttagaagctcttcgcgaagtccatcccattgtggacaagatcttgcagtaccgcgaaatggcgaaattgaaaggcacctatattgaccgtcttccggcattagtccacccgaaaacgggacgcctccatacccgcttcaaccaaacagccacggcgaccggtcgtttgtcctcctctgatccaaaccttcagaatattccagtacgtaccccattgggccagaagatccgccgtgcgtttgtagctgaggagggttggcgtttagtggccctcgattatcgtcaaattgaattacgtgtccttgcccatctttctggcgatgagaacctcatccgcgtgtttcaggaaggcaaagacattcacactcaaacggcaagctggatgtttggattatcagctgaagcgatcgatcctttgatgcgtcgtgcagcgaagaccatcaatttcggtgttctctacggtatgagtgcctttcgtttgtcgcaggaattaggcattccctatgaagaagctcaggcgttcattcagaaatactttcaaagctatcccaaagttaaagcatggatcgagaagactctccgtgaaggccgcacacgtggttacgtagagaccttatttggacgtcgccgctatgttcccgatttaaacgctcgcgtgaaaggcaagcgtgaagccgccgaacgcatggcgttcaacatgcctgtacagggcacggcagctgacctcatgaaacttgcaatggtgcgcctttttccacaattgcgtgaagttggtgcccgcatgctcttgcaggtccacgatgaactcttgttacaggcgccaaaagagcgtgcggaagaggtggcagccctcgcgaaagaagttatggaaggcgtgtggcccttagcggtgcctcttgaagtcgaagttggtattggcgaggattggctggctgccaaagga

SEQ ID NO: 5524 - protein, 841 aa, synthetic construct
  REGION 1..841: note = Variant of DNA polymerase I from Thermus sp. strain 2.9
MHHHHHHGGSGVLPVFEPKGRVLLVDGHHLAYRNFFALKGLTTSLGEPVQGVYGFAKSLLKALKEDGDVVIVVFDAKAPSFRHEAYEAYKAGRAPTPEDFPRQLALMKELVDLLGLERLEVPGFEADDVLATLAKKAEREGYEVQILTADRDLFQLLSPRISVLHPEGHRITPEWLWEKYGLRPEQWVDFRALAGDPSDNIPGVKGIGEKTALKLLKEWGSLENLLKNLDQVKPESVREKILAHLEDLKLSRELSRVRTDLPLEVDFGRRREPDWEGLKAFLERLEFGSLLHEFGLLESPLLAEEAPWPPPEGAFLGYRLSRPEPMWAELLALAASAQGRVYRAEDPHGALRGLFEVRGLLAKDLAVVALREGLDLPPTDDPMLLAYLLDPSNTTPEGVARRYGGEWTEDAAKRALLAERLHENLLGRLQGEERLLWLYEEVEKPLSRVLAHMEATGVKLDVAYLENLSLEVAAHMRRLEEEVFRLAGRSFRLNSRDQLERVLFDELGLPPIGKTEKTGKRSTSAAVLEALREVHPIVDKILQYREMAKLKGTYIDRLPALVHPKTGRLHTRFNQTATATGRLSSSDPNLQNIPVRTPLGQKIRRAFVAEEGWRLVALDYRQIELRVLAHLSGDENLIRVFQEGKDIHTQTASWMFGLSAEAIDPLMRRAAKTINFGVLYGMSAFRLSQELGIPYEEAQAFIQKYFQSYPKVKAWIEKTLREGRTRGYVETLFGRRRYVPDLNARVKGKREAAERMAFNMPVQGTAADLMKLAMVRLFPQLREVGARMLLQVHDELLLQAPKERAEEVAALAKEVMEGVWPLAVPLEVEVGIGEDWLAAKG

SEQ ID NO: 5525 - DNA, 2523 bp, synthetic construct
  misc_feature 1..2523: note = Variant of DNA polymerase I from Thermus sp. strain 2.9
  source 1..2523: mol_type = other DNA
atgcaccatcatcatcatcatggcggtagcggcgtgttaccggtgttcgagcctaaaggtcgcgtgcttctggttgatggccatcatctcgcgtatcgtaacttctttgccctgaaaggattaaccaccagcctgggcgagccggtacagggtgtctacggctttgcaaagtcgctcctgaaagctctgaaagaagacggtgatgtggtgattgttgtctttgatgcgaaagcgccaagttttcgccacgaagcgtacgaagcttacaaagccgggcgtgctccaacgccggaagactttcctcgccaattggcgcttatgaaggaattagtggatttgcttggcctcgaacgcttggaagttcccggtttcgaggcagacgacgtattagcgactctcgcaaagaaagccgaacgtgagggctatgaagtccagatcttgacagcagatcgcgatcttttccagcttttatctccgcgcatctcggtgttacacccggaagggcatcgtatcaccccggaatggctctgggagaaatatggtttgcgtcccgaacaatgggtggattttcgcgccttagcaggcgatccgagcgacaatattccgggagttaaaggtatcggcgagaagacggcgctcaagctccttaaagaatgggggtcgttggagaacttgcttaagaatttagatcaggtcaaaccagagtcagtgcgtgagaagattcttgctcacctcgaagacctcaaattaagccgcgaattgtcccgtgtacgcaccgatttgccgctcgaagttgatttccgccgccgccgcgaacctgactgggagggtcttaaagcgtttttagagcgtcttgaatttggttcgctcttgcatgaattcggccttttagaaagcccgttactggccgaagaagcaccttggccaccgcccgagggcgcgtttttaggttaccgtttgagtcgcccggaaccgatgtgggccgaattactggctcttgcagcgtctgcccagggacgtgtgtatcgcgcggaagaccctcatggtgcgctccgcggcctcttcgaagtccgtggactccttgccaaagacttagctgttgttgcattgcgcgaaggtcttgatttacctccgactgatgatccaatgcttcttgcgtacctcttggacccgtcaaacacgacgcccgaaggcgtagcccgtcgttacggcggcgagtggaccgaagatgcagcgaaacgcgcgttattggccgaacgtttgcacgaaaatttattaggacgtttgcaaggcgaggaacgtctcctctggctttacgaagaagtggagaaaccattgagtcgcgtgctcgcgcatatggaagctaccggtgtcaaattagacgtggcgtatttggagaatcttagccttgaagttgctgcccacatgcgccgcttggaggaagaagtattccgtttagcaggccactcctttcgccttaactctcgcgatcagttagaacgtgtgttgttcgatgaacttggtctccctcctatcggcaagacagagaagaccggtaaacgtagcacttcagcggcggttttagaagctcttcgcgaagtccatcccattgtggacaagatcttgcagtaccgcgaactggcgaaattgaaaggcacctatattgaccgtcttccggcattagtccacccgaaaacgggacgcctccatacccgcttcaaccaaacagccacggcgaccggtcgtttgtccagttctgatccaaaccttcagaatattccagtacgtaccccattgggccagaagatccgccgtgcgtttgtagctgaggagggttggcgtttagtggccctcgattatcgtcaaattgaattacgtgtccttgcccatctttctggcgatgagaacctcatccgcgtgtttcaggaaggcaaagacattcacactcaaacggcaagctggatgtttggattatcagctgaagcgatcgatcctttgatgcgtcgtgcagcgaagaccatcaatttcggtgttctctacggtatgagtgcctttcgtttgtcgcaggaattaggcattccctatgaagaagctcaggcgttcattcagaaatactttcaaagctatcccaaagttaaagcatggatcgagaagactctccgcgaaggccgcacacgtggttacgtagagaccttatttggacgtcgccgctatgttcccgatttaaacgctcgcgtgaaaggcaagcgtgaagccgccgaacgcatggcgttcaacatgcctgtacagggcacggcagctgacctcatgaaacttgcaatggtgcgcctttttccacaattgcgtgaagttggtgcccgcatgctcttgcaggtccacgatgaactcttgttagaagcgccaaaagagcgtgcggaagaggtggcagccctcgcgaaagaagttatggaaggcgtgtggcccttagcggtgcctcttgaagtcgaagttggtattggcgaggattggctggctgccaaagga

SEQ ID NO: 5526 - protein, 841 aa, synthetic construct
  REGION 1..841: note = Variant of DNA polymerase I from Thermus sp. strain 2.9
MHHHHHHGGSGVLPVFEPKGRVLLVDGHHLAYRNFFALKGLTTSLGEPVQGVYGFAKSLLKALKEDGDVVIVVFDAKAPSFRHEAYEAYKAGRAPTPEDFPRQLALMKELVDLLGLERLEVPGFEADDVLATLAKKAEREGYEVQILTADRDLFQLLSPRISVLHPEGHRITPEWLWEKYGLRPEQWVDFRALAGDPSDNIPGVKGIGEKTALKLLKEWGSLENLLKNLDQVKPESVREKILAHLEDLKLSRELSRVRTDLPLEVDFRRRREPDWEGLKAFLERLEFGSLLHEFGLLESPLLAEEAPWPPPEGAFLGYRLSRPEPMWAELLALAASAQGRVYRAEDPHGALRGLFEVRGLLAKDLAVVALREGLDLPPTDDPMLLAYLLDPSNTTPEGVARRYGGEWTEDAAKRALLAERLHENLLGRLQGEERLLWLYEEVEKPLSRVLAHMEATGVKLDVAYLENLSLEVAAHMRRLEEEVFRLAGHSFRLNSRDQLERVLFDELGLPPIGKTEKTGKRSTSAAVLEALREVHPIVDKILQYRELAKLKGTYIDRLPALVHPKTGRLHTRFNQTATATGRLSSSDPNLQNIPVRTPLGQKIRRAFVAEEGWRLVALDYRQIELRVLAHLSGDENLIRVFQEGKDIHTQTASWMFGLSAEAIDPLMRRAAKTINFGVLYGMSAFRLSQELGIPYEEAQAFIQKYFQSYPKVKAWIEKTLREGRTRGYVETLFGRRRYVPDLNARVKGKREAAERMAFNMPVQGTAADLMKLAMVRLFPQLREVGARMLLQVHDELLLEAPKERAEEVAALAKEVMEGVWPLAVPLEVEVGIGEDWLAAKG

SEQ ID NO: 5527 - DNA, 2523 bp, synthetic construct
  misc_feature 1..2523: note = Variant of DNA polymerase I from Thermus sp. strain 2.9
  source 1..2523: mol_type = other DNA
atgcaccatcatcatcatcatggcggtagcggcgtgttaccggtgttcgagcctaaaggtcgcgtgcttctggttgatggccatcatctcgcgtatcgtaacttctttgccctgaaaggattaaccaccagcctgggcgagccggtacagggtgtctacggctttgcaaagtcgctcctgaaagctctgaaagaagacggtgatgtggtgattgttgtctttgatgcgaaagcgccaagttttcgccacgaagcgtacgaagcttacaaagccgggcgtgctccaacgccggaagactttcctcgccaattggcgcttatgaaggaattagtggatttgcttggcctcgaacgcttggaagttcccggtttcgaggcagacgacgtattagcgactctcgcaaagaaagccgaacgtgagggctatgaagtccagatcttgacagcagatcgcgatcttttccagcttttatctccgcgcatctcggtgttacacccggaagggcatcgtatcaccccggaatggctctgggagaaatatggtttgcgtcccgaacaatgggtggattttcgcgccttagcaggcgatccgagcgacaatattccgggagttaaaggtatcggcgagaagacggcgctcaagctccttaaagaatgggggtcgttggagaacttgcttaagaatttagatcaggtcaaaccagagtcagtgcgtgagaagattcttgctcacctcgaagacctcaaattaagccgcgaattgtcccgtgtacgcaccgatttgccgctcgaagttgatttcggtcgccgccgcgaacctgactgggagggtcttaaagcgtttttagagcgtcttgaatttggttcgctcttgcatgaattcggccttttagaaagcccgttactggccgaagaagcaccttggccaccgcccgagggcgcgtttttaggttaccgtttgagtcgcccggaaccgatgtgggccgaattactggctcttgcagcgtctgcccagggacgtgtgtatcgcgcggaagaccctcatggtgcgctccgcggcctcttcgaagtccgtaccctccttgccaaagacttagctgttgttgcattgcgcgaaggtcttgatttacctccgactgatgatccaatgcttcttgcgtacctcttggacccgtcaaacacgacgcccgaaggcgtagcccgtcgttacggcggcgagtggaccgaagatgcagccaaacgcgcgttattggccgaacgtttgcacgaaaatttattaggacgtttgcaaggcgaggcgcgtctcctgtggctttacgaagaagtggagaaaccattgagtcgcgtgctcgcgcatatggaagctaccggtgtcaaattagacgtggcgtatttggagaatctcagccttgaagttgctgcccacatgcgccgcttggaggaagaagtattccgtttagcaggccgttcctttcgccttaactctcgcgatcagttagaacgtgtgttgttcgatgaacttggtctccctcctatcggcaagacagagaagaccggtaaacgtagcacttcagcggcggttttagaagctcttcgcgaagtccatcccattgtggacaagatcttgcagtaccgcgaaatggcgaaattgaaaggcacctatattgaccgtcttccggcattagtccacccgaaaacgggacgcctccatacccgcttcaaccaaacagccacggcgaccggtcgtttgtcctcctctgatccaaaccttcagaatattccagtacgtaccccattgggccagaagatccgccgtgcgtttgtagctgagccgggttgggcgttagtggccctcgattatcgtcaaattgaattacgtgtccttgcccatctttctggcgatgagaacctcatccgcgtgtttcaggaaggcaaagacattcacactcaaacggcaagctggatgtttggattatcagctgaagcgatcgatcctttgatgcgtcgtgcagcgaagaccatcaatttcggtgttctctacggtatgagtgcctttcgtttgtcgcaggaattaggcattccctatgaagaagctcagggtttcattcagaaatactttcaaagctatcccaaagttaaagcatggatcgagaagactctccgtgaaggccgcacacgtggttacgtagagaccttatttggacgtcgccgctatgttcccgatttaaacgctcgcgtgaaaggcaagcgtgaagccgccgaacgcatggcgttcaacatgcctgtacagggcacggcagctgacctcatgaaacttgcaatggtgcgcctttttccacaattgcgtgaagttggtgcccgcatgctcttgcaggtccacgatgaactcttgttagaagcgccaaaagagcgtgcggaagaggtggcagccctcgcgaaagaagttatggaaggcgtgtggcccttagcggtgcctcttgaagtcgaagttggtattggcgaggattggctggctgccaaagga

SEQ ID NO: 5528 - protein, 841 aa, synthetic construct
  REGION 1..841: note = Variant of DNA polymerase I from Thermus sp. strain 2.9
MHHHHHHGGSGVLPVFEPKGRVLLVDGHHLAYRNFFALKGLTTSLGEPVQGVYGFAKSLLKALKEDGDVVIVVFDAKAPSFRHEAYEAYKAGRAPTPEDFPRQLALMKELVDLLGLERLEVPGFEADDVLATLAKKAEREGYEVQILTADRDLFQLLSPRISVLHPEGHRITPEWLWEKYGLRPEQWVDFRALAGDPSDNIPGVKGIGEKTALKLLKEWGSLENLLKNLDQVKPESVREKILAHLEDLKLSRELSRVRTDLPLEVDFGRRREPDWEGLKAFLERLEFGSLLHEFGLLESPLLAEEAPWPPPEGAFLGYRLSRPEPMWAELLALAASAQGRVYRAEDPHGALRGLFEVRTLLAKDLAVVALREGLDLPPTDDPMLLAYLLDPSNTTPEGVARRYGGEWTEDAAKRALLAERLHENLLGRLQGEARLLWLYEEVEKPLSRVLAHMEATGVKLDVAYLENLSLEVAAHMRRLEEEVFRLAGRSFRLNSRDQLERVLFDELGLPPIGKTEKTGKRSTSAAVLEALREVHPIVDKILQYREMAKLKGTYIDRLPALVHPKTGRLHTRFNQTATATGRLSSSDPNLQNIPVRTPLGQKIRRAFVAEPGWALVALDYRQIELRVLAHLSGDENLIRVFQEGKDIHTQTASWMFGLSAEAIDPLMRRAAKTINFGVLYGMSAFRLSQELGIPYEEAQGFIQKYFQSYPKVKAWIEKTLREGRTRGYVETLFGRRRYVPDLNARVKGKREAAERMAFNMPVQGTAADLMKLAMVRLFPQLREVGARMLLQVHDELLLEAPKERAEEVAALAKEVMEGVWPLAVPLEVEVGIGEDWLAAKG

SEQ ID NO: 5529 - DNA, 2523 bp, synthetic construct
  misc_feature 1..2523: note = Variant of DNA polymerase I from Thermus sp. strain 2.9
  source 1..2523: mol_type = other DNA
atgcaccatcatcatcatcatggcggtagcggcgtgttaccggtgttcgagcctaaaggtcgcgtgcttctggttgatggccatcatctcgcgtatcgtaacttctttgccctgaaaggattaaccaccagcctgggcgagccggtacagggtgtctacggctttgcaaagtcgctcctgaaagctctgaaagaagacggtgatgtggtgattgttgtctttgatgcgaaagcgccaagttttcgccacgaagcgtacgaagcttacaaagccgggcgtgctccaacgccggaagactttcctcgccaattggcgcttatgaaggaattagtggatttgcttggcctcgaacgcttggaagttcccggtttcgaggcagacgacgtattagcgactctcgcaaagaaagccgaacgtgagggctatgaagtccagatcttgacagcagatcgcgatcttttccagcttttatctccgcgcatctcggtgttacacccggaagggcatcgtatcaccccggaatggctctgggagaaatatggtttgcgtcccgaacaatgggtggattttcgcgccttagcaggcgatccgagcgacaatattccgggagttaaaggtatcggcgagaagacggcgctcaagctccttaaagaatgggggtcgttggagaacttgcttaagaatttagatcaggtcaaaccagagtcagtgcgtgagaagattcttgctcacctcgaagacctcaaattaagccgcgaattgtcccgtgtacgcaccgatttgccgctcgaagttgatttcggtcgccgccgcgaacctgactgggagggtcttaaagcgtttttagagcgtcttgaatttggttcgctcttgcatgaattcggccttttagaaagcccgttactggccgaagaagcaccttggccaccgcccgagggcgcgtttttaggttaccgtttgagtcgcccggaaccgatgtgggccgaattactggctcttgcagcgtctgcccagggacgtgtgtatcgcgcggaagaccctcatggtgcgctccgcggcctcttcgaagtccgtggactccttgccaaagacttagctgttgttgcattgcgcgaaggtcttgatttacctccgactgatgatccaatgcttcttgcgtacctcttggacccgtcaaacacgacgcccgaaggcgtagcccgtcgttacggcggcgagtggaccgaagatgcagcgaaacgcgcgttattggccgaacgtttgcacgaaaatttattaggacgtttgcaaggcgaggaacgtctcctctggctttacgaagaagtggagaaaccattgagtcgcgtgctcgcgcatatggaagctaccggtgtcaaattagacgtggcgtatttggagaatctcagccttgaagttgctgcccacatgcgccgcttggaggaagaagtattccgtttagcaggccgttcctttcgccttaactctcgcgatcagttagaacgtgtgttgttcgatgaacttggtctccctcctatcggcaagacagagaagaccggtaaacgtagcacttcagcggcggttttagaagctcttcgcgaagtccatcccattgtggacaagatcttgcagtaccgcgaaatggcgaaattgaaaggcacctatattgaccgtcttccggcattagtccacccgaaaacgggacgcctccatacccgcttcaaccaaacagccacggcgaccggtcgtttgtcctcctctgatccaaaccttcagaatattccagtacgtaccccattgggccagaagatccgccgtgcgtttgtagctgaggagggttggcgtttagtggccctcgattatcgtcaaattgaattacgtgtccttgcccatctttctggcgatgagaacctcatccgcgtgtttcaggaaggcaaagacattcacactcaaacggcaagctggatgtttggattatcagctgaagcgatcgatcctttgatgcgtcgtgcagcgaagaccatcaatttcggtgttctctacggtatgagtgcctttcgtttgtcgcaggaattaggcattccctatgaagaagctcaggcgttcattcagaaatactttcaagcgtatcccaaagttaaagcatggatcgagaagactctccgtgaaggccgcacacgtggttacgtagagaccttatttggacgtcgccgctatgttcccgatttaaacgctcgcgtgaaaggcaagcgtgaagccgccgaacgcatggcgttcaacatgcctgtacagggcacggcagctgacctcatgaaacttgcaatggtgcgcctttttccacaattgcgtgaagttggtgcccgcatgctcttgcaggtccacgatgaactcttgttagaagcgccaaaagagcgtgcggaagaggtggcagccctcgcgaaagaagttatggaaggcgtgtggcccttagcggtgcctcttgaagtcgaagttggtattggcgaggattggctggctgccaaagga

SEQ ID NO: 5530 - protein, 841 aa, synthetic construct
  REGION 1..841: note = Variant of DNA polymerase I from Thermus sp. strain 2.9
MHHHHHHGGSGVLPVFEPKGRVLLVDGHHLAYRNFFALKGLTTSLGEPVQGVYGFAKSLLKALKEDGDVVIVVFDAKAPSFRHEAYEAYKAGRAPTPEDFPRQLALMKELVDLLGLERLEVPGFEADDVLATLAKKAEREGYEVQILTADRDLFQLLSPRISVLHPEGHRITPEWLWEKYGLRPEQWVDFRALAGDPSDNIPGVKGIGEKTALKLLKEWGSLENLLKNLDQVKPESVREKILAHLEDLKLSRELSRVRTDLPLEVDFGRRREPDWEGLKAFLERLEFGSLLHEFGLLESPLLAEEAPWPPPEGAFLGYRLSRPEPMWAELLALAASAQGRVYRAEDPHGALRGLFEVRGLLAKDLAVVALREGLDLPPTDDPMLLAYLLDPSNTTPEGVARRYGGEWTEDAAKRALLAERLHENLLGRLQGEERLLWLYEEVEKPLSRVLAHMEATGVKLDVAYLENLSLEVAAHMRRLEEEVFRLAGRSFRLNSRDQLERVLFDELGLPPIGKTEKTGKRSTSAAVLEALREVHPIVDKILQYREMAKLKGTYIDRLPALVHPKTGRLHTRFNQTATATGRLSSSDPNLQNIPVRTPLGQKIRRAFVAEEGWRLVALDYRQIELRVLAHLSGDENLIRVFQEGKDIHTQTASWMFGLSAEAIDPLMRRAAKTINFGVLYGMSAFRLSQELGIPYEEAQAFIQKYFQAYPKVKAWIEKTLREGRTRGYVETLFGRRRYVPDLNARVKGKREAAERMAFNMPVQGTAADLMKLAMVRLFPQLREVGARMLLQVHDELLLEAPKERAEEVAALAKEVMEGVWPLAVPLEVEVGIGEDWLAAKG

SEQ ID NO: 5531 - DNA, 2523 bp, synthetic construct
  misc_feature 1..2523: note = Variant of DNA polymerase I from Thermus sp. strain 2.9
  source 1..2523: mol_type = other DNA
atgcaccatcatcatcatcatggcggtagcggcgtgttaccggtgttcgagcctaaaggtcgcgtgcttctggttgatggccatcatctcgcgtatcgtaacttctttgccctgaaaggattaaccaccagcctgggcgagccggtacagggtgtctacggctttgcaaagtcgctcctgaaagctctgaaagaagacggtgatgtggtgattgttgtctttgatgcgaaagcgccaagttttcgccacgaagcgtacgaagcttacaaagccgggcgtgctccaacgccggaagactttcctcgccaattggcgcttatgaaggaattagtggatttgcttggcctcgaacgcttggaagttcccggtttcgaggcagacgacgtattagcgactctcgcaaagaaagccgaacgtgagggctatgaagtccagatcttgacagcagatcgcgatcttttccagcttttatctccgcgcatctcggtgttacacccggaagggcatcgtatcaccccggaatggctctgggagaaatatggtttgcgtcccgaacaatgggtggattttcgcgccttagcaggcgatccgagcgacaatattccgggagttaaaggtatcggcgagaagacggcgctcaagctccttaaagaatgggggtcgttggagaacttgcttaagaatttagatcaggtcaaaccagagtcagtgcgtgagaagattcttgctcacctcgaagacctcaaattaagccgcgaattgtcccgtgtacgcaccgatttgccgctcgaagttgatttcggtcgccgccgcgaacctgactgggagggtcttaaagcgtttttagagcgtcttgaatttggttcgctcttgcatgaattcggccttttagaaagcccgttactggccgaagaagcaccttggccaccgcccgagggcgcgtttttaggttaccgtttgagtcgcccggaaccgatgtgggccgaattactggctcttgcagcgtctgcccagggacgtgtgtatcgcgcggaagaccctcatggtgcgctccgcggcctcttcgaagtccgtggactccttgccaaagacttagctgttgttgcattgcgcgaaggtcttgatttacctccgactgatgatccaatgcttctttggtacctcttggacccgtcaaacacgacgcccgaaggcgtagcccgtcgttacggcggcgagtggaccgaagatgcagcgaaacgcgcgttattggccgaacgtttgcacgaaaatttattaggacgtttgcaaggcgaggaacgtctcctctggctttacgaagaagtggagaaaccattgagtcgcgtgctcgcgcatatggaagctaccggtgtcaaattagacgtggcgtatttggagaatctcagccttgaagttgctgcccacatgcgccgcttggaggaagaagtattccgtttagcaggccgttcctttcgccttaactctcgcgatcagttagaacgtgtgttgttcgatgaacttggtctccctcctatcggcaagacagagaagaccggtaaacgtagcacttcagcggcggttttagaagctcttcgcgaagtccatcccattgtggacaagatcttgcagtaccgcgaaatggcgaaattgaaaggcacctatattgaccgtcttccggcattagtccacccgaaaacgggacgcctccatacccgcttcaaccaaacagccacggcgaccggtcgtttgtcctcctctgatccaaaccttcagaatattccagtacgtaccccattgggccagaagatccgccgtgcgtttgtagctgaggagggttggcgtttagtggccctcgattatcgtcaaattgaattacgtgtccttgcccatctttctggcgatgagaacctcatccgcgtgtttcaggaaggcaaagacattcacactcaaacggcaagctggatgtttggattatcagctgaagcgatcgatcctttgatgcgtcgtgcagcgaagaccatcaatttcggtgttctctacggtatgagtgcctttcgtttgtcgcaggaattaggcattccctatgaagaagctcaggcgttcattcagaaatactttcaaagctatcccaaagttaaagcatggatcgagaagactctccgtgaaggccgcacacgtggttacgtagagaccttatttggacgtcgccgctatgttcccgatttaaacgctcgcgtgaaaggcaagcgtgaagccgccgaacgcatggcgttcaacatgcctgtacagggcacggcagctgacctcatgaaacttgcaatggtgcgcctttttccacaattgcgtgaagttggtgcccgcatgctcttgcaggtccacgatgaactcttgttagaagcgccaaaagagcgtgcggaagaggtggcagccctcgcgaaagaagttatggaaggcgtgtggcccttagcggtgcctcttgaagtcgaagttggtattggcgaggattggctggctgccaaagga

SEQ ID NO: 5532 - protein, 841 aa, synthetic construct
  REGION 1..841: note = Variant of DNA polymerase I from Thermus sp. strain 2.9
MHHHHHHGGSGVLPVFEPKGRVLLVDGHHLAYRNFFALKGLTTSLGEPVQGVYGFAKSLLKALKEDGDVVIVVFDAKAPSFRHEAYEAYKAGRAPTPEDFPRQLALMKELVDLLGLERLEVPGFEADDVLATLAKKAEREGYEVQILTADRDLFQLLSPRISVLHPEGHRITPEWLWEKYGLRPEQWVDFRALAGDPSDNIPGVKGIGEKTALKLLKEWGSLENLLKNLDQVKPESVREKILAHLEDLKLSRELSRVRTDLPLEVDFGRRREPDWEGLKAFLERLEFGSLLHEFGLLESPLLAEEAPWPPPEGAFLGYRLSRPEPMWAELLALAASAQGRVYRAEDPHGALRGLFEVRGLLAKDLAVVALREGLDLPPTDDPMLLWYLLDPSNTTPEGVARRYGGEWTEDAAKRALLAERLHENLLGRLQGEERLLWLYEEVEKPLSRVLAHMEATGVKLDVAYLENLSLEVAAHMRRLEEEVFRLAGRSFRLNSRDQLERVLFDELGLPPIGKTEKTGKRSTSAAVLEALREVHPIVDKILQYREMAKLKGTYIDRLPALVHPKTGRLHTRFNQTATATGRLSSSDPNLQNIPVRTPLGQKIRRAFVAEEGWRLVALDYRQIELRVLAHLSGDENLIRVFQEGKDIHTQTASWMFGLSAEAIDPLMRRAAKTINFGVLYGMSAFRLSQELGIPYEEAQAFIQKYFQSYPKVKAWIEKTLREGRTRGYVETLFGRRRYVPDLNARVKGKREAAERMAFNMPVQGTAADLMKLAMVRLFPQLREVGARMLLQVHDELLLEAPKERAEEVAALAKEVMEGVWPLAVPLEVEVGIGEDWLAAKG

SEQ ID NO: 5533 - DNA, 2523 bp, synthetic construct
  misc_feature 1..2523: note = Variant of DNA polymerase I from Thermus sp. strain 2.9
  source 1..2523: mol_type = other DNA
atgcaccatcatcatcatcatggcggtagcggcgtgttaccggtgttcgagcctaaaggtcgcgtgcttctggttgatggccatcatctcgcgtatcgtaacttctttgccctgaaaggattaaccaccagccgcggcgagccggtacagggtgtctacggctttgcaaagtcgctcctgaaagctctgaaagaagacggtgatgtggtgattgttgtctttgatgcgaaagcgccaagttttcgccacgaagcgtacgaagcttacaaagccgggcgtgctccaacgccggaagactttcctcgccaattggcgcttatgaaggaattagtggatttgcttggcctcgaacgcttggaagttcccggtttcgaggcagacgacgtattagcgactctcgcaaagaaagccgaacgtgagggctatgaagtccagatcttgacagcagatcgcgatcttttccagcttttatctccgcgcatctcggtgttacacccggaagggcatcgtatcaccccggaatggctctgggagaaatatggtttgcgtcccgaacaatgggtggattttcgcgccttagcaggcgatccgagcgacaatattccgggagttaaaggtatcggcgagaagacggcgctcaagctccttaaagaatgggggtcgttggagaacttgcttaagaatttagatcaggtcaaaccagagtcagtgcgtgagaagattcttgctcacctcgaagacctcaaattaagccgcgaattgtcccgtgtacgcaccgatttgccgctcgaagttgatttcggccgccgccgcgaacctgactgggagggtcttaaagcgtttttagagcgtcttgaatttggttcgctcttgcatgaattcggccttttagaaagcccgttactggccgaagaagcaccttggccaccgcccgagggcgcgtttttaggttaccgtttgagtcgcccggaaccgatgtgggccgaattactggctcttgcagcgtctgcccagggacgtgtgtatcgcgcggaagaccctcatggtgcgctccgcggcctcttcgaagtccgtggactccttgccaaagacttagctgttgttgcattgcgcgaaggtcttgatttacctccgactgatgatccaatgcttcttgcgtacctcttggacccgtcaaacacgacgcccgaaggcgtagcccgtcgttacggcggcgagtggaccgaagatgcagcgaaacgcgcgttattggccgaacgtttgcacgcaaatttattaggacgtttgcaaggcgaggaacgtctcctctggctttacgaagaagtggagaaaccattgagtcgcgtgctcgcgcatatggaagctaccggtgtcaaattagacgtggcgtatttggagaatcttcaccttgaagttgctgcccacatgcgccgcttggaggaagaagtattccgtttagcaggccactcctttcgccttaactctcgcgatcagttagaacgtgtgttgttcgatgaacttggtctccctcctatcggcaagacagagaagaccggtaaacgtagcacttcagcggcggttttagaagctcttcgcgaagtccatcccattgtggacaagatcttgcagtaccgcgaaatggcgaaattgaaaggcacctatattgaccgtcttccggcattagtccacccgaaaacgggacgcctccatacccgcttcaaccaaacagccacggcgaccggtcgtttgtccagttctgatccaaaccttcagaatattccagtacgtaccccattgggccagaagatccgccgtgcgtttgtagctgaggagggttggcgtttagtggccctcgattatagtcaaattgaattacgtgtccttgcccatctttctggcgatgagaacctcatccgcgtgtttcaggaaggcaaagacattcacactcaaacggcaagctggatgtttggattatcagctgaagcgatcgatcctttgatgcgtcgtgcagcgaagaccatcaatttcggtgttctctacggtatgagtgcctttcgtttgtcgcaggaattaggcattccctatgaagaagctcaggcgttcattcagaaatactttcaaagctatcccaaagttaaagcatggatcgagaagactctccgtgaaggccgcacacgtggttacgtagagaccttatttggacgtcgccgctatgttcccgatttaaacgctcgcgtgaaaggcaagcgtgaagccgccgaacgcatggcgttcaacatgcctgtacagggcacggcagctgacctcatgaaacttgcaatggtgcgcctttttccacaattgcgtgaagttggtgcccgcatgctcttgcaggtccacgatgaactcttgttagaagcgccaaaagagcgtgcggaagaggtggcagccctcgcgaaagaagttatggaaggcgtgtggcccttagcggtgcctcttgaagtcgaagttggtattggcgaggattggctggctgccaaagga

SEQ ID NO: 5534 - protein, 841 aa, synthetic construct
  REGION 1..841: note = Variant of DNA polymerase I from Thermus sp. strain 2.9
MHHHHHHGGSGVLPVFEPKGRVLLVDGHHLAYRNFFALKGLTTSRGEPVQGVYGFAKSLLKALKEDGDVVIVVFDAKAPSFRHEAYEAYKAGRAPTPEDFPRQLALMKELVDLLGLERLEVPGFEADDVLATLAKKAEREGYEVQILTADRDLFQLLSPRISVLHPEGHRITPEWLWEKYGLRPEQWVDFRALAGDPSDNIPGVKGIGEKTALKLLKEWGSLENLLKNLDQVKPESVREKILAHLEDLKLSRELSRVRTDLPLEVDFGRRREPDWEGLKAFLERLEFGSLLHEFGLLESPLLAEEAPWPPPEGAFLGYRLSRPEPMWAELLALAASAQGRVYRAEDPHGALRGLFEVRGLLAKDLAVVALREGLDLPPTDDPMLLAYLLDPSNTTPEGVARRYGGEWTEDAAKRALLAERLHANLLGRLQGEERLLWLYEEVEKPLSRVLAHMEATGVKLDVAYLENLHLEVAAHMRRLEEEVFRLAGHSFRLNSRDQLERVLFDELGLPPIGKTEKTGKRSTSAAVLEALREVHPIVDKILQYREMAKLKGTYIDRLPALVHPKTGRLHTRFNQTATATGRLSSSDPNLQNIPVRTPLGQKIRRAFVAEEGWRLVALDYSQIELRVLAHLSGDENLIRVFQEGKDIHTQTASWMFGLSAEAIDPLMRRAAKTINFGVLYGMSAFRLSQELGIPYEEAQAFIQKYFQSYPKVKAWIEKTLREGRTRGYVETLFGRRRYVPDLNARVKGKREAAERMAFNMPVQGTAADLMKLAMVRLFPQLREVGARMLLQVHDELLLEAPKERAEEVAALAKEVMEGVWPLAVPLEVEVGIGEDWLAAKG

SEQ ID NO: 5535 - DNA, 2523 bp, synthetic construct
  misc_feature 1..2523: note = Variant of DNA polymerase I from Thermus sp. strain 2.9
  source 1..2523: mol_type = other DNA
atgcaccatcatcatcatcatggcggtagcggcgtgttaccggtgttcgagcctaaaggtcgcgtgcttctggttgatggccatcatctcgcgtatcgtaacttctttgccctgaaaggattaaccaccagccgcggcgagccggtacagggtgtctacggctttgcaaagtcgctcctgaaagctctgaaagaagacggtgatgtggtgattgttgtctttgatgcgaaagcgccaagttttcgccacgaagcgtacgaagcttacaaagccgggcgtgctccaacgccggaagactttcctcgccaattggcgcttatgaaggaattagtggatttgcttggcctcgaacgcttggaagttcccggtttcgaggcagacgacgtattagcgactctcgcaaagaaagccgaacgtgagggctatgaagtccagatcttgacagcagatcgcgatcttttccagcttttatctccgcgcatctcggtgttacacccggaagggcatcgtatcaccccggaatggctctgggagaaatatggtttgcgtcccgaacaatgggtggattttcgcgccttagcaggcgatccgagcgacaatattccgggagttaaaggtatcggcgagaagacggcgctcaagctccttaaagaatgggggtcgttggagaacttgcttaagaatttagatcaggtcaaaccagagtcagtgcgtgagaagattcttgctcacctcgaagacctcaaattaagccgcgaattgtcccgtgtacgcaccgatttgccgctcgaagttgatttcggccgccgccgcgaacctgactgggagggtcttaaagcgtttttagagcgtcttgaatttggttcgctcttgcatgaattcggccttttagaaagcccgttactggccgaagaagcaccttggccaccgcccgagggcgcgtttttaggttaccgtttgagtcgcccggaaccgatgtgggccgaattactggctcttgcagcgtctgcccagggacgtgtgtatcgcgcggaagaccctcatggtgcgctccgcggcctcttcgaagtccgtggactccttgccaaagacttagctgttgttgcattgcgcgaaggtcttgatttacctccgactgatgatccaatgcttcttgcgtacctcttggacccgtcaaacacgacgcccgaaggcgtagcccgtcgttacggcggcgagtggaccgaagatgcagcgaaacgcgcgttattggccgaacgtttgcacgcaaatttattaggacgtttgcaaggcgaggaacgtctcctctggctttacgaagaagtggagaaaccattgagtcgcgtgctcgcgcatatggaagctaccggtgtcaaattagacgtggcgtatttggagaatcttcaccttgaagttgctgccgaaatgcgccgcttggaggaagaagtattccgtttagcaggccgctcctttcgccttaactctcgcgatcagttagaacgtgtgttgttcgatgaacttggtctccctcctatcggcaagacagagaagaccggtaaacgtagcacttcagcggcggttttagaagctcttcgcgaagtccatcccattgtggacaagatcttgcagtaccgcgaaatggcgaaattgaaaggcacctatattgaccgtcttccggcattagtccacccgaaaacgggacgcctccatacccgcttcaaccaaacagccacggcgaccggtcgtttgtcctcctctgatccaaaccttcagaatattccagtacgtaccccattgggccagaagatccgccgtgcgtttgtagctgaggagggttggcgtttagtggccctcgattatagtcaaattgaattacgtgtccttgcccatctttctggcgatgagaacctcatccgcgtgtttcaggaaggcaaagacattcacactcaaacggcaagctggatgtttggattatcagctgaagcgatcgatcctttgatgcgtcgtgcagcgaagaccatcaatttcggtgttctctacggtatgagtgcctttcgtttgtcgcaggaattaggcattccctatgaagaagctcaggcgttcattcagaaatactttcaaagctatcccaaagttaaagcatggatcgagaagactctcgaggaaggccgcacacgtggttacgtagagaccttatttggacgtcgccgctatgttcccgatttaaacgctcgcgtgaaaggcgtacgtgaagccgccgaacgcatggcgttcaacatgcctgtacagggcacggcagctgacctcatgaaacttgcaatggtgcgcctttttccacaattgcgtgaagttggtgcccgcatgctcttgcaggtccacgatgaactcttgttagaagcgccaaaagagcgtgcggaagaggtggcagccctcgcgaaagaagttatggaaggcgtgtggcccttagcggtgcctcttgaagtcgaagttggtattggcgaggattggctggctgccaaagga

SEQ ID NO: 5536 - protein, 841 aa, synthetic construct
  REGION 1..841: note = Variant of DNA polymerase I from Thermus sp. strain 2.9
MHHHHHHGGSGVLPVFEPKGRVLLVDGHHLAYRNFFALKGLTTSRGEPVQGVYGFAKSLLKALKEDGDVVIVVFDAKAPSFRHEAYEAYKAGRAPTPEDFPRQLALMKELVDLLGLERLEVPGFEADDVLATLAKKAEREGYEVQILTADRDLFQLLSPRISVLHPEGHRITPEWLWEKYGLRPEQWVDFRALAGDPSDNIPGVKGIGEKTALKLLKEWGSLENLLKNLDQVKPESVREKILAHLEDLKLSRELSRVRTDLPLEVDFGRRREPDWEGLKAFLERLEFGSLLHEFGLLESPLLAEEAPWPPPEGAFLGYRLSRPEPMWAELLALAASAQGRVYRAEDPHGALRGLFEVRGLLAKDLAVVALREGLDLPPTDDPMLLAYLLDPSNTTPEGVARRYGGEWTEDAAKRALLAERLHANLLGRLQGEERLLWLYEEVEKPLSRVLAHMEATGVKLDVAYLENLHLEVAAEMRRLEEEVFRLAGRSFRLNSRDQLERVLFDELGLPPIGKTEKTGKRSTSAAVLEALREVHPIVDKILQYREMAKLKGTYIDRLPALVHPKTGRLHTRFNQTATATGRLSSSDPNLQNIPVRTPLGQKIRRAFVAEEGWRLVALDYSQIELRVLAHLSGDENLIRVFQEGKDIHTQTASWMFGLSAEAIDPLMRRAAKTINFGVLYGMSAFRLSQELGIPYEEAQAFIQKYFQSYPKVKAWIEKTLEEGRTRGYVETLFGRRRYVPDLNARVKGVREAAERMAFNMPVQGTAADLMKLAMVRLFPQLREVGARMLLQVHDELLLEAPKERAEEVAALAKEVMEGVWPLAVPLEVEVGIGEDWLAAKG

SEQ ID NO: 5537 - DNA, 2523 bp, synthetic construct
  misc_feature 1..2523: note = Variant of DNA polymerase I from Thermus sp. strain 2.9
  source 1..2523: mol_type = other DNA
atgcaccatcatcatcatcatggcggtagcggcgtgttaccggtgttcgagcctaaaggtcgcgtgcttctggttgatggccatcatctcgcgtatcgtaacttctttgccctgaaaggattaaccaccagcctgggcgagccggtacagggtgtctacggctttgcaaagtcgctcctgaaagctctgaaagaagacggtgatgtggtgattgttgtctttgatgcgaaagcgccaagttttcgccacgaagcgtacgaagcttacaaagccgggcgtgctccaacgccggaagactttcctcgccaattggcgcttatgaaggaattagtggatttgcttggcctcgaacgcttggaagttcccggtttcgaggcagacgacgtattagcgactctcgcaaagaaagccgaacgtgagggctatgaagtccagatcttgacagcagatcgcgatcttttccagcttttatctccgcgcatctcggtgttacacccggaagggcatcgtatcaccccggaatggctctgggagaaatatggtttgcgtcccgaacaatgggtggattttcgcgccttagcaggcgatccgagcgacaatattccgggagttaaaggtatcggcgagaagacggcgctcaagctccttaaagaatgggggtcgttggagaacttgcttaagaatttagatcaggtcaaaccagagtcagtgcgtgagaagattcttgctcacctcgaagacctcaaattaagccgcgaattgtcccgtgtacgcaccgatttgccgctcgaagttgatttcggtcgccgccgcgaacctgactgggagggtcttaaagcgtttttagagcgtcttgaatttggttcgctcttgcatgaattcggccttttagaaagcccgttactggccgaagaagcaccttggccaccgcccgagggcgcgtttttaggttaccgtttgagtcgcccggaaccgatgtgggccgaattactggctcttgcagcgtctgcccagggacgtgtgtatcgcgcggaagaccctcatggtgcgctccgcggcctcttcgaagtccgtggactccttgccaaagacttagctgttgttgcattgcgcgaaggtcttgatttacctccgactgatgatccaatgcttcttgcgtacctcttggacccgtcaaacacgacgcccgaaggcgtagcccgtcgttacggcggcgagtggaccgaagatgcagcgaaacgcgcgttattggccgaacgtttgcacgaaaatttattaggacgtttgcaaggcgaggaacgtctcctctggctttacgaagaagtggagaaaccattgagtcgcgtgctcgcgcatatggaagctaccggtgtcaaattagacgtggcgtatttggagaatctcagccttgaagttgctgcccacatgcgccgcttggaggaagaagtattccgtttagcaggccgttcctttcgccttaactctcgcgatcagttagaacgtgtgttgttcgatgaacttggtctccctcctatcggcaagacagagaagaccggtaaacgtagcacttcagcggcggttttagaagctcttcgcgaagtccatcccattgtggacaagatcttgcagtaccgcgaaatggcgaaattgaaaggcacctatattgaccgtcttccggcattagtccacccgaaaacgggacgcctccatacccgcttcaaccaaacagccacggcgaccggtcgtttgtcctcctctgatccaaaccttcagaatattccagtacgtacctcgttgggccagaagatccgccgtgcgtttgtagctgaggagggttggcgtttagtggccctcgattatcgtcaaattgaattacgtgtccttgcccatctttctggcgatgagaacctcatccgcgtgtttcaggaaggcaaagacattcacactcaaacggcaagctggatgtttggattatcagctgaagcgatcgatcctttgatgcgtcgtgcagcgaagaccatcaatttcggtgttctctacggtatgagtgcctttcgtttgtcgcaggaattaggcattccctatgaagaagctcaggcgttcattcagaaatactttcaaagctatcccaaagttaaagcatggatcgagaagactctccgtgaaggccgcacacgtggttacgtagagaccttatttggacgtcgccgctatgttcccgatttaaacgctcgcgtgaaaggcaagcgtgaagccgccgaacgcatggcgttcaacatgcctgtacagggcacggcagctgacctcatgaaacttgcaatggtgcgcctttttccacaattgcgtgaagttggtgcccgcatgctcttgcaggtccacgatgaactcttgttagaagcgccaaaagagcgtgcggaagaggtggcagccctcgcgaaagaagttatggaaggcgtgtggcccttagcggtgcctcttgaagtcgaagttggtattggcgaggattggctggctgccaaagga

SEQ ID NO: 5538 - protein, 841 aa, synthetic construct
  REGION 1..841: note = Variant of DNA polymerase I from Thermus sp. strain 2.9
MHHHHHHGGSGVLPVFEPKGRVLLVDGHHLAYRNFFALKGLTTSLGEPVQGVYGFAKSLLKALKEDGDVVIVVFDAKAPSFRHEAYEAYKAGRAPTPEDFPRQLALMKELVDLLGLERLEVPGFEADDVLATLAKKAEREGYEVQILTADRDLFQLLSPRISVLHPEGHRITPEWLWEKYGLRPEQWVDFRALAGDPSDNIPGVKGIGEKTALKLLKEWGSLENLLKNLDQVKPESVREKILAHLEDLKLSRELSRVRTDLPLEVDFGRRREPDWEGLKAFLERLEFGSLLHEFGLLESPLLAEEAPWPPPEGAFLGYRLSRPEPMWAELLALAASAQGRVYRAEDPHGALRGLFEVRGLLAKDLAVVALREGLDLPPTDDPMLLAYLLDPSNTTPEGVARRYGGEWTEDAAKRALLAERLHENLLGRLQGEERLLWLYEEVEKPLSRVLAHMEATGVKLDVAYLENLSLEVAAHMRRLEEEVFRLAGRSFRLNSRDQLERVLFDELGLPPIGKTEKTGKRSTSAAVLEALREVHPIVDKILQYREMAKLKGTYIDRLPALVHPKTGRLHTRFNQTATATGRLSSSDPNLQNIPVRTSLGQKIRRAFVAEEGWRLVALDYRQIELRVLAHLSGDENLIRVFQEGKDIHTQTASWMFGLSAEAIDPLMRRAAKTINFGVLYGMSAFRLSQELGIPYEEAQAFIQKYFQSYPKVKAWIEKTLREGRTRGYVETLFGRRRYVPDLNARVKGKREAAERMAFNMPVQGTAADLMKLAMVRLFPQLREVGARMLLQVHDELLLEAPKERAEEVAALAKEVMEGVWPLAVPLEVEVGIGEDWLAAKG

SEQ ID NO: 5539 - DNA, 2523 bp, synthetic construct
  misc_feature 1..2523: note = Variant of DNA polymerase I from Thermus sp. strain 2.9
  source 1..2523: mol_type = other DNA
atgcaccatcatcatcatcatggcggtagcggcgtgttaccggtgttcgagcctaaaggtcgcgtgcttctggttgatggccatcatctcgcgtatcgtaacttctttgccctgaaaggattaaccaccagcctgggcgagccggtacagggtgtctacggctttgcaaagtcgctcctgaaagctctgaaagaagacggtgatgtggtgattgttgtctttgatgcgaaagcgccaagttttcgccacgaagcgtacgaagcttacaaagccgggcgtgctccaacgccggaagactttcctcgccaattggcgcttatgaaggaattagtggatttgcttggcctcgaacgcttggaagttcccggtttcgaggcagacgacgtattagcgactctcgcaaagaaagccgaacgtgagggctatgaagtccagatcttgacagcagatcgcgatcttttccagcttttatctccgcgcatctcggtgttacacccggaagggcatcgtatcaccccggaatggctctgggagaaatatggtttgcgtcccgaacaatgggtggattttcgcgccttagcaggcgatccgagcgacaatattccgggagttaaaggtatcggcgagaagacggcgctcaagctccttaaagaatgggggtcgttggagaacttgcttaagaatttagatcaggtcaaaccagagtcagtgcgtgagaagattcttgctcacctcgaagacctcaaattaagccgcgaattgtcccgtgtacgcaccgatttgccgctcgaagttgatttcggtcgccgccgcgaacctgactgggagggtcttaaagcgtttttagagcgtcttgaatttggttcgctcttgcatgaattcggccttttagaaagcccgttactggccgaagaagcaccttggccaccgcccgagggcgcgtttttaggttaccgtttgagtcgcccggaaccgatgtgggccgaattactggctcttgcagcgtctgcccagggacgtgtgtatcgccgtgaagaccctcatggtgcgctccgcggcctcttcgaagtccgtggactccttgccaaagacttagctgttgttgcattgcgcgaaggtcttgatttacctccgactgatgatccaatgcttcttgcgtacctcttggacccgtcaaacacgacgcccgaaggcgtagcccgtcgttacggcggcgagtggaccgaagatgcagcgaaacgcgcgttattggccgaacgtttgcacgaaaatttattaggacgtttgcaaggcgaggaacgtctcctctggctttacgaagaagtggagaaaccattgagtcgcgtgctcgcgcatatggaagctaccggtgtcaaattagacgtggcgtatttggagaatctcagccttgaagttgctgcccacatgcgccgcttggaggaagaagtattccgtttagcaggccgttcctttcgccttaactctcgcgatcagttagaacgtgtgttgttcgatgaacttggtctccctcctatcggcaagacagagaagaccggtaaacgtagcacttcagcggcggttttagaagctcttcgcgaagtccatcccattgtggacaagatcttgcagtaccgcgaaatggcgaaattgaaaggcacctatattgaccgtcttccggcattagtccacccgaaaacgggacgcctccatacccgcttcaaccaaacagccacggcgaccggtcgtttgtcctcctctgatccaaaccttcagaatattccagtacgtaccccattgggccagaagatccgccgtgcgtttgtagctgaggagggttggcgtttagtggccctcgattatcgtcaaattgaattacgtgtccttgcccatctttctggcgatgagaacctcatccgcgtgtttcaggaaggcaaagacattcacactcaaacggcaagctggatgtttggattatcagctgaagcgatcgatcctttgatgcgtcgtgcagcgaagaccatcaatttcggtgttctctacggtatgagtgcctttcgtttgtcgcaggaattaggcattccctatgaagaagctcaggcgttcattcagaaatactttcaaagctatcccaaagttaaagcatggatcgagaagactctccgtgaaggccgcacacgtggttacgtagagaccttatttggacgtcgccgctatgttcccgatttaaacgctcgcgtgaaaggcaagcgtgaagccgccgaacgcatggcgttcaacatgcctgtacagggcacggcagctgacctcatgaaacttgcaatggtgcgcctttttccacaattgcgtgaagttggtgcccgcatgctcttgcaggtccacgatgaactcttgttagaagcgccaaaagagcgtgcggaagaggtggcagccctcgcgaaagaagttatggaaggcgtgtggcccttagcggtgcctcttgaagtcgaagttggtattggcgaggattggctggctgccaaagga

SEQ ID NO: 5540 - protein, 841 aa, synthetic construct
  REGION 1..841: note = Variant of DNA polymerase I from Thermus sp. strain 2.9
MHHHHHHGGSGVLPVFEPKGRVLLVDGHHLAYRNFFALKGLTTSLGEPVQGVYGFAKSLLKALKEDGDVVIVVFDAKAPSFRHEAYEAYKAGRAPTPEDFPRQLALMKELVDLLGLERLEVPGFEADDVLATLAKKAEREGYEVQILTADRDLFQLLSPRISVLHPEGHRITPEWLWEKYGLRPEQWVDFRALAGDPSDNIPGVKGIGEKTALKLLKEWGSLENLLKNLDQVKPESVREKILAHLEDLKLSRELSRVRTDLPLEVDFGRRREPDWEGLKAFLERLEFGSLLHEFGLLESPLLAEEAPWPPPEGAFLGYRLSRPEPMWAELLALAASAQGRVYRREDPHGALRGLFEVRGLLAKDLAVVALREGLDLPPTDDPMLLAYLLDPSNTTPEGVARRYGGEWTEDAAKRALLAERLHENLLGRLQGEERLLWLYEEVEKPLSRVLAHMEATGVKLDVAYLENLSLEVAAHMRRLEEEVFRLAGRSFRLNSRDQLERVLFDELGLPPIGKTEKTGKRSTSAAVLEALREVHPIVDKILQYREMAKLKGTYIDRLPALVHPKTGRLHTRFNQTATATGRLSSSDPNLQNIPVRTPLGQKIRRAFVAEEGWRLVALDYRQIELRVLAHLSGDENLIRVFQEGKDIHTQTASWMFGLSAEAIDPLMRRAAKTINFGVLYGMSAFRLSQELGIPYEEAQAFIQKYFQSYPKVKAWIEKTLREGRTRGYVETLFGRRRYVPDLNARVKGKREAAERMAFNMPVQGTAADLMKLAMVRLFPQLREVGARMLLQVHDELLLEAPKERAEEVAALAKEVMEGVWPLAVPLEVEVGIGEDWLAAKG

SEQ ID NO: 5541 - DNA, 2523 bp, synthetic construct
  misc_feature 1..2523: note = Variant of DNA polymerase I from Thermus sp. strain 2.9
  source 1..2523: mol_type = other DNA
atgcaccatcatcatcatcatggcggtagcggcgtgttaccggtgttcgagcctaaaggtcgcgtgcttctggttgatggccatcatctcgcgtatcgtaacttctttgccctgaaaggattaaccaccagcctgggcgagccggtacagggtgtctacggctttgcaaagtcgctcctgaaagctctgaaagaagacggtgatgtggtgattgttgtctttgatgcgaaagcgccaagttttcgccacgaagcgtacgaagcttacaaagccgggcgtgctccaacgccggaagactttcctcgccaattggcgcttatgaaggaattagtggatttgcttggcctcgaacgcttggaagttcccggtttcgaggcagacgacgtattagcgactctcgcaaagaaagccgaacgtgagggctatgaagtccagatcttgacagcagatcgcgatcttttccagcttttatctccgcgcatctcggtgttacacccggaagggcatcgtatcaccccggaatggctctgggagaaatatggtttgcgtcccgaacaatgggtggattttcgcgccttagcaggcgatccgagcgacaatattccgggagttaaaggtatcggcgagaagacggcgctcaagctccttaaagaatgggggtcgttggagaacttgcttaagaatttagatcaggtcaaaccagagtcagtgcgtgagaagattcttgctcacctcgaagacctcaaattaagccgcgaattgtcccgtgtacgcaccgatttgccgctcgaagttgatttcggtcgccgccgcgaacctgactgggagggtcttaaagcgtttttagagcgtcttgaatttggttcgctcttgcatgaattcggccttttagaaagcccgttactggccgaagaagcaccttggccaccgcccgagggcgcgtttttaggttaccgtttgagtcgcccggaaccgatgtgggccgaattactggctcttgcagcgtctgcccagggacgtgtgtatcgcgcggaagaccctcatggtgcgctccgcggcctcttcgaagtccgtggactccttgccaaagacttagctgttgttgcattgcgcgaaggtcttgatttacctccgactgatgatccaatgcttcttgggtacctcttggacccgtcaaacacgacgcccgaaggcgtagcccgtcgttacggcggcgagtggaccgaagatgcagcgaaacgcgcgttattggccgaacgtttgcacgaaaatttattaggacgtttgcaaggcgaggaacgtctcctctggctttacgaagaagtggagaaaccattgagtcgcgtgctcgcgcatatggaagctaccggtgtcaaattagacgtggcgtatttggagaatctcagccttgaagttgctgcccacatgcgccgcttggaggaagaagtattccgtttagcaggccgttcctttcgccttaactctcgcgatcagttagaacgtgtgttgttcgatgaacttggtctccctcctatcggcaagacagagaagaccggtaaacgtagcacttcagcggcggttttagaagctcttcgcgaagtccatcccattgtggacaagatcttgcagtaccgcgaaatggcgaaattgaaaggcacctatattgaccgtcttccggcattagtccacccgaaaacgggacgcctccatacccgcttcaaccaaacagccacggcgaccggtcgtttgtcctcctctgatccaaaccttcagaatattccagtacgtaccccattgggccagaagatccgccgtgcgtttgtagctgaggagggttggcgtttagtggccctcgattatcgtcaaattgaattacgtgtccttgcccatctttctggcgatgagaacctcatccgcgtgtttcaggaaggcaaagacattcacactcaaacggcaagctggatgtttggattatcagctgaagcgatcgatcctttgatgcgtcgtgcagcgaagaccatcaatttcggtgttctctacggtatgagtgcctttcgtttgtcgcaggaattaggcattccctatgaagaagctcaggcgttcattcagaaatactttcaaagctatcccaaagttaaagcatggatcgagaagactctccgtgaaggccgcacacgtggttacgtagagaccttatttggacgtcgccgctatgttcccgatttaaacgctcgcgtgaaaggcaagcgtgaagccgccgaacgcatggcgttcaacatgcctgtacagggcacggcagctgacctcatgaaacttgcaatggtgcgcctttttccacaattgcgtgaagttggtgcccgcatgctcttgcaggtccacgatgaactcttgttagaagcgccaaaagagcgtgcggaagaggtggcagccctcgcgaaagaagttatggaaggcgtgtggcccttagcggtgcctcttgaagtcgaagttggtattggcgaggattggctggctgccaaagga

SEQ ID NO: 5542 - protein, 841 aa, synthetic construct
  REGION 1..841: note = Variant of DNA polymerase I from Thermus sp. strain 2.9
MHHHHHHGGSGVLPVFEPKGRVLLVDGHHLAYRNFFALKGLTTSLGEPVQGVYGFAKSLLKALKEDGDVVIVVFDAKAPSFRHEAYEAYKAGRAPTPEDFPRQLALMKELVDLLGLERLEVPGFEADDVLATLAKKAEREGYEVQILTADRDLFQLLSPRISVLHPEGHRITPEWLWEKYGLRPEQWVDFRALAGDPSDNIPGVKGIGEKTALKLLKEWGSLENLLKNLDQVKPESVREKILAHLEDLKLSRELSRVRTDLPLEVDFGRRREPDWEGLKAFLERLEFGSLLHEFGLLESPLLAEEAPWPPPEGAFLGYRLSRPEPMWAELLALAASAQGRVYRAEDPHGALRGLFEVRGLLAKDLAVVALREGLDLPPTDDPMLLGYLLDPSNTTPEGVARRYGGEWTEDAAKRALLAERLHENLLGRLQGEERLLWLYEEVEKPLSRVLAHMEATGVKLDVAYLENLSLEVAAHMRRLEEEVFRLAGRSFRLNSRDQLERVLFDELGLPPIGKTEKTGKRSTSAAVLEALREVHPIVDKILQYREMAKLKGTYIDRLPALVHPKTGRLHTRFNQTATATGRLSSSDPNLQNIPVRTPLGQKIRRAFVAEEGWRLVALDYRQIELRVLAHLSGDENLIRVFQEGKDIHTQTASWMFGLSAEAIDPLMRRAAKTINFGVLYGMSAFRLSQELGIPYEEAQAFIQKYFQSYPKVKAWIEKTLREGRTRGYVETLFGRRRYVPDLNARVKGKREAAERMAFNMPVQGTAADLMKLAMVRLFPQLREVGARMLLQVHDELLLEAPKERAEEVAALAKEVMEGVWPLAVPLEVEVGIGEDWLAAKG

SEQ ID NO: 5543 - DNA, 2523 bp, synthetic construct
  misc_feature 1..2523: note = Variant of DNA polymerase I from Thermus sp. strain 2.9
  source 1..2523: mol_type = other DNA
atgcaccatcatcatcatcatggcggtagcggcgtgttaccggtgttcgagcctaaaggtcgcgtgcttctggttgatggccatcatctcgcgtatcgtaacttctttgccctgaaaggattaaccaccagcctgggcgagccggtacagggtgtctacggctttgcaaagtcgctcctgaaagctctgaaagaagacggtgatgtggtgattgttgtctttgatgcgaaagcgccaagttttcgccacgaagcgtacgaagcttacaaagccgggcgtgctccaacgccggaagactttcctcgccaattggcgcttatgaaggaattagtggatttgcttggcctcgaacgcttggaagttcccggtttcgaggcagacgacgtattagcgactctcgcaaagaaagccgaacgtgagggctatgaagtccagatcttgacagcagatcgcgatcttttccagcttttatctccgcgcatctcggtgttacacccggaagggcatcgtatcaccccggaatggctctgggagaaatatggtttgcgtcccgaacaatgggtggattttcgcgccttagcaggcgatccgagcgacaatattccgggagttaaaggtatcggcgagaagacggcgctcaagctccttaaagaatgggggtcgttggagaacttgcttaagaatttagatcaggtcaaaccagagtcagtgcgtgagaagattcttgctcacctcgaagacctcaaattaagccgcgaattgtcccgtgtacgcaccgatttgccgctcgaagttgatttcggtcgccgccgcgaacctgactgggagggtcttaaagcgtttttagagcgtcttgaatttggttcgctcttgcatgaattcggccttttagaaagcccgttactggccgaagaagcaccttggccaccgcccgagggcgcgtttttaggttaccgtttgagtcgcccggaaccgatgtgggccgaattactggctcttgcagcgtctgcccagggacgtgtgtatcgcgcggaagaccctcatggtgcgctccgcggcctcttcgaagtccgtggactccttgccaaagacttagctgttgttgcattgcgcgaaggtcttgatttacctccgactgatgatccaatgcttcttgcgtacctcttggacccgtcaaacacgacgcccgaaggcgtagcccgtcgttacggcggcgagtggaccgaagatgcagcgaaacgcgcgttattggccgaacgtttgcacgaaaatttattaggacgtttgcaaggcgaggaacgtctcctctggctttacgaagaagtggagaaaccattgagtcgcgtgctcgcgcatatggaagctaccggtgtcaaattagacgtggcgtatttggagaatctcagccttgaagttgctgcccacatgcgccgcttggaggaagaagtattccgtttagcaggccgttcctttcgccttaactctcgcgatcagttagaacgtgtgttgttcgatgaacttggtctccctcctatcggcaagacagagaagaccggtaaacgtagcacttcagcggcggttttagaagctcttcgcgaagtccatcccattgtggacaagatcttgcagtaccgcgaaatggcgaaattgaaaggcacctatattgaccgtcttccggcattagtccacccgaaaacgggacgcctccatacccgcttcaaccaaacagccacggcgaccggtcgtttgtcctcctctgatccaaaccttcagaatattccagtacgtaccccattgggccagaagatccgccgtgcgtttgtagctgaggagggttggcgtttagtggccctcgattatcgtcaaattgaattacgtgtccttgcccatctttctggcgatgagaacctcatccgcgtgtttcaggaaggcaaagacattcacactcaaacggcaagctggatgtttggattatcagctgaagcgatcgatcctttgatgcgtcgtgcagcgaagaccatcaatttcggtgttctctacggtatgagtgcctttcgtttgtcgcaggaattaggcattccctatgaagaagctcaggcgttcattcagaaatactttcaaagctatcccaaagttaaagcatggatcgagaagactctccgtgaaggccgcacacgtggttacgtagagaccttatttggacgtcgccgctatgttcccgatttaaacgctggtgtgaaaggcaagcgtgaagccgccgaacgcatggcgttcaacatgcctgtacagggcacggcagctgacctcatgaaacttgcaatggtgcgcctttttccacaattgcgtgaagttggtgcccgcatgctcttgcaggtccacgatgaactcttgttagaagcgccaaaagagcgtgcggaagaggtggcagccctcgcgaaagaagttatggaaggcgtgtggcccttagcggtgcctcttgaagtcgaagttggtattggcgaggattggctggctgccaaagga

SEQ ID NO: 5544 - protein, 841 aa, synthetic construct
  REGION 1..841: note = Variant of DNA polymerase I from Thermus sp. strain 2.9
MHHHHHHGGSGVLPVFEPKGRVLLVDGHHLAYRNFFALKGLTTSLGEPVQGVYGFAKSLLKALKEDGDVVIVVFDAKAPSFRHEAYEAYKAGRAPTPEDFPRQLALMKELVDLLGLERLEVPGFEADDVLATLAKKAEREGYEVQILTADRDLFQLLSPRISVLHPEGHRITPEWLWEKYGLRPEQWVDFRALAGDPSDNIPGVKGIGEKTALKLLKEWGSLENLLKNLDQVKPESVREKILAHLEDLKLSRELSRVRTDLPLEVDFGRRREPDWEGLKAFLERLEFGSLLHEFGLLESPLLAEEAPWPPPEGAFLGYRLSRPEPMWAELLALAASAQGRVYRAEDPHGALRGLFEVRGLLAKDLAVVALREGLDLPPTDDPMLLAYLLDPSNTTPEGVARRYGGEWTEDAAKRALLAERLHENLLGRLQGEERLLWLYEEVEKPLSRVLAHMEATGVKLDVAYLENLSLEVAAHMRRLEEEVFRLAGRSFRLNSRDQLERVLFDELGLPPIGKTEKTGKRSTSAAVLEALREVHPIVDKILQYREMAKLKGTYIDRLPALVHPKTGRLHTRFNQTATATGRLSSSDPNLQNIPVRTPLGQKIRRAFVAEEGWRLVALDYRQIELRVLAHLSGDENLIRVFQEGKDIHTQTASWMFGLSAEAIDPLMRRAAKTINFGVLYGMSAFRLSQELGIPYEEAQAFIQKYFQSYPKVKAWIEKTLREGRTRGYVETLFGRRRYVPDLNAGVKGKREAAERMAFNMPVQGTAADLMKLAMVRLFPQLREVGARMLLQVHDELLLEAPKERAEEVAALAKEVMEGVWPLAVPLEVEVGIGEDWLAAKG

SEQ ID NO: 5545 - DNA, 2523 bp, synthetic construct
  misc_feature 1..2523: note = Variant of DNA polymerase I from Thermus sp. strain 2.9
  source 1..2523: mol_type = other DNA
atgcaccatcatcatcatcatggcggtagcggcgtgttaccggtgttcgagcctaaaggtcgcgtgcttctggttgatggccatcatctcgcgtatcgtaacttctttgccctgaaaggattaaccaccagcctgggcgagccggtacagggtgtctacggctttgcaaagtcgctcctgaaagctctgaaagaagacggtgatgtggtgattgttgtctttgatgcgaaagcgccaagttttcgccacgaagcgtacgaagcttacaaagccgggcgtgctccaacgccggaagactttcctcgccaattggcgcttatgaaggaattagtggatttgcttggcctcgaacgcttggaagttcccggtttcgaggcagacgacgtattagcgactctcgcaaagaaagccgaacgtgagggctatgaagtccagatcttgacagcagatcgcgatcttttccagcttttatctccgcgcatctcggtgttacacccggaagggcatcgtatcaccccggaatggctctgggagaaatatggtttgcgtcccgaacaatgggtggattttcgcgccttagcaggcgatccgagcgacaatattccgggagttaaaggtatcggcgagaagacggcgctcaagctccttaaagaatgggggtcgttggagaacttgcttaagaatttagatcaggtcaaaccagagtcagtgcgtgagaagattcttgctcacctcgaagacctcaaattaagccgcgaattgtcccgtgtacgcaccgatttgccgctcgaagttgatttcggtcgccgccgcgaacctgactgggagggtcttaaagcgtttttagagcgtcttgaatttggttcgctcttgcatgaattcggccttttagaaagcccgttactggccgaagaagcaccttggccaccgcccgagggcgcgtttttaggttaccgtttgagtcgcccggaaccgatgtgggccgaattactggctcttgcagcgtctgcccagggacgtgtgtatcgcgcggaagaccctcatggtgcgctccgcggcctcttcgaagtccgtaccctccttgccaaagacttagctgttgttgcattgcgcgaaggtcttgatttacctccgactgatgatccaatgcttcttgcgtacctcttggacccgtcaaacacgacgcccgaaggcgtagcccgtcgttacggcggcgagtggaccgaagatgcaggcaaacgcgcgttattggccgaacgtttgcacgaaaatttattaggacgtttgcaaggcgaggcgcgtctccgttggctttacgaagaagtggagaaaccattgagtcgcgtgctcgcgcatatggaagctaccggtgtcaaattagacgtggcgtatttggagaatctcagccttgaagttgctgcccacatgcgccgcttggaggaagaagtattccgtttagcaggccgttcctttcgccttaactctcgcgatcagttagaacgtgtgttgttcgatgaacttggtctccctcctatcggcaagacagagaagaccggtaaacgtagcacttcagcggcggttttagaagctcttcgcgaagtccatcccattgtggacaagatcttgcagtaccgcgaaatggcgaaattgaaaggcacctatattgaccgtcttccggcattagtccacccgaaaacgggacgcctccatacccgcttcaaccaaacagccacggcgaccggtcgtttgtcctcctctgatccaaaccttcagaatattccagtacgtacctttttgggccagaagatccgccgtgcgtttgtagctgagccgggttgggcgttagtggccctcgattatcgtcaaattgaattacgtgtccttgcccatctttctggcgatgagaacctcatccgcgtgtttcaggaaggcaaagacattcacactcaaacggcaagctggatgtttggattatcagctgaagcgatcgatcctttgatgcgtcgtgcagcgaagaccatcaatttcggtgttctctacggtatgagtgcctttcgtttgtcgcaggaattaggcattccctatgaagaagctcaggcgttcattcagaaatactttcaaagctatcccaaagttaaagcatggatcgagaagactctccgtgaaggccgcacacgtggttacgtagagaccttatttggacgtcgccgctatgttcccgatttaaacgctcgcgtgaaaggcaagcgtgaagccgccgaacgcatggcgttcaacatgcctgtacagggcacggcagctgacctcatgaaacttgcaatggtgcgcctttttccacaattgcgtgaagttggtgcccgcatgctgttgcaggtccacgatgaactcttgttagaagcgccaaaagagcgtgcggaagaggtggcagccctcgcgaaagaagttatggaaggcgtgtggcccttagcggtgcctcttgaagtcgaagttggtattggcgaggattggctggctgccaaagga

SEQ ID NO: 5546 - protein, 841 aa, synthetic construct
  REGION 1..841: note = Variant of DNA polymerase I from Thermus sp. strain 2.9
MHHHHHHGGSGVLPVFEPKGRVLLVDGHHLAYRNFFALKGLTTSLGEPVQGVYGFAKSLLKALKEDGDVVIVVFDAKAPSFRHEAYEAYKAGRAPTPEDFPRQLALMKELVDLLGLERLEVPGFEADDVLATLAKKAEREGYEVQILTADRDLFQLLSPRISVLHPEGHRITPEWLWEKYGLRPEQWVDFRALAGDPSDNIPGVKGIGEKTALKLLKEWGSLENLLKNLDQVKPESVREKILAHLEDLKLSRELSRVRTDLPLEVDFGRRREPDWEGLKAFLERLEFGSLLHEFGLLESPLLAEEAPWPPPEGAFLGYRLSRPEPMWAELLALAASAQGRVYRAEDPHGALRGLFEVRTLLAKDLAVVALREGLDLPPTDDPMLLAYLLDPSNTTPEGVARRYGGEWTEDAGKRALLAERLHENLLGRLQGEARLRWLYEEVEKPLSRVLAHMEATGVKLDVAYLENLSLEVAAHMRRLEEEVFRLAGRSFRLNSRDQLERVLFDELGLPPIGKTEKTGKRSTSAAVLEALREVHPIVDKILQYREMAKLKGTYIDRLPALVHPKTGRLHTRFNQTATATGRLSSSDPNLQNIPVRTFLGQKIRRAFVAEPGWALVALDYRQIELRVLAHLSGDENLIRVFQEGKDIHTQTASWMFGLSAEAIDPLMRRAAKTINFGVLYGMSAFRLSQELGIPYEEAQAFIQKYFQSYPKVKAWIEKTLREGRTRGYVETLFGRRRYVPDLNARVKGKREAAERMAFNMPVQGTAADLMKLAMVRLFPQLREVGARMLLQVHDELLLEAPKERAEEVAALAKEVMEGVWPLAVPLEVEVGIGEDWLAAKG

SEQ ID NO: 5547 - DNA, 2523 bp, synthetic construct
  misc_feature 1..2523: note = Variant of DNA polymerase I from Thermus sp. strain 2.9
  source 1..2523: mol_type = other DNA
atgcaccatcatcatcatcatggcggtagcggcgtgttaccggtgttcgagcctaaaggtcgcgtgcttctggttgatggccatcatctcgcgtatcgtaacttctttgccctgaaaggattaaccaccagcctgggcgagccggtacagggtgtctacggctttgcaaagtcgctcctgaaagctctgaaagaagacggtgatgtggtgattgttgtctttgatgcgaaagcgccaagttttcgccacgaagcgtacgaagcttacaaagccgggcgtgctccaacgccggaagactttcctcgccaattggcgcttatgaaggaattagtggatttgcttggcctcgaacgcttggaagttcccggtttcgaggcagacgacgtattagcgactctcgcaaagaaagccgaacgtgagggctatgaagtccagatcttgacagcagatcgcgatcttttccagcttttatctccgcgcatctcggtgttacacccggaagggcatcgtatcaccccggaatggctctgggagaaatatggtttgcgtcccgaacaatgggtggattttcgcgccttagcaggcgatccgagcgacaatattccgggagttaaaggtatcggcgagaagacggcgctcaagctccttaaagaatgggggtcgttggagaacttgcttaagaatttagatcaggtcaaaccagagtcagtgcgtgagaagattcttgctcacctcgaagacctcaaattaagccgcgaattgtcccgtgtacgcaccgatttgccgctcgaagttgatttcggtcgccgccgcgaacctgactgggagggtcttaaagcgtttttagagcgtcttgaatttggttcgctcttgcatgaattcggccttttagaaagcccgttactggccgaagaagcaccttggccaccgcccgagggcgcgtttttaggttaccgtttgagtcgcccggaaccgatgtgggccgaattactggctcttgcagcgtctgcccagggacgtgtgtatcgcgcggaagaccctcatggtgcgctccgcggcctcttcgaagtccgtggcctccttgccaaagacttagctgttgttgcattgcgcgaaggtcttgatttacctccgactgatgatccaatgcttcttgcgtacctcttggacccgtcaaacacgacgcccgaaggcgtagcccgtcgttacggcggcgagtggaccgaagatgcagcgaaacgcgcgttattggccgaacgtttgcacgaaaatttattaggacgtttgcaaggcgaggaacgtctcctctggctttacgaagaagtggagaaaccattgagtcgcgtgctcgcgcatatggaagctaccggtgtcaaattagacgtggcgtatttggagaatctcagccttgaagttgctgcccacatgcgccgcttggaggaagaagtattccgtttagcaggccgttcctttcgccttaactctcgcgatcagttagaacgtgtgttgttcgatgaacttggtctccctcctatcggcaagacagagaagaccggtaaacgtagcacttcagcggcggttttagaagctcttcgcgaagtccatcccattgtggacaagatcttgcagtaccgcgaaatggcgaaattgaaaggcacctatattgaccgtcttccggcattagtccacccgaaaacgggacgcctccatacccgcttcaaccaaacagccacggcgaccggtcgtttgtcctcctctgatccaaaccttcagaatattccagtacgtacctttttgggccagaagatccgccgtgcgtttgtagctgagccgggttggcgtttagtggccctcgattatcgtcaaattgaattacgtgtccttgcccatctttctggcgatgagaacctcatccgcgtgtttcaggaaggcaaagacattcacactcaaacggcaagctggatgtttggattatcagctgaagcgatcgatcctttgatgcgtcgtgcagcgaagaccatcaatttcggtgttctctacggtatgagtgcctttcgtttgtcgcaggaattaggcattccctatgaagaagctcaggcgttcattcagaaatactttcaaagctatcccaaagttaaagcatggatcgagaagactctccgtgaaggccgcacacgtggttacgtagagaccttatttggacgtcgccgctatgttcccgatttaaacgctcgcgtgaaaggcaagcgtgaagccgccgaacgcatggcgttcaacatgcctgtacagggcacggcagctgacctcatgaaacttgcaatggtgcgcctttttccacaattgcgtgaagttggtgcccgcatgctcttgcaggtccacgatgaactcttgttagaagcgccaaaagagcgtgcggaagaggtggcagccctcgcgaaagaagttatggaaggcgtgtggcccttagcggtgcctcttgaagtcgaagttggtattggcgaggattggctggctgccaaagga

SEQ ID NO: 5548 - protein, 841 aa, synthetic construct
  REGION 1..841: note = Variant of DNA polymerase I from Thermus sp. strain 2.9
MHHHHHHGGSGVLPVFEPKGRVLLVDGHHLAYRNFFALKGLTTSLGEPVQGVYGFAKSLLKALKEDGDVVIVVFDAKAPSFRHEAYEAYKAGRAPTPEDFPRQLALMKELVDLLGLERLEVPGFEADDVLATLAKKAEREGYEVQILTADRDLFQLLSPRISVLHPEGHRITPEWLWEKYGLRPEQWVDFRALAGDPSDNIPGVKGIGEKTALKLLKEWGSLENLLKNLDQVKPESVREKILAHLEDLKLSRELSRVRTDLPLEVDFGRRREPDWEGLKAFLERLEFGSLLHEFGLLESPLLAEEAPWPPPEGAFLGYRLSRPEPMWAELLALAASAQGRVYRAEDPHGALRGLFEVRGLLAKDLAVVALREGLDLPPTDDPMLLAYLLDPSNTTPEGVARRYGGEWTEDAAKRALLAERLHENLLGRLQGEERLLWLYEEVEKPLSRVLAHMEATGVKLDVAYLENLSLEVAAHMRRLEEEVFRLAGRSFRLNSRDQLERVLFDELGLPPIGKTEKTGKRSTSAAVLEALREVHPIVDKILQYREMAKLKGTYIDRLPALVHPKTGRLHTRFNQTATATGRLSSSDPNLQNIPVRTFLGQKIRRAFVAEPGWRLVALDYRQIELRVLAHLSGDENLIRVFQEGKDIHTQTASWMFGLSAEAIDPLMRRAAKTINFGVLYGMSAFRLSQELGIPYEEAQAFIQKYFQSYPKVKAWIEKTLREGRTRGYVETLFGRRRYVPDLNARVKGKREAAERMAFNMPVQGTAADLMKLAMVRLFPQLREVGARMLLQVHDELLLEAPKERAEEVAALAKEVMEGVWPLAVPLEVEVGIGEDWLAAKG

SEQ ID NO: 5549 - DNA, 2523 bp, synthetic construct
  misc_feature 1..2523: note = Variant of DNA polymerase I from Thermus sp. strain 2.9
  source 1..2523: mol_type = other DNA
atgcaccatcatcatcatcatggcggtagcggcgtgttaccggtgttcgagcctaaaggtcgcgtgcttctggttgatggccatcatctcgcgtatcgtaacttctttgccctgaaaggattaaccaccagcctgggcgagccggtacagggtgtctacggctttgcaaagtcgctcctgaaagctctgaaagaagacggtgatgtggtgattgttgtctttgatgcgaaagcgccaagttttcgccacgaagcgtacgaagcttacaaagccgggcgtgctccaacgccggaagactttcctcgccaattggcgcttatgaaggaattagtggatttgcttggcctcgaacgcttggaagttcccggtttcgaggcagacgacgtattagcgactctcgcaaagaaagccgaacgtgagggctatgaagtccagatcttgacagcagatcgcgatcttttccagcttttatctccgcgcatctcggtgttacacccggaagggcatcgtatcaccccggaatggctctgggagaaatatggtttgcgtcccgaacaatgggtggattttcgcgccttagcaggcgatccgagcgacaatattccgggagttaaaggtatcggcgagaagacggcgctcaagctccttaaagaatgggggtcgttggagaacttgcttaagaatttagatcaggtcaaaccagagtcagtgcgtgagaagattcttgctcacctcgaagacctcaaattaagccgcgaattgtcccgtgtacgcaccgatttgccgctcgaagttgatttcggtcgccgccgcgaacctgactgggagggtcttaaagcgtttttagagcgtcttgaatttggttcgctcttgcatgaattcggccttttagaaagcccgttactggccgaagaagcaccttggccaccgcccgagggcgcgtttttaggttaccgtttgagtcgcccggaaccgatgtgggccgaattactggctcttgcagcgtctgcccagggacgtgtgtatcgcgcggaagaccctcatggtgcgctccgcggcctcttcgaagtccgtggcctccttgccaaagacttagctgttgttgcattgcgcgaaggtcttgatttacctccgactgatgatccaatgcttcttgcgtacctcttggacccgtcaaacacgacgcccgaaggcgtagcccgtcgttacggcggcgagtggaccgaagatgcagccaaacgcgcgttattggccgaacgtttgcacgaaaatttattaggacgtttgcaaggcgaggaacgtctcctctggctttacgaagaagtggagaaaccattgagtcgcgtgctcgcgcatatggaagctaccggtgtcaaattagacgtggcgtatttggagaatctcagccttgaagttgctgcccacatgcgccgcttggaggaagaagtattccgtttagcaggccgttcctttcgccttaactctcgcgatcagttagaacgtgtgttgttcgatgaacttggtctccctcctatcggcaagacagagaagaccggtaaacgtagcacttcagcggcggttttagaagctcttcgcgaagtccatcccattgtggacaagatcttgcagtaccgcgaaatggcgaaattgaaaggcacctatattgaccgtcttccggcattagtccacccgaaaacgggacgcctccatacccgcttcaaccaaacagccacggcgaccggtcgtttgtcctcctctgatccaaaccttcagaatattccagtacgtaccccattgggccagaagatccgccgtgcgtttgtagctgagccgggttggcgtttagtggccctcgattatcgtcaaattgaattacgtgtccttgcccatctttctggcgatgagaacctcatccgcgtgtttcaggaaggcaaagacattcacactcaaacggcaagctggatgtttggattatcagctgaagcgatcgatcctttgatgcgtcgtgcagcgaagaccatcaatttcggtgttctctacggtatgagtgcctttcgtttgtcgcaggaattaggcattccctatgaagaagctcaggcgttcattcagaaatactttcaaagctatcccaaagttaaagcatggatcgagaagactctccgtgaaggccgcacacgtggttacgtagagaccttatttggacgtcgccgctatgttcccgatttaaactcgcgcgtgaaaggcaagcgtgaagccgccgaacgcatggcgttcaacatgcctgtacagggcacggcagctgacctcatgaaacttgcaatggtgcgcctttttccacaattgcgtgaagttggtgcccgcatgctgttgcaggtccacgatgaactcttgttagaagcgccaaaagagcgtgcggaagaggtggcagccctcgcgaaagaagttatggaaggcgtgtggcccttagcggtgcctcttgaagtcgaagttggtattggcgaggattggctggctgccaaagga

SEQ ID NO: 5550 - protein, 841 aa, synthetic construct
  REGION 1..841: note = Variant of DNA polymerase I from Thermus sp. strain 2.9
MHHHHHHGGSGVLPVFEPKGRVLLVDGHHLAYRNFFALKGLTTSLGEPVQGVYGFAKSLLKALKEDGDVVIVVFDAKAPSFRHEAYEAYKAGRAPTPEDFPRQLALMKELVDLLGLERLEVPGFEADDVLATLAKKAEREGYEVQILTADRDLFQLLSPRISVLHPEGHRITPEWLWEKYGLRPEQWVDFRALAGDPSDNIPGVKGIGEKTALKLLKEWGSLENLLKNLDQVKPESVREKILAHLEDLKLSRELSRVRTDLPLEVDFGRRREPDWEGLKAFLERLEFGSLLHEFGLLESPLLAEEAPWPPPEGAFLGYRLSRPEPMWAELLALAASAQGRVYRAEDPHGALRGLFEVRGLLAKDLAVVALREGLDLPPTDDPMLLAYLLDPSNTTPEGVARRYGGEWTEDAAKRALLAERLHENLLGRLQGEERLLWLYEEVEKPLSRVLAHMEATGVKLDVAYLENLSLEVAAHMRRLEEEVFRLAGRSFRLNSRDQLERVLFDELGLPPIGKTEKTGKRSTSAAVLEALREVHPIVDKILQYREMAKLKGTYIDRLPALVHPKTGRLHTRFNQTATATGRLSSSDPNLQNIPVRTPLGQKIRRAFVAEPGWRLVALDYRQIELRVLAHLSGDENLIRVFQEGKDIHTQTASWMFGLSAEAIDPLMRRAAKTINFGVLYGMSAFRLSQELGIPYEEAQAFIQKYFQSYPKVKAWIEKTLREGRTRGYVETLFGRRRYVPDLNSRVKGKREAAERMAFNMPVQGTAADLMKLAMVRLFPQLREVGARMLLQVHDELLLEAPKERAEEVAALAKEVMEGVWPLAVPLEVEVGIGEDWLAAKG

SEQ ID NO: 5551 - DNA, 2523 bp, synthetic construct
  misc_feature 1..2523: note = Variant of DNA polymerase I from Thermus sp. strain 2.9
  source 1..2523: mol_type = other DNA
atgcaccatcatcatcatcatggcggtagcggcgtgttaccggtgttcgagcctaaaggtcgcgtgcttctggttgatggccatcatctcgcgtatcgtaacttctttgccctgaaaggattaaccaccagcctgggcgagccggtacagggtgtctacggctttgcaaagtcgctcctgaaagctctgaaagaagacggtgatgtggtgattgttgtctttgatgcgaaagcgccaagttttcgccacgaagcgtacgaagcttacaaagccgggcgtgctccaacgccggaagactttcctcgccaattggcgcttatgaaggaattagtggatttgcttggcctcgaacgcttggaagttcccggtttcgaggcagacgacgtattagcgactctcgcaaagaaagccgaacgtgagggctatgaagtccagatcttgacagcagatcgcgatcttttccagcttttatctccgcgcatctcggtgttacacccggaagggcatcgtatcaccccggaatggctctgggagaaatatggtttgcgtcccgaacaatgggtggattttcgcgccttagcaggcgatccgagcgacaatattccgggagttaaaggtatcggcgagaagacggcgctcaagctccttaaagaatgggggtcgttggagaacttgcttaagaatttagatcaggtcaaaccagagtcagtgcgtgagaagattcttgctcacctcgaagacctcaaattaagccgcgaattgtcccgtgtacgcaccgatttgccgctcgaagttgatttcggtcgccgccgcgaacctgactgggagggtcttaaagcgtttttagagcgtcttgaatttggttcgctcttgcatgaattcggccttttagaaagcccgttactggccgaagaagcaccttggccaccgcccgagggcgcgtttttaggttaccgtttgagtcgcccggaaccgatgtgggccgaattactggctcttgcagcgtctgcccagggacgtgtgtatcgcgcggaagaccctcatggtgcgctccgcggcctcttcgaagtccgtggcctccttgccaaagacttagctgttgttgcattgcgcgaaggtcttgatttacctccgactgatgatccaatgcttcttgcgtacctcttggacccgtcaaacacgacgcccgaaggcgtagcccgtcgttacggcggcgagtggaccgaagatgcagcgaaacgcgcgttattggccgaacgtttgcacgaaaatttattaggacgtttgcaaggcgaggcgcgtctcctgtggctttacgaagaagtggagaaaccattgagtcgcgtgctcgcgcatatggaagctaccggtgtcaaattagacgtggcgtatttggagaatctcagccttgaagttgctgcccacatgcgccgcttggaggaagaagtattccgtttagcaggccgttcctttcgccttaactctcgcgatcagttagaacgtgtgttgttcgatgaacttggtctccctcctatcggcaagacagagaagaccggtaaacgtagcacttcagcggcggttttagaagctcttcgcgaagtccatcccattgtggacaagatcttgcagtaccgcgaaatggcgaaattgaaaggcacctatattgaccgtcttccggcattagtccacccgaaaacgggacgcctccatacccgcttcaaccaaacagccacggcgaccggtcgtttgtcctcctctgatccaaaccttcagaatattccagtacgtaccccattgggccagaagatccgccgtgcgtttgtagctgagccgggttggcgtttagtggccctcgattatcgtcaaattgaattacgtgtccttgcccatctttctggcgatgagaacctcatccgcgtgtttcaggaaggcaaagacattcacactcaaacggcaagctggatgtttggattatcagctgaagcgatcgatcctttgatgcgtcgtgcagcgaagaccatcaatttcggtgttctctacggtatgagtgcctttcgtttgtcgcaggaattaggcattcccctggaagaagctcagggtttcattcagaaatactttcaaagctatcccaaagttaaagcatggatcgagaagactctccgtgaaggccgcacacgtggttacgtagagaccttatttggacgtcgccgctatgttcccgatttaaacggtcgcgtgaaaggcaagcgtgaagccgccgaacgcatggcgttcaacatgcctgtacagggcacggcagctgacctcatgaaacttgcaatggtgcgcctttttccacaattgcgtgaagttggtgcccgcatgctgttgcaggtccacgatgaactcttgttagaagcgccaaaagagcgtgcggaagaggtggcagccctcgcgaaagaagttatggaaggcgtgtggcccttagcggtgcctcttgaagtcgaagttggtattggcgaggattggctggctgccaaagga

SEQ ID NO: 5552 - protein, 841 aa, synthetic construct
  REGION 1..841: note = Variant of DNA polymerase I from Thermus sp. strain 2.9
MHHHHHHGGSGVLPVFEPKGRVLLVDGHHLAYRNFFALKGLTTSLGEPVQGVYGFAKSLLKALKEDGDVVIVVFDAKAPSFRHEAYEAYKAGRAPTPEDFPRQLALMKELVDLLGLERLEVPGFEADDVLATLAKKAEREGYEVQILTADRDLFQLLSPRISVLHPEGHRITPEWLWEKYGLRPEQWVDFRALAGDPSDNIPGVKGIGEKTALKLLKEWGSLENLLKNLDQVKPESVREKILAHLEDLKLSRELSRVRTDLPLEVDFGRRREPDWEGLKAFLERLEFGSLLHEFGLLESPLLAEEAPWPPPEGAFLGYRLSRPEPMWAELLALAASAQGRVYRAEDPHGALRGLFEVRGLLAKDLAVVALREGLDLPPTDDPMLLAYLLDPSNTTPEGVARRYGGEWTEDAAKRALLAERLHENLLGRLQGEARLLWLYEEVEKPLSRVLAHMEATGVKLDVAYLENLSLEVAAHMRRLEEEVFRLAGRSFRLNSRDQLERVLFDELGLPPIGKTEKTGKRSTSAAVLEALREVHPIVDKILQYREMAKLKGTYIDRLPALVHPKTGRLHTRFNQTATATGRLSSSDPNLQNIPVRTPLGQKIRRAFVAEPGWRLVALDYRQIELRVLAHLSGDENLIRVFQEGKDIHTQTASWMFGLSAEAIDPLMRRAAKTINFGVLYGMSAFRLSQELGIPLEEAQGFIQKYFQSYPKVKAWIEKTLREGRTRGYVETLFGRRRYVPDLNGRVKGKREAAERMAFNMPVQGTAADLMKLAMVRLFPQLREVGARMLLQVHDELLLEAPKERAEEVAALAKEVMEGVWPLAVPLEVEVGIGEDWLAAKG

SEQ ID NO: 5553 - DNA, 2523 bp, synthetic construct
  misc_feature 1..2523: note = Variant of DNA polymerase I from Thermus sp. strain 2.9
  source 1..2523: mol_type = other DNA
atgcaccatcatcatcatcatggcggtagcggcgtgttaccggtgttcgagcctaaaggtcgcgtgcttctggttgatggccatcatctcgcgtatcgtaacttctttgccctgaaaggattaaccaccagcctgggcgagccggtacagggtgtctacggctttgcaaagtcgctcctgaaagctctgaaagaagacggtgatgtggtgattgttgtctttgatgcgaaagcgccaagttttcgccacgaagcgtacgaagcttacaaagccgggcgtgctccaacgccggaagactttcctcgccaattggcgcttatgaaggaattagtggatttgcttggcctcgaacgcttggaagttcccggtttcgaggcagacgacgtattagcgactctcgcaaagaaagccgaacgtgagggctatgaagtccagatcttgacagcagatcgcgatcttttccagcttttatctccgcgcatctcggtgttacacccggaagggcatcgtatcaccccggaatggctctgggagaaatatggtttgcgtcccgaacaatgggtggattttcgcgccttagcaggcgatccgagcgacaatattccgggagttaaaggtatcggcgagaagacggcgctcaagctccttaaagaatgggggtcgttggagaacttgcttaagaatttagatcaggtcaaaccagagtcagtgcgtgagaagattcttgctcacctcgaagacctcaaattaagccgcgaattgtcccgtgtacgcaccgatttgccgctcgaagttgatttcggtcgccgccgcgaacctgactgggagggtcttaaagcgtttttagagcgtcttgaatttggttcgctcttgcatgaattcggccttttagaaagcccgttactggccgaagaagcaccttggccaccgcccgagggcgcgtttttaggttaccgtttgagtcgcccggaaccgatgtgggccgaattactggctcttgcagcgtctgcccagggacgtgtgtatcgcgcggaagaccctcatggtgcgctccgcggcctcttcgaagtccgtggactccttgccaaagacttagctgttgttgcattgcgcgaaggtcttgatttacctccgactgatgatccaatgcttcttgcgtacctcttggacccgtcaaacacgacgcccgaaggcgtagcccgtcgttacggcggcgagtggaccgaagatgcagcgaaacgcgcgttattggccgaacgtttgcacgaaaatttattaggacgtttgcaaggcgaggaacgtctcctctggctttacgaagaagtggagaaaccattgagtcgcgtgctcgcgcatatggaagctaccggtgtcaaattagacgtggcgtatttggagaatctcagccttgaagttgctgcccacatgcgccgcttggaggaagaagtattccgtttagcaggccgttcctttcgccttaactctcgcgatcagttagaacgtgtgttgttcgatgaacttggtctccctcctatcggcaagacagagaagaccggtaaacgtagcacttcagcggcggttttagaagctcttcgcgaagtccatcccattgtggacaagatcttgcagtaccgcgaaatggcgaaattgaaaggcacctatattgaccgtcttccggcattagtccacccgaaaacgggacgcctccatacccgcttcaaccaaacagccacggcgaccggtcgtttgtcctcctctgatccaaaccttcagaatattccagtacgtaccccattgggccagaagatccgccgtgcgtttgtagctgaggagggttggcgtttagtggccctcgattatcgtcaaattgaattacgtgtccttgcccatctttctggcgatgagaacctcatccgcgtgtttcaggaaggcaaagacattcacactcaaacggcaagctggatgtttggattatcagctgaagcgatcgatcctttgatgcgtcgtgcagcgaagaccatcaatttcggtgttctctacggtatgagtgcctttcgtttgtcgcaggaattaggcattccctatgaagaagctcaggcgttcattcagaaatactttcaaagctatcccaaagttaaagcatggatcgagaagactctccgtgaaggccgcacacgtggttacgtagagaccttatttggacgtcgccgctatgttcccgatttaaacgctgatgtgaaaggcaagcgtgaagccgccgaacgcatggcgttcaacatgcctgtacagggcacggcagctgacctcatgaaacttgcaatggtgcgcctttttccacaattgcgtgaagttggtgcccgcatgctcttgcaggtccacgatgaactcttgttagaagcgccaaaagagcgtgcggaagaggtggcagccctcgcgaaagaagttatggaaggcgtgtggcccttagcggtgcctcttgaagtcgaagttggtattggcgaggattggctggctgccaaagga

SEQ ID NO: 5554 - protein, 841 aa, synthetic construct
  REGION 1..841: note = Variant of DNA polymerase I from Thermus sp. strain 2.9
MHHHHHHGGSGVLPVFEPKGRVLLVDGHHLAYRNFFALKGLTTSLGEPVQGVYGFAKSLLKALKEDGDVVIVVFDAKAPSFRHEAYEAYKAGRAPTPEDFPRQLALMKELVDLLGLERLEVPGFEADDVLATLAKKAEREGYEVQILTADRDLFQLLSPRISVLHPEGHRITPEWLWEKYGLRPEQWVDFRALAGDPSDNIPGVKGIGEKTALKLLKEWGSLENLLKNLDQVKPESVREKILAHLEDLKLSRELSRVRTDLPLEVDFGRRREPDWEGLKAFLERLEFGSLLHEFGLLESPLLAEEAPWPPPEGAFLGYRLSRPEPMWAELLALAASAQGRVYRAEDPHGALRGLFEVRGLLAKDLAVVALREGLDLPPTDDPMLLAYLLDPSNTTPEGVARRYGGEWTEDAAKRALLAERLHENLLGRLQGEERLLWLYEEVEKPLSRVLAHMEATGVKLDVAYLENLSLEVAAHMRRLEEEVFRLAGRSFRLNSRDQLERVLFDELGLPPIGKTEKTGKRSTSAAVLEALREVHPIVDKILQYREMAKLKGTYIDRLPALVHPKTGRLHTRFNQTATATGRLSSSDPNLQNIPVRTPLGQKIRRAFVAEEGWRLVALDYRQIELRVLAHLSGDENLIRVFQEGKDIHTQTASWMFGLSAEAIDPLMRRAAKTINFGVLYGMSAFRLSQELGIPYEEAQAFIQKYFQSYPKVKAWIEKTLREGRTRGYVETLFGRRRYVPDLNADVKGKREAAERMAFNMPVQGTAADLMKLAMVRLFPQLREVGARMLLQVHDELLLEAPKERAEEVAALAKEVMEGVWPLAVPLEVEVGIGEDWLAAKG

SEQ ID NO: 5555 - DNA, 2523 bp, synthetic construct
  misc_feature 1..2523: note = Variant of DNA polymerase I from Thermus sp. strain 2.9
  source 1..2523: mol_type = other DNA
atgcaccatcatcatcatcatggcggtagcggcgtgttaccggtgttcgagcctaaaggtcgcgtgcttctggttgatggccatcatctcgcgtatcgtaacttctttgccctgaaaggattaaccaccagcctgggcgagccggtacagggtgtctacggctttgcaaagtcgctcctgaaagctctgaaagaagacggtgatgtggtgattgttgtctttgatgcgaaagcgccaagttttcgccacgaagcgtacgaagcttacaaagccgggcgtgctccaacgccggaagactttcctcgccaattggcgcttatgaaggaattagtggatttgcttggcctcgaacgcttggaagttcccggtttcgaggcagacgacgtattagcgactctcgcaaagaaagccgaacgtgagggctatgaagtccagatcttgacagcagatcgcgatcttttccagcttttatctccgcgcatctcggtgttacacccggaagggcatcgtatcaccccggaatggctctgggagaaatatggtttgcgtcccgaacaatgggtggattttcgcgccttagcaggcgatccgagcgacaatattccgggagttaaaggtatcggcgagaagacggcgctcaagctccttaaagaatgggggtcgttggagaacttgcttaagaatttagatcaggtcaaaccagagtcagtgcgtgagaagattcttgctcacctcgaagacctcaaattaagccgcgaattgtcccgtgtacgcaccgatttgccgctcgaagttgatttcggtcgccgccgcgaacctgactgggagggtcttaaagcgtttttagagcgtcttgaatttggttcgctcttgcatgaattcggccttttagaaagcccgttactggccgaagaagcaccttggccaccgcccgagggcgcgtttttaggttaccgtttgagtcgcccggaaccgatgtgggccgaattactggctcttgcagcgtctgcccagggacgtgtgtatcgcgcggaagaccctcatggtgcgctccgcggcctcttcgaagtccgtggactccttgccaaagacttagctgttgttgcattgcgcgaaggtcttgatttacctccgactgatgatccaatgcttcttgcgtacctcttggacccgtcaaacacgacgcccgaaggcgtagcccgtcgttacggcggcgagtggaccgaagatgcagcgaaacgcgcgttattggccgaacgtttgcacgaaaatttattaggacgtttgcaaggcgaggaacgtctcctctggctttacgaagaagtggagaaaccattgagtcgcgtgctcgcgcatatggaagctaccggtgtcaaattagacgtggcgtatttggagaatctcagccttgaagttgctgcccacatgcgccgcttggaggaagaagtattccgtttagcaggccgttcctttcgccttaactctcgcgatcagttagaacgtgtgttgttcgatgaacttggtgtgcctcctatcggcaagacagagaagaccggtaaacgtagcacttcagcggcggttttagaagctcttcgcgaagtccatcccattgtggacaagatcttgcagtaccgcgaaatggcgaaattgaaaggcacctatattgaccgtcttccggcattagtccacccgaaaacgggacgcctccatacccgcttcaaccaaacagccacggcgaccggtcgtttgtcctcctctgatccaaaccttcagaatattccagtacgtaccccattgggccagaagatccgccgtgcgtttgtagctgaggagggttggcgtttagtggccctcgattatcgtcaaattgaattacgtgtccttgcccatctttctggcgatgagaacctcatccgcgtgtttcaggaaggcaaagacattcacactcaaacggcaagctggatgtttggattatcagctgaagcgatcgatcctttgatgcgtcgtgcagcgaagaccatcaatttcggtgttctctacggtatgagtgcctttcgtttgtcgcaggaattaggcattccctatgaagaagctcaggcgttcattcagaaatactttcaaagctatcccaaagttaaagcatggatcgagaagactctccgtgaaggccgcacacgtggttacgtagagaccttatttggacgtcgccgctatgttcccgatttaaacgctcgcgtgaaaggcaagcgtgaagccgccgaacgcatggcgttcaacatgcctgtacagggcacggcagctgacctcatgaaacttgcaatggtgcgcctttttccacaattgcgtgaagttggtgcccgcatgctcttgcaggtccacgatgaactcttgttagaagcgccaaaagagcgtgcggaagaggtggcagccctcgcgaaagaagttatggaaggcgtgtggcccttagcggtgcctcttgaagtcgaagttggtattggcgaggattggctggctgccaaagga

SEQ ID NO: 5556 - protein, 841 aa, synthetic construct
  REGION 1..841: note = Variant of DNA polymerase I from Thermus sp. strain 2.9
MHHHHHHGGSGVLPVFEPKGRVLLVDGHHLAYRNFFALKGLTTSLGEPVQGVYGFAKSLLKALKEDGDVVIVVFDAKAPSFRHEAYEAYKAGRAPTPEDFPRQLALMKELVDLLGLERLEVPGFEADDVLATLAKKAEREGYEVQILTADRDLFQLLSPRISVLHPEGHRITPEWLWEKYGLRPEQWVDFRALAGDPSDNIPGVKGIGEKTALKLLKEWGSLENLLKNLDQVKPESVREKILAHLEDLKLSRELSRVRTDLPLEVDFGRRREPDWEGLKAFLERLEFGSLLHEFGLLESPLLAEEAPWPPPEGAFLGYRLSRPEPMWAELLALAASAQGRVYRAEDPHGALRGLFEVRGLLAKDLAVVALREGLDLPPTDDPMLLAYLLDPSNTTPEGVARRYGGEWTEDAAKRALLAERLHENLLGRLQGEERLLWLYEEVEKPLSRVLAHMEATGVKLDVAYLENLSLEVAAHMRRLEEEVFRLAGRSFRLNSRDQLERVLFDELGVPPIGKTEKTGKRSTSAAVLEALREVHPIVDKILQYREMAKLKGTYIDRLPALVHPKTGRLHTRFNQTATATGRLSSSDPNLQNIPVRTPLGQKIRRAFVAEEGWRLVALDYRQIELRVLAHLSGDENLIRVFQEGKDIHTQTASWMFGLSAEAIDPLMRRAAKTINFGVLYGMSAFRLSQELGIPYEEAQAFIQKYFQSYPKVKAWIEKTLREGRTRGYVETLFGRRRYVPDLNARVKGKREAAERMAFNMPVQGTAADLMKLAMVRLFPQLREVGARMLLQVHDELLLEAPKERAEEVAALAKEVMEGVWPLAVPLEVEVGIGEDWLAAKG

SEQ ID NO: 5557 - DNA, 2523 bp, synthetic construct
  misc_feature 1..2523: note = Variant of DNA polymerase I from Thermus sp. strain 2.9
  source 1..2523: mol_type = other DNA
atgcaccatcatcatcatcatggcggtagcggcgtgttaccggtgttcgagcctaaaggtcgcgtgcttctggttgatggccatcatctcgcgtatcgtaacttctttgccctgaaaggattaaccaccagcctgggcgagccggtacagggtgtctacggctttgcaaagtcgctcctgaaagctctgaaagaagacggtgatgtggtgattgttgtctttgatgcgaaagcgccaagttttcgccacgaagcgtacgaagcttacaaagccgggcgtgctccaacgccggaagactttcctcgccaattggcgcttatgaaggaattagtggatttgcttggcctcgaacgcttggaagttcccggtttcgaggcagacgacgtattagcgactctcgcaaagaaagccgaacgtgagggctatgaagtccagatcttgacagcagatcgcgatcttttccagcttttatctccgcgcatctcggtgttacacccggaagggcatcgtatcaccccggaatggctctgggagaaatatggtttgcgtcccgaacaatgggtggattttcgcgccttagcaggcgatccgagcgacaatattccgggagttaaaggtatcggcgagaagacggcgctcaagctccttaaagaatgggggtcgttggagaacttgcttaagaatttagatcaggtcaaaccagagtcagtgcgtgagaagattcttgctcacctcgaagacctcaaattaagccgcgaattgtcccgtgtacgcaccgatttgccgctcgaagttgatttcggtcgccgccgcgaacctgactgggagggtcttaaagcgtttttagagcgtcttgaatttggttcgctcttgcatgaattcggccttttagaaagcccgttactggccgaagaagcaccttggccaccgcccgagggcgcgtttttaggttaccgtttgagtcgcccggaaccgatgtgggccgaattactggctcttgcagcgtctgcccagggacgtgtgtatcgcgcggaagaccctcatggtgcgctccgcggcctcttcgaagtccgtggactccttgccaaagacttagctgttgttgcattgcgcgaaggtcttgatttacctccgactgatgatccaatgcttcttgcgtacctcttggacccgtcaaacacgacgcccgaaggcgtagcccgtcgttacggcggcgagtggaccgaagatgcagcgaaacgcgcgttattggccgaacgtttgcacgaaaatttattaggacgtttgcaaggcgaggaacgtctcctctggctttacgaagaagtggagaaaccattgagtcgcgtgctcgcgcatatggaagctaccggtgtcaaattagacgtggcgtatttggagaatctcagccttgaagttgctgcccacatgcgccgcttggaggaagaagtattccgtttagcaggccgttcctttcgccttaactctcgcgatcagttagaacgtgtgttgttcgatgaacttggtctccctcctatcggcaagacagagaagaccggtaaacgtagcacttcagcggcggttttagaagctcttcgcgaagtccatcccattgtggacaagatcttgcagtaccgcgaaatggcgaaattgaaaggcacctatattgaccgtcttccggcattagtccacccgaaaacgggacgcctccatacccgcttcaaccaaacagccacggcgaccggtcgtttgtcctcctctgatccaaaccttcagaatattccagtacgtaccccattgggccagaagatccgccgtgcgtttgtagctgaggagggttggcgtttagtggccctcgattatcgtcaaattgaattacgtgtccttgcccatctttctggcgatgagaacctcatccgcgtgtttcaggaaggcaaagacattcacactcaaacggcaagctggatgtttggattatcagctgaagcgatcgatcctttgatgcgtcgtgcagcgaagaccatcaatttcggtgttctctacggtatgagtgcctttcgtttgtcgcaggaattaggcattccctatgaagaagctcaggcgttcattcagaaatactttcaaagctatcccaaagttaaagcatggatcgagaagactctccgtgaaggccgcacacgtggttacgtagagaccttatttggacgtcgccgctatgttcccgatttaaacgctcgcgtgaaaggcaagcgtgaagccgccgaacgcatggcgttcaacatgcctgtacagggcacggcagctgacctcatgaaacttgcaatggtgcgcctttttccacaattgcgtgaagttggtgcccgcatgctcttgcaggtccacgatgaactcttgttagaagcgccaaaagagcgtgcggaagaggtggcagccctcgcgaaagaagttatggaaggcgtgtggcccttagcggtgcctcttgaagtcgaagttggtattggcgaggattggctggctgttaaagga

SEQ ID NO: 5558 - protein, 841 aa, synthetic construct
  REGION 1..841: note = Variant of DNA polymerase I from Thermus sp. strain 2.9
MHHHHHHGGSGVLPVFEPKGRVLLVDGHHLAYRNFFALKGLTTSLGEPVQGVYGFAKSLLKALKEDGDVVIVVFDAKAPSFRHEAYEAYKAGRAPTPEDFPRQLALMKELVDLLGLERLEVPGFEADDVLATLAKKAEREGYEVQILTADRDLFQLLSPRISVLHPEGHRITPEWLWEKYGLRPEQWVDFRALAGDPSDNIPGVKGIGEKTALKLLKEWGSLENLLKNLDQVKPESVREKILAHLEDLKLSRELSRVRTDLPLEVDFGRRREPDWEGLKAFLERLEFGSLLHEFGLLESPLLAEEAPWPPPEGAFLGYRLSRPEPMWAELLALAASAQGRVYRAEDPHGALRGLFEVRGLLAKDLAVVALREGLDLPPTDDPMLLAYLLDPSNTTPEGVARRYGGEWTEDAAKRALLAERLHENLLGRLQGEERLLWLYEEVEKPLSRVLAHMEATGVKLDVAYLENLSLEVAAHMRRLEEEVFRLAGRSFRLNSRDQLERVLFDELGLPPIGKTEKTGKRSTSAAVLEALREVHPIVDKILQYREMAKLKGTYIDRLPALVHPKTGRLHTRFNQTATATGRLSSSDPNLQNIPVRTPLGQKIRRAFVAEEGWRLVALDYRQIELRVLAHLSGDENLIRVFQEGKDIHTQTASWMFGLSAEAIDPLMRRAAKTINFGVLYGMSAFRLSQELGIPYEEAQAFIQKYFQSYPKVKAWIEKTLREGRTRGYVETLFGRRRYVPDLNARVKGKREAAERMAFNMPVQGTAADLMKLAMVRLFPQLREVGARMLLQVHDELLLEAPKERAEEVAALAKEVMEGVWPLAVPLEVEVGIGEDWLAVKG

SEQ ID NO: 5559 - DNA, 2523 bp, synthetic construct
  misc_feature 1..2523: note = Variant of DNA polymerase I from Thermus sp. strain 2.9
  source 1..2523: mol_type = other DNA
atgcaccatcatcatcatcatggcggtagcggcgtgttaccggtgttcgagcctaaaggtcgcgtgcttctggttgatggccatcatctcgcgtatcgtaacttctttgccctgaaaggattaaccaccagcctgggcgagccggtacagggtgtctacggctttgcaaagtcgctcctgaaagctctgaaagaagacggtgatgtggtgattgttgtctttgatgcgaaagcgccaagttttcgccacgaagcgtacgaagcttacaaagccgggcgtgctccaacgccggaagactttcctcgccaattggcgcttatgaaggaattagtggatttgcttggcctcgaacgcttggaagttcccggtttcgaggcagacgacgtattagcgactctcgcaaagaaagccgaacgtgagggctatgaagtccagatcttgacagcagatcgcgatcttttccagcttttatctccgcgcatctcggtgttacacccggaagggcatcgtatcaccccggaatggctctgggagaaatatggtttgcgtcccgaacaatgggtggattttcgcgccttagcaggcgatccgagcgacaatattccgggagttaaaggtatcggcgagaagacggcgctcaagctccttaaagaatgggggtcgttggagaacttgcttaagaatttagatcaggtcaaaccagagtcagtgcgtgagaagattcttgctcacctcgaagacctcaaattaagccgcgaattgtcccgtgtacgcaccgatttgccgctcgaagttgatttcggtcgccgccgcgaacctgactgggagggtcttaaagcgtttttagagcgtcttgaatttggttcgctcttgcatgaattcggccttttagaaagcccgttactggccgaagaagcaccttggccaccgcccgagggcgcgtttttaggttaccgtttgagtcgcccggaaccgatgtgggccgaattactggctcttgcagcgtctgcccagggacgtgtgtatcgcgcggaagaccctcatggtgcgctccgcggcctcttcgaagtccgtggactccttgccaaagacttagctgttgttgcattgcgcgaaggtcttgatttacctccgactgatgatccaatgcttcttgcgtacctcttggacccgtcaaacacgacgcccgaaggcgtagcccgtcgttacggcggcgagtggaccgaagatgcagcgaaacgcgcgttattggccgaacgtttgcacgaaaatttagggggacgtttgcaaggcgaggaacgtctcctctggctttacgaagaagtggagaaaccattgagtcgcgtgctcgcgcatatggaagctaccggtgtcaaattagacgtggcgtatttggagaatctcagccttgaagttgctgcccacatgcgccgcttggaggaagaagtattccgtttagcaggccgttcctttcgccttaactctcgcgatcagttagaacgtgtgttgttcgatgaacttggtctccctcctatcggcaagacagagaagaccggtaaacgtagcacttcagcggcggttttagaagctcttcgcgaagtccatcccattgtggacaagatcttgcagtaccgcgaaatggcgaaattgaaaggcacctatattgaccgtcttccggcattagtccacccgaaaacgggacgcctccatacccgcttcaaccaaacagccacggcgaccggtcgtttgtcctcctctgatccaaaccttcagaatattccagtacgtaccccattgggccagaagatccgccgtgcgtttgtagctgaggagggttggcgtttagtggccctcgattatcgtcaaattgaattacgtgtccttgcccatctttctggcgatgagaacctcatccgcgtgtttcaggaaggcaaagacattcacactcaaacggcaagctggatgtttggattatcagctgaagcgatcgatcctttgatgcgtcgtgcagcgaagaccatcaatttcggtgttctctacggtatgagtgcctttcgtttgtcgcaggaattaggcattccctatgaagaagctcaggcgttcattcagaaatactttcaaagctatcccaaagttaaagcatggatcgagaagactctccgtgaaggccgcacacgtggttacgtagagaccttatttggacgtcgccgctatgttcccgatttaaacgctcgcgtgaaaggcaagcgtgaagccgccgaacgcatggcgttcaacatgcctgtacagggcacggcagctgacctcatgaaacttgcaatggtgcgcctttttccacaattgcgtgaagttggtgcccgcatgctcttgcaggtccacgatgaactcttgttagaagcgccaaaagagcgtgcggaagaggtggcagccctcgcgaaagaagttatggaaggcgtgtggcccttagcggtgcctcttgaagtcgaagttggtattggcgaggattggctggctgccaaagga

SEQ ID NO: 5560 - protein, 841 aa, synthetic construct
  REGION 1..841: note = Variant of DNA polymerase I from Thermus sp. strain 2.9
MHHHHHHGGSGVLPVFEPKGRVLLVDGHHLAYRNFFALKGLTTSLGEPVQGVYGFAKSLLKALKEDGDVVIVVFDAKAPSFRHEAYEAYKAGRAPTPEDFPRQLALMKELVDLLGLERLEVPGFEADDVLATLAKKAEREGYEVQILTADRDLFQLLSPRISVLHPEGHRITPEWLWEKYGLRPEQWVDFRALAGDPSDNIPGVKGIGEKTALKLLKEWGSLENLLKNLDQVKPESVREKILAHLEDLKLSRELSRVRTDLPLEVDFGRRREPDWEGLKAFLERLEFGSLLHEFGLLESPLLAEEAPWPPPEGAFLGYRLSRPEPMWAELLALAASAQGRVYRAEDPHGALRGLFEVRGLLAKDLAVVALREGLDLPPTDDPMLLAYLLDPSNTTPEGVARRYGGEWTEDAAKRALLAERLHENLGGRLQGEERLLWLYEEVEKPLSRVLAHMEATGVKLDVAYLENLSLEVAAHMRRLEEEVFRLAGRSFRLNSRDQLERVLFDELGLPPIGKTEKTGKRSTSAAVLEALREVHPIVDKILQYREMAKLKGTYIDRLPALVHPKTGRLHTRFNQTATATGRLSSSDPNLQNIPVRTPLGQKIRRAFVAEEGWRLVALDYRQIELRVLAHLSGDENLIRVFQEGKDIHTQTASWMFGLSAEAIDPLMRRAAKTINFGVLYGMSAFRLSQELGIPYEEAQAFIQKYFQSYPKVKAWIEKTLREGRTRGYVETLFGRRRYVPDLNARVKGKREAAERMAFNMPVQGTAADLMKLAMVRLFPQLREVGARMLLQVHDELLLEAPKERAEEVAALAKEVMEGVWPLAVPLEVEVGIGEDWLAAKG

SEQ ID NO: 5561 - DNA, 2523 bp, synthetic construct
  misc_feature 1..2523: note = Variant of DNA polymerase I from Thermus sp. strain 2.9
  source 1..2523: mol_type = other DNA
atgcaccatcatcatcatcatggcggtagcggcgtgttaccggtgttcgagcctaaaggtcgcgtgcttctggttgatggccatcatctcgcgtatcgtaacttctttgccctgaaaggattaaccaccagcctgggcgagccggtacagggtgtctacggctttgcaaagtcgctcctgaaagctctgaaagaagacggtgatgtggtgattgttgtctttgatgcgaaagcgccaagttttcgccacgaagcgtacgaagcttacaaagccgggcgtgctccaacgccggaagactttcctcgccaattggcgcttatgaaggaattagtggatttgcttggcctcgaacgcttggaagttcccggtttcgaggcagacgacgtattagcgactctcgcaaagaaagccgaacgtgagggctatgaagtccagatcttgacagcagatcgcgatcttttccagcttttatctccgcgcatctcggtgttacacccggaagggcatcgtatcaccccggaatggctctgggagaaatatggtttgcgtcccgaacaatgggtggattttcgcgccttagcaggcgatccgagcgacaatattccgggagttaaaggtatcggcgagaagacggcgctcaagctccttaaagaatgggggtcgttggagaacttgcttaagaatttagatcaggtcaaaccagagtcagtgcgtgagaagattcttgctcacctcgaagacctcaaattaagccgcgaattgtcccgtgtacgcaccgatttgccgctcgaagttgatttcggtcgccgccgcgaacctgactgggagggtcttaaagcgtttttagagcgtcttgaatttggttcgctcttgcatgaattcggccttttagaaagcccgttactggccgaagaagcaccttggccaccgcccgagggcgcgtttttaggttaccgtttgagtcgcccggaaccgatgtgggccgaattactggctcttgcagcgtctgcccagggacgtgtgtatcgcgcggaagaccctcatggtgcgctccgcggcctcttcgaagtccgtggactccttgccaaagacttagctgttgttgcattgcgcgaaggtcttgatttacctccgactgatgatccaatgcttcttgcgtacctcttggacccgtcaaacacgacgcccgaaggcgtagcccgtcgttacggcggcgagtggaccgaagatgcagcgaaacgcgcgttattggccgaacgtttgcacgaaaatttattaggacgtttgcaaggcgaggaacgtctcctctggctttacgaagaagtggagaaaccattgagtcgcgtgctcgcgcatatggaagctaccggtgtcaaattagacgtggcgtatttggagaatctcagccttgaagttgctgcccacatgcgccgcttggaggaagaagtattccgtttagcaggccgttcctttcgccttaactctcgcgatcagttagaacgtgtgttgttcgatgaacttggtctccctttgatcggcaagacagagaagaccggtaaacgtagcacttcagcggcggttttagaagctcttcgcgaagtccatcccattgtggacaagatcttgcagtaccgcgaaatggcgaaattgaaaggcacctatattgaccgtcttccggcattagtccacccgaaaacgggacgcctccatacccgcttcaaccaaacagccacggcgaccggtcgtttgtcctcctctgatccaaaccttcagaatattccagtacgtaccccattgggccagaagatccgccgtgcgtttgtagctgaggagggttggcgtttagtggccctcgattatcgtcaaattgaattacgtgtccttgcccatctttctggcgatgagaacctcatccgcgtgtttcaggaaggcaaagacattcacactcaaacggcaagctggatgtttggattatcagctgaagcgatcgatcctttgatgcgtcgtgcagcgaagaccatcaatttcggtgttctctacggtatgagtgcctttcgtttgtcgcaggaattaggcattccctatgaagaagctcaggcgttcattcagaaatactttcaaagctatcccaaagttaaagcatggatcgagaagactctccgtgaaggccgcacacgtggttacgtagagaccttatttggacgtcgccgctatgttcccgatttaaacgctcgcgtgaaaggcaagcgtgaagccgccgaacgcatggcgttcaacatgcctgtacagggcacggcagctgacctcatgaaacttgcaatggtgcgcctttttccacaattgcgtgaagttggtgcccgcatgctcttgcaggtccacgatgaactcttgttagaagcgccaaaagagcgtgcggaagaggtggcagccctcgcgaaagaagttatggaaggcgtgtggcccttagcggtgcctcttgaagtcgaagttggtattggcgaggattggctggctgccaaagga

SEQ ID NO: 5562 - protein, 841 aa, synthetic construct
  REGION 1..841: note = Variant of DNA polymerase I from Thermus sp. strain 2.9
MHHHHHHGGSGVLPVFEPKGRVLLVDGHHLAYRNFFALKGLTTSLGEPVQGVYGFAKSLLKALKEDGDVVIVVFDAKAPSFRHEAYEAYKAGRAPTPEDFPRQLALMKELVDLLGLERLEVPGFEADDVLATLAKKAEREGYEVQILTADRDLFQLLSPRISVLHPEGHRITPEWLWEKYGLRPEQWVDFRALAGDPSDNIPGVKGIGEKTALKLLKEWGSLENLLKNLDQVKPESVREKILAHLEDLKLSRELSRVRTDLPLEVDFGRRREPDWEGLKAFLERLEFGSLLHEFGLLESPLLAEEAPWPPPEGAFLGYRLSRPEPMWAELLALAASAQGRVYRAEDPHGALRGLFEVRGLLAKDLAVVALREGLDLPPTDDPMLLAYLLDPSNTTPEGVARRYGGEWTEDAAKRALLAERLHENLLGRLQGEERLLWLYEEVEKPLSRVLAHMEATGVKLDVAYLENLSLEVAAHMRRLEEEVFRLAGRSFRLNSRDQLERVLFDELGLPLIGKTEKTGKRSTSAAVLEALREVHPIVDKILQYREMAKLKGTYIDRLPALVHPKTGRLHTRFNQTATATGRLSSSDPNLQNIPVRTPLGQKIRRAFVAEEGWRLVALDYRQIELRVLAHLSGDENLIRVFQEGKDIHTQTASWMFGLSAEAIDPLMRRAAKTINFGVLYGMSAFRLSQELGIPYEEAQAFIQKYFQSYPKVKAWIEKTLREGRTRGYVETLFGRRRYVPDLNARVKGKREAAERMAFNMPVQGTAADLMKLAMVRLFPQLREVGARMLLQVHDELLLEAPKERAEEVAALAKEVMEGVWPLAVPLEVEVGIGEDWLAAKG

SEQ ID NO: 5563 - DNA, 2523 bp, synthetic construct
  misc_feature 1..2523: note = Variant of DNA polymerase I from Thermus sp. strain 2.9
  source 1..2523: mol_type = other DNA
atgcaccatcatcatcatcatggcggtagcggcgtgttaccggtgttcgagcctaaaggtcgcgtgcttctggttgatggccatcatctcgcgtatcgtaacttctttgccctgaaaggattaaccaccagcctgggcgagccggtacagggtgtctacggctttgcaaagtcgctcctgaaagctctgaaagaagacggtgatgtggtgattgttgtctttgatgcgaaagcgccaagttttcgccacgaagcgtacgaagcttacaaagccgggcgtgctccaacgccggaagactttcctcgccaattggcgcttatgaaggaattagtggatttgcttggcctcgaacgcttggaagttcccggtttcgaggcagacgacgtattagcgactctcgcaaagaaagccgaacgtgagggctatgaagtccagatcttgacagcagatcgcgatcttttccagcttttatctccgcgcatctcggtgttacacccggaagggcatcgtatcaccccggaatggctctgggagaaatatggtttgcgtcccgaacaatgggtggattttcgcgccttagcaggcgatccgagcgacaatattccgggagttaaaggtatcggcgagaagacggcgctcaagctccttaaagaatgggggtcgttggagaacttgcttaagaatttagatcaggtcaaaccagagtcagtgcgtgagaagattcttgctcacctcgaagacctcaaattaagccgcgaattgtcccgtgtacgcaccgatttgccgctcgaagttgatttcggtcgccgccgcgaacctgactgggagggtcttaaagcgtttttagagcgtcttgaatttggttcgctcttgcatgaattcggccttttagaaagcccgttactggccgaagaagcaccttggccaccgcccgagggcgcgtttttaggttaccgtttgagtcgcccggaaccgatgtgggccgaattactggctcttgcagcgtctgcccagggacgtgtgtatcgcgcggaagaccctcatggtgcgctccgcggcctcttcgaagtccgtggcctccttgccaaagacttagctgttgttgcattgcgcgaaggtcttgatttacctccgactgatgatccaatgcttcttgcgtacctcttggacccgtcaaacacgacgcccgaaggcgtagcccgtcgttacggcggcgagtggaccgaagatgcaggcaaacgcgcgttattggccgaacgtttgcacgaaaatttattaggacgtttgcaaggcgaggcgcgtctcctgtggctttacgaagaagtggagaaaccattgagtcgcgtgctcgcgcatatggaagctaccggtgtcaaattagacgtggcgtatttggagaatctcagccttgaagttgctgcccacatgcgccgcttggaggaagaagtattccgtttagcaggccgttcctttcgccttaactctcgcgatcagttagaacgtgtgttgttcgatgaacttggtctccctcctatcggcaagacagagaagaccggtaaacgtagcacttcagcggcggttttagaagctcttcgcgaagtccatcccattgtggacaagatcttgcagtaccgcgaaatggcgaaattgaaaggcacctatattgaccgtcttccggcattagtccacccgaaaacgggacgcctccatacccgcttcaaccaaacagccacggcgaccggtcgtttgtcctcctctgatccaaaccttcagaatattccagtacgtacctttttgggccagaagatccgccgtgcgtttgtagctgagccgggttggcgtttagtggccctcgattatcgtcaaattgaattacgtgtccttgcccatctttctggcgatgagaacctcatccgcgtgtttcaggaaggcaaagacattcacactcaaacggcaagctggatgtttggattatcagctgaagcgatcgatcctttgatgcgtcgtgcagcgaagaccatcaatttcggtgttctctacggtatgagtgcctttcgtttgtcgcaggaattaggcattccctatgaagaagctcaggctttcattcagaaatactttcaaagctatcccaaagttaaagcatggatcgagaagactctccgtgaaggccgcacacgtggttacgtagagaccttatttggacgtcgccgctatgttcccgatttaaacggtcgcgtgaaaggcaagcgtgaagccgccgaacgcatggcgttcaacatgcctgtacagggcacggcagctgacctcatgaaacttgcaatggtgcgcctttttccacaattgcgtgaagttggtgcccgcatgctgttgcaggtccacgatgaactcttgttagaagcgccaaaagagcgtgcggaagaggtggcagccctcgcgaaagaagttatggaaggcgtgtggcccttagcggtgcctcttgaagtcgaagttggtattggcgaggattggctggctgccaaagga

SEQ ID NO: 5564 - protein, 841 aa, synthetic construct
  REGION 1..841: note = Variant of DNA polymerase I from Thermus sp. strain 2.9
MHHHHHHGGSGVLPVFEPKGRVLLVDGHHLAYRNFFALKGLTTSLGEPVQGVYGFAKSLLKALKEDGDVVIVVFDAKAPSFRHEAYEAYKAGRAPTPEDFPRQLALMKELVDLLGLERLEVPGFEADDVLATLAKKAEREGYEVQILTADRDLFQLLSPRISVLHPEGHRITPEWLWEKYGLRPEQWVDFRALAGDPSDNIPGVKGIGEKTALKLLKEWGSLENLLKNLDQVKPESVREKILAHLEDLKLSRELSRVRTDLPLEVDFGRRREPDWEGLKAFLERLEFGSLLHEFGLLESPLLAEEAPWPPPEGAFLGYRLSRPEPMWAELLALAASAQGRVYRAEDPHGALRGLFEVRGLLAKDLAVVALREGLDLPPTDDPMLLAYLLDPSNTTPEGVARRYGGEWTEDAGKRALLAERLHENLLGRLQGEARLLWLYEEVEKPLSRVLAHMEATGVKLDVAYLENLSLEVAAHMRRLEEEVFRLAGRSFRLNSRDQLERVLFDELGLPPIGKTEKTGKRSTSAAVLEALREVHPIVDKILQYREMAKLKGTYIDRLPALVHPKTGRLHTRFNQTATATGRLSSSDPNLQNIPVRTFLGQKIRRAFVAEPGWRLVALDYRQIELRVLAHLSGDENLIRVFQEGKDIHTQTASWMFGLSAEAIDPLMRRAAKTINFGVLYGMSAFRLSQELGIPYEEAQAFIQKYFQSYPKVKAWIEKTLREGRTRGYVETLFGRRRYVPDLNGRVKGKREAAERMAFNMPVQGTAADLMKLAMVRLFPQLREVGARMLLQVHDELLLEAPKERAEEVAALAKEVMEGVWPLAVPLEVEVGIGEDWLAAKG

SEQ ID NO: 5565 - DNA, 2523 bp, synthetic construct
  misc_feature 1..2523: note = Variant of DNA polymerase I from Thermus sp. strain 2.9
  source 1..2523: mol_type = other DNA
atgcaccatcatcatcatcatggcggtagcggcgtgttaccggtgttcgagcctaaaggtcgcgtgcttctggttgatggccatcatctcgcgtatcgtaacttctttgccctgaaaggattaaccaccagcctgggcgagccggtacagggtgtctacggctttgcaaagtcgctcctgaaagctctgaaagaagacggtgatgtggtgattgttgtctttgatgcgaaagcgccaagttttcgccacgaagcgtacgaagcttacaaagccgggcgtgctccaacgccggaagactttcctcgccaattggcgcttatgaaggaattagtggatttgcttggcctcgaacgcttggaagttcccggtttcgaggcagacgacgtattagcgactctcgcaaagaaagccgaacgtgagggctatgaagtccagatcttgacagcagatcgcgatcttttccagcttttatctccgcgcatctcggtgttacacccggaagggcatcgtatcaccccggaatggctctgggagaaatatggtttgcgtcccgaacaatgggtggattttcgcgccttagcaggcgatccgagcgacaatattccgggagttaaaggtatcggcgagaagacggcgctcaagctccttaaagaatgggggtcgttggagaacttgcttaagaatttagatcaggtcaaaccagagtcagtgcgtgagaagattcttgctcacctcgaagacctcaaattaagccgcgaattgtcccgtgtacgcaccgatttgccgctcgaagttgatttcggtcgccgccgcgaacctgactgggagggtcttaaagcgtttttagagcgtcttgaatttggttcgctcttgcatgaattcggccttttagaaagcccgttactggccgaagaagcaccttggccaccgcccgagggcgcgtttttaggttaccgtttgagtcgcccggaaccgatgtgggccgaattactggctcttgcagcgtctgcccagggacgtgtgtatcgcgcggaagaccctcatggtgcgctccgcggcctcttcgaagtccgtggcctccttgccaaagacttagctgttgttgcattgcgcgaaggtcttgatttacctccgactgatgatccaatgcttcttgcgtacctcttggacccgtcaaacacgacgcccgaaggcgtagcccgtcgttacggcggcgagtggaccgaagatgcagccaaacgcgcgttattggccgaacgtttgcacgaaaatttattaggacgtttgcaaggcgaggagcgtctccgttggctttacgaagaagtggagaaaccattgagtcgcgtgctcgcgcatatggaagctaccggtgtcaaattagacgtggcgtatttggagaatctcagccttgaagttgctgcccacatgcgccgcttggaggaagaagtattccgtttagcaggccgttcctttcgccttaactctcgcgatcagttagaacgtgtgttgttcgatgaacttggtctccctcctatcggcaagacagagaagaccggtaaacgtagcacttcagcggcggttttagaagctcttcgcgaagtccatcccattgtggacaagatcttgcagtaccgcgaaatggcgaaattgaaaggcacctatattgaccgtcttccggcattagtccacccgaaaacgggacgcctccatacccgcttcaaccaaacagccacggcgaccggtcgtttgtcctcctctgatccaaaccttcagaatattccagtacgtaccccattgggccagaagatccgccgtgcgtttgtagctgagaagggttgggcgttagtggccctcgattatcgtcaaattgaattacgtgtccttgcccatctttctggcgatgagaacctcatccgcgtgtttcaggaaggcaaagacattcacactcaaacggcaagctggatgtttggattatcagctgaagcgatcgatcctttgatgcgtcgtgcagcgaagaccatcaatttcggtgttctctacggtatgagtgcctttcgtttgtcgcaggaattaggcattccctatgaagaagctcaggcgttcattcagaaatactttcaaagctatcccaaagttaaagcatggatcgagaagactctccgtgaaggccgcacacgtggttacgtagagaccttatttggacgtcgccgctatgttcccgatttaaacgctcgcgtgaaaggcaagcgtgaagccgccgaacgcatggcgttcaacatgcctgtacagggcacggcagctgacctcatgaaacttgcaatggtgcgcctttttccacaattgcgtgaagttggtgcccgcatgctgttgcaggtccacgatgaactcttgttagaagcgccaaaagagcgtgcggaagaggtggcagccctcgcgaaagaagttatggaaggcgtgtggcccttagcggtgcctcttgaagtcgaagttggtattggcgaggattggctggctgccaaagga

SEQ ID NO: 5566 - protein, 841 aa, synthetic construct
  REGION 1..841: note = Variant of DNA polymerase I from Thermus sp. strain 2.9
MHHHHHHGGSGVLPVFEPKGRVLLVDGHHLAYRNFFALKGLTTSLGEPVQGVYGFAKSLLKALKEDGDVVIVVFDAKAPSFRHEAYEAYKAGRAPTPEDFPRQLALMKELVDLLGLERLEVPGFEADDVLATLAKKAEREGYEVQILTADRDLFQLLSPRISVLHPEGHRITPEWLWEKYGLRPEQWVDFRALAGDPSDNIPGVKGIGEKTALKLLKEWGSLENLLKNLDQVKPESVREKILAHLEDLKLSRELSRVRTDLPLEVDFGRRREPDWEGLKAFLERLEFGSLLHEFGLLESPLLAEEAPWPPPEGAFLGYRLSRPEPMWAELLALAASAQGRVYRAEDPHGALRGLFEVRGLLAKDLAVVALREGLDLPPTDDPMLLAYLLDPSNTTPEGVARRYGGEWTEDAAKRALLAERLHENLLGRLQGEERLRWLYEEVEKPLSRVLAHMEATGVKLDVAYLENLSLEVAAHMRRLEEEVFRLAGRSFRLNSRDQLERVLFDELGLPPIGKTEKTGKRSTSAAVLEALREVHPIVDKILQYREMAKLKGTYIDRLPALVHPKTGRLHTRFNQTATATGRLSSSDPNLQNIPVRTPLGQKIRRAFVAEKGWALVALDYRQIELRVLAHLSGDENLIRVFQEGKDIHTQTASWMFGLSAEAIDPLMRRAAKTINFGVLYGMSAFRLSQELGIPYEEAQAFIQKYFQSYPKVKAWIEKTLREGRTRGYVETLFGRRRYVPDLNARVKGKREAAERMAFNMPVQGTAADLMKLAMVRLFPQLREVGARMLLQVHDELLLEAPKERAEEVAALAKEVMEGVWPLAVPLEVEVGIGEDWLAAKG

SEQ ID NO: 5567 - DNA, 2523 bp, synthetic construct
  misc_feature 1..2523: note = Variant of DNA polymerase I from Thermus sp. strain 2.9
  source 1..2523: mol_type = other DNA
atgcaccatcatcatcatcatggcggtagcggcgtgttaccggtgttcgagcctaaaggtcgcgtgcttctggttgatggccatcatctcgcgtatcgtaacttctttgccctgaaaggattaaccaccagcctgggcgagccggtacagggtgtctacggctttgcaaagtcgctcctgaaagctctgaaagaagacggtgatgtggtgattgttgtctttgatgcgaaagcgccaagttttcgccacgaagcgtacgaagcttacaaagccgggcgtgctccaacgccggaagactttcctcgccaattggcgcttatgaaggaattagtggatttgcttggcctcgaacgcttggaagttcccggtttcgaggcagacgacgtattagcgactctcgcaaagaaagccgaacgtgagggctatgaagtccagatcttgacagcagatcgcgatcttttccagcttttatctccgcgcatctcggtgttacacccggaagggcatcgtatcaccccggaatggctctgggagaaatatggtttgcgtcccgaacaatgggtggattttcgcgccttagcaggcgatccgagcgacaatattccgggagttaaaggtatcggcgagaagacggcgctcaagctccttaaagaatgggggtcgttggagaacttgcttaagaatttagatcaggtcaaaccagagtcagtgcgtgagaagattcttgctcacctcgaagacctcaaattaagccgcgaattgtcccgtgtacgcaccgatttgccgctcgaagttgatttcggtcgccgccgcgaacctgactgggagggtcttaaagcgtttttagagcgtcttgaatttggttcgctcttgcatgaattcggccttttagaaagcccgttactggccgaagaagcaccttggccaccgcccgagggcgcgtttttaggttaccgtttgagtcgcccggaaccgatgtgggccgaattactggctcttgcagcgtctgcccagggacgtgtgtatcgccctgaagaccctcatggtgcgctccgcggcctcttcgaagtccgtggactccttgccaaagacttagctgttgttgcattgcgcgaaggtcttgatttacctccgactgatgatccaatgcttcttgcgtacctcttggacccgtcaaacacgacgcccgaaggcgtagcccgtcgttacggcggcgagtggaccgaagatgcagcgaaacgcgcgttattggccgaacgtttgcacgaaaatttattaggacgtttgcaaggcgaggaacgtctcctctggctttacgaagaagtggagaaaccattgagtcgcgtgctcgcgcatatggaagctaccggtgtcaaattagacgtggcgtatttggagaatctcagccttgaagttgctgcccacatgcgccgcttggaggaagaagtattccgtttagcaggccgttcctttcgccttaactctcgcgatcagttagaacgtgtgttgttcgatgaacttggtctccctcctatcggcaagacagagaagaccggtaaacgtagcacttcagcggcggttttagaagctcttcgcgaagtccatcccattgtggacaagatcttgcagtaccgcgaaatggcgaaattgaaaggcacctatattgaccgtcttccggcattagtccacccgaaaacgggacgcctccatacccgcttcaaccaaacagccacggcgaccggtcgtttgtcctcctctgatccaaaccttcagaatattccagtacgtaccccattgggccagaagatccgccgtgcgtttgtagctgaggagggttggcgtttagtggccctcgattatcgtcaaattgaattacgtgtccttgcccatctttctggcgatgagaacctcatccgcgtgtttcaggaaggcaaagacattcacactcaaacggcaagctggatgtttggattatcagctgaagcgatcgatcctttgatgcgtcgtgcagcgaagaccatcaatttcggtgttctctacggtatgagtgcctttcgtttgtcgcaggaattaggcattccctatgaagaagctcaggcgttcattcagaaatactttcaaagctatcccaaagttaaagcatggatcgagaagactctccgtgaaggccgcacacgtggttacgtagagaccttatttggacgtcgccgctatgttcccgatttaaacgctcgcgtgaaaggcaagcgtgaagccgccgaacgcatggcgttcaacatgcctgtacagggcacggcagctgacctcatgaaacttgcaatggtgcgcctttttccacaattgcgtgaagttggtgcccgcatgctcttgcaggtccacgatgaactcttgttagaagcgccaaaagagcgtgcggaagaggtggcagccctcgcgaaagaagttatggaaggcgtgtggcccttagcggtgcctcttgaagtcgaagttggtattggcgaggattggctggctgccaaagga

SEQ ID NO: 5568 - protein, 841 aa, synthetic construct
  REGION 1..841: note = Variant of DNA polymerase I from Thermus sp. strain 2.9
MHHHHHHGGSGVLPVFEPKGRVLLVDGHHLAYRNFFALKGLTTSLGEPVQGVYGFAKSLLKALKEDGDVVIVVFDAKAPSFRHEAYEAYKAGRAPTPEDFPRQLALMKELVDLLGLERLEVPGFEADDVLATLAKKAEREGYEVQILTADRDLFQLLSPRISVLHPEGHRITPEWLWEKYGLRPEQWVDFRALAGDPSDNIPGVKGIGEKTALKLLKEWGSLENLLKNLDQVKPESVREKILAHLEDLKLSRELSRVRTDLPLEVDFGRRREPDWEGLKAFLERLEFGSLLHEFGLLESPLLAEEAPWPPPEGAFLGYRLSRPEPMWAELLALAASAQGRVYRPEDPHGALRGLFEVRGLLAKDLAVVALREGLDLPPTDDPMLLAYLLDPSNTTPEGVARRYGGEWTEDAAKRALLAERLHENLLGRLQGEERLLWLYEEVEKPLSRVLAHMEATGVKLDVAYLENLSLEVAAHMRRLEEEVFRLAGRSFRLNSRDQLERVLFDELGLPPIGKTEKTGKRSTSAAVLEALREVHPIVDKILQYREMAKLKGTYIDRLPALVHPKTGRLHTRFNQTATATGRLSSSDPNLQNIPVRTPLGQKIRRAFVAEEGWRLVALDYRQIELRVLAHLSGDENLIRVFQEGKDIHTQTASWMFGLSAEAIDPLMRRAAKTINFGVLYGMSAFRLSQELGIPYEEAQAFIQKYFQSYPKVKAWIEKTLREGRTRGYVETLFGRRRYVPDLNARVKGKREAAERMAFNMPVQGTAADLMKLAMVRLFPQLREVGARMLLQVHDELLLEAPKERAEEVAALAKEVMEGVWPLAVPLEVEVGIGEDWLAAKG

SEQ ID NO: 5569 - DNA, 2523 bp, synthetic construct
  misc_feature 1..2523: note = Variant of DNA polymerase I from Thermus sp. strain 2.9
  source 1..2523: mol_type = other DNA
atgcaccatcatcatcatcatggcggtagcggcgtgttaccggtgttcgagcctaaaggtcgcgtgcttctggttgatggccatcatctcgcgtatcgtaacttctttgccctgaaaggattaaccaccagcctgggcgagccggtacagggtgtctacggctttgcaaagtcgctcctgaaagctctgaaagaagacggtgatgtggtgattgttgtctttgatgcgaaagcgccaagttttcgccacgaagcgtacgaagcttacaaagccgggcgtgctccaacgccggaagactttcctcgccaattggcgcttatgaaggaattagtggatttgcttggcctcgaacgcttggaagttcccggtttcgaggcagacgacgtattagcgactctcgcaaagaaagccgaacgtgagggctatgaagtccagatcttgacagcagatcgcgatcttttccagcttttatctccgcgcatctcggtgttacacccggaagggcatcgtatcaccccggaatggctctgggagaaatatggtttgcgtcccgaacaatgggtggattttcgcgccttagcaggcgatccgagcgacaatattccgggagttaaaggtatcggcgagaagacggcgctcaagctccttaaagaatgggggtcgttggagaacttgcttaagaatttagatcaggtcaaaccagagtcagtgcgtgagaagattcttgctcacctcgaagacctcaaattaagccgcgaattgtcccgtgtacgcaccgatttgccgctcgaagttgatttcggtcgccgccgcgaacctgactgggagggtcttaaagcgtttttagagcgtcttgaatttggttcgctcttgcatgaattcggccttttagaaagcccgttactggccgaagaagcaccttggccaccgcccgagggcgcgtttttaggttaccgtttgagtcgcccggaaccgatgtgggccgaattactggctcttgcagcgtctgcccagggacgtgtgtatcgcgcggaagaccctcatggtgcgctccgcggcctcttcgaagtccgtggactccttgccaaagacttagctgttgttgcattgcgcgaaggtcttgatttacctccgactgatgatccaatgcttcttgcgtacctcttggacccgtcaaacacgacgcccgaaggcgtagcccgtcgttacggcggcgagtggaccgaagatgcagcgaaacgcgcgttattggccgaacgtttgcacgaaaatttattaggacgtttgcaaggcgaggaacgtctcctctggctttacgaagaagtggagaaaccattgagtcgcgtgctcgcgcatatggaagctaccggtgtcaaattagacgtggcgtatttggagaatctcagccttgaagttgctgcccacatgcgccgcttggaggaagaagtattccgtttagcaggccgttcctttcgccttaactctcgcgatcagttagaacgtgtgttgttcgatgaacttggtctccctcctatcggcaagacagagaagaccggtaaacgtagcacttcagcggcggttttagaagctcttcgcgaagtccatcccattgtggacaagatcttgcagtaccgcgaaatggcgaaattgaaaggcacctatattgaccgtcttccggcattagtccacccgaaaacgggacgcctccatacccgcttcaaccaaacagccacggcgaccggtcgtttgtcctcctctgatccaaaccttcagaatattccagtacgtaccccattgggccagaagatccgccgtgcgtttgtagctgaggagggttggcgtttagtggccctcgattatcgtcaaattgaattacgtgtccttgcccatctttctggcgatgagaacctcatccgcgtgtttcaggaaggcaaagacattcacactcaaacggcaagctggatgtttggattatcagctgaagcgatcgatcctttgatgcgtcgtgcagcgaagaccatcaatttcggtgttctctacggtatgagtgcctttcgtttgtcgcaggaattaggcattccctatgaagaagctcaggcgttcattcagaaatactttcaaagctatcccaaagttaaagcatggatcgagaagactctccgtgaaggccgcacacgtggttacgtagagaccttatttggacgtcgccgctatgttcccgatttaaacgctcgcgtgaaaggcaagcgtgaagccgccgaacgcatggcgttcaacatgcctgtacagggcacggcagctgacctcatgaaacttgcaatggtgcgcctttttccacaattgcgtgaagttggtgcccgcatgctcttgcaggtccacgatgaactcttgttagaagcgccaaaagagcgtgcggaagaggtggcagccctcgcgaaagaagttatggaaggcgtgtggcccttagcggtgcctcttgaagtcgaagttggtattggcgaggattggctggctccgaaagga

SEQ ID NO: 5570 - protein, 841 aa, synthetic construct
  REGION 1..841: note = Variant of DNA polymerase I from Thermus sp. strain 2.9
MHHHHHHGGSGVLPVFEPKGRVLLVDGHHLAYRNFFALKGLTTSLGEPVQGVYGFAKSLLKALKEDGDVVIVVFDAKAPSFRHEAYEAYKAGRAPTPEDFPRQLALMKELVDLLGLERLEVPGFEADDVLATLAKKAEREGYEVQILTADRDLFQLLSPRISVLHPEGHRITPEWLWEKYGLRPEQWVDFRALAGDPSDNIPGVKGIGEKTALKLLKEWGSLENLLKNLDQVKPESVREKILAHLEDLKLSRELSRVRTDLPLEVDFGRRREPDWEGLKAFLERLEFGSLLHEFGLLESPLLAEEAPWPPPEGAFLGYRLSRPEPMWAELLALAASAQGRVYRAEDPHGALRGLFEVRGLLAKDLAVVALREGLDLPPTDDPMLLAYLLDPSNTTPEGVARRYGGEWTEDAAKRALLAERLHENLLGRLQGEERLLWLYEEVEKPLSRVLAHMEATGVKLDVAYLENLSLEVAAHMRRLEEEVFRLAGRSFRLNSRDQLERVLFDELGLPPIGKTEKTGKRSTSAAVLEALREVHPIVDKILQYREMAKLKGTYIDRLPALVHPKTGRLHTRFNQTATATGRLSSSDPNLQNIPVRTPLGQKIRRAFVAEEGWRLVALDYRQIELRVLAHLSGDENLIRVFQEGKDIHTQTASWMFGLSAEAIDPLMRRAAKTINFGVLYGMSAFRLSQELGIPYEEAQAFIQKYFQSYPKVKAWIEKTLREGRTRGYVETLFGRRRYVPDLNARVKGKREAAERMAFNMPVQGTAADLMKLAMVRLFPQLREVGARMLLQVHDELLLEAPKERAEEVAALAKEVMEGVWPLAVPLEVEVGIGEDWLAPKG

SEQ ID NO: 5571 - DNA, 2523 bp, synthetic construct
  misc_feature 1..2523: note = Variant of DNA polymerase I from Thermus sp. strain 2.9
  source 1..2523: mol_type = other DNA
atgcaccatcatcatcatcatggcggtagcggcgtgttaccggtgttcgagcctaaaggtcgcgtgcttctggttgatggccatcatctcgcgtatcgtaacttctttgccctgaaaggattaaccaccagcctgggcgagccggtacagggtgtctacggctttgcaaagtcgctcctgaaagctctgaaagaagacggtgatgtggtgattgttgtctttgatgcgaaagcgccaagttttcgccacgaagcgtacgaagcttacaaagccgggcgtgctccaacgccggaagactttcctcgccaattggcgcttatgaaggaattagtggatttgcttggcctcgaacgcttggaagttcccggtttcgaggcagacgacgtattagcgactctcgcaaagaaagccgaacgtgagggctatgaagtccagatcttgacagcagatcgcgatcttttccagcttttatctccgcgcatctcggtgttacacccggaagggcatcgtatcaccccggaatggctctgggagaaatatggtttgcgtcccgaacaatgggtggattttcgcgccttagcaggcgatccgagcgacaatattccgggagttaaaggtatcggcgagaagacggcgctcaagctccttaaagaatgggggtcgttggagaacttgcttaagaatttagatcaggtcaaaccagagtcagtgcgtgagaagattcttgctcacctcgaagacctcaaattaagccgcgaattgtcccgtgtacgcaccgatttgccgctcgaagttgatttcggtcgccgccgcgaacctgactgggagggtcttaaagcgtttttagagcgtcttgaatttggttcgctcttgcatgaattcggccttttagaaagcccgttactggccgaagaagcaccttggccaccgcccgagggcgcgtttttaggttaccgtttgagtcgcccggaaccgatgtgggccgaattactggctcttgcagcgtctgcccagggacgtgtgtatcgcgcggaagaccctcatggtgcgctccgcggcctcttcgaagtccgtggactccttgccaaagacttagctgttgttgcattgcgcgaaggtcttgatttacctccgactgatgatccaatgcttcttgcgtacctcttggacccgtcaaacacgacgcccgaaggcgtagcccgtcgttacggcggcgagtggaccgaagatgcagcgaaacgcgcgttattggccgaacgtttgcacgaaaatttattaggacgtttgcaaggcgaggaacgtctcctctggctttacgaagaagtggagaaaccattgagtcgcgtgctcgcgcatatggaagctaccggtgtcaaattagacgtggcgtatttggagaatctcagccttgaagttgctgcccacatgcgccgcttggaggaagaagtattccgtttagcaggccgttcctttcgccttaactctcgcgatcagttagaacgtgtgttgttcgatgaacttggtctccctcctatcggcaagacagagaagaccggtaaacgtagcacttcagcggcggttttagaagctcttcgcgaagtccatcccattgtggacaagatcttgcagtaccgcgaaatggcgaaattgaaaggcacctatattgaccgtcttccggcattagtccacccgaaaacgggacgcctccatacccgcttcaaccaaacagccacggcgaccggtcgtttgtcctcctctgatccaaaccttcagaatattccagtacgtacccggttgggccagaagatccgccgtgcgtttgtagctgaggagggttggcgtttagtggccctcgattatcgtcaaattgaattacgtgtccttgcccatctttctggcgatgagaacctcatccgcgtgtttcaggaaggcaaagacattcacactcaaacggcaagctggatgtttggattatcagctgaagcgatcgatcctttgatgcgtcgtgcagcgaagaccatcaatttcggtgttctctacggtatgagtgcctttcgtttgtcgcaggaattaggcattccctatgaagaagctcaggcgttcattcagaaatactttcaaagctatcccaaagttaaagcatggatcgagaagactctccgtgaaggccgcacacgtggttacgtagagaccttatttggacgtcgccgctatgttcccgatttaaacgctcgcgtgaaaggcaagcgtgaagccgccgaacgcatggcgttcaacatgcctgtacagggcacggcagctgacctcatgaaacttgcaatggtgcgcctttttccacaattgcgtgaagttggtgcccgcatgctcttgcaggtccacgatgaactcttgttagaagcgccaaaagagcgtgcggaagaggtggcagccctcgcgaaagaagttatggaaggcgtgtggcccttagcggtgcctcttgaagtcgaagttggtattggcgaggattggctggctgccaaagga

SEQ ID NO: 5572 - protein, 841 aa, synthetic construct
  REGION 1..841: note = Variant of DNA polymerase I from Thermus sp. strain 2.9
MHHHHHHGGSGVLPVFEPKGRVLLVDGHHLAYRNFFALKGLTTSLGEPVQGVYGFAKSLLKALKEDGDVVIVVFDAKAPSFRHEAYEAYKAGRAPTPEDFPRQLALMKELVDLLGLERLEVPGFEADDVLATLAKKAEREGYEVQILTADRDLFQLLSPRISVLHPEGHRITPEWLWEKYGLRPEQWVDFRALAGDPSDNIPGVKGIGEKTALKLLKEWGSLENLLKNLDQVKPESVREKILAHLEDLKLSRELSRVRTDLPLEVDFGRRREPDWEGLKAFLERLEFGSLLHEFGLLESPLLAEEAPWPPPEGAFLGYRLSRPEPMWAELLALAASAQGRVYRAEDPHGALRGLFEVRGLLAKDLAVVALREGLDLPPTDDPMLLAYLLDPSNTTPEGVARRYGGEWTEDAAKRALLAERLHENLLGRLQGEERLLWLYEEVEKPLSRVLAHMEATGVKLDVAYLENLSLEVAAHMRRLEEEVFRLAGRSFRLNSRDQLERVLFDELGLPPIGKTEKTGKRSTSAAVLEALREVHPIVDKILQYREMAKLKGTYIDRLPALVHPKTGRLHTRFNQTATATGRLSSSDPNLQNIPVRTRLGQKIRRAFVAEEGWRLVALDYRQIELRVLAHLSGDENLIRVFQEGKDIHTQTASWMFGLSAEAIDPLMRRAAKTINFGVLYGMSAFRLSQELGIPYEEAQAFIQKYFQSYPKVKAWIEKTLREGRTRGYVETLFGRRRYVPDLNARVKGKREAAERMAFNMPVQGTAADLMKLAMVRLFPQLREVGARMLLQVHDELLLEAPKERAEEVAALAKEVMEGVWPLAVPLEVEVGIGEDWLAAKG

SEQ ID NO: 5573 - DNA, 2523 bp, synthetic construct
  misc_feature 1..2523: note = Variant of DNA polymerase I from Thermus sp. strain 2.9
  source 1..2523: mol_type = other DNA
atgcaccatcatcatcatcatggcggtagcggcgtgttaccggtgttcgagcctaaaggtcgcgtgcttctggttgatggccatcatctcgcgtatcgtaacttctttgccctgaaaggattaaccaccagcctgggcgagccggtacagggtgtctacggctttgcaaagtcgctcctgaaagctctgaaagaagacggtgatgtggtgattgttgtctttgatgcgaaagcgccaagttttcgccacgaagcgtacgaagcttacaaagccgggcgtgctccaacgccggaagactttcctcgccaattggcgcttatgaaggaattagtggatttgcttggcctcgaacgcttggaagttcccggtttcgaggcagacgacgtattagcgactctcgcaaagaaagccgaacgtgagggctatgaagtccagatcttgacagcagatcgcgatcttttccagcttttatctccgcgcatctcggtgttacacccggaagggcatcgtatcaccccggaatggctctgggagaaatatggtttgcgtcccgaacaatgggtggattttcgcgccttagcaggcgatccgagcgacaatattccgggagttaaaggtatcggcgagaagacggcgctcaagctccttaaagaatgggggtcgttggagaacttgcttaagaatttagatcaggtcaaaccagagtcagtgcgtgagaagattcttgctcacctcgaagacctcaaattaagccgcgaattgtcccgtgtacgcaccgatttgccgctcgaagttgatttcggtcgccgccgcgaacctgactgggagggtcttaaagcgtttttagagcgtcttgaatttggttcgctcttgcatgaattcggccttttagaaagcccgttactggccgaagaagcaccttggccaccgcccgagggcgcgtttttaggttaccgtttgagtcgcccggaaccgatgtgggccgaattactggctcttgcagcgtctgcccagggacgtgtgtatcgcgcggaagaccctcatggtgcgctccgcggcctcttcgaagtccgtggactccttgccaaagacttagctgttgttgcattgcgcgaaggtcttgatttacctccgactgatgatccaatgcttcttgcgtacctcttggacccgtcaaacacgacgcccgaaggcgtagcccgtcgttacggcggcgagtggaccgaagatgcagcgaaacgcgcgttattggccgaacgtttgcacgaaaatttattaggacgtttgcaaggcgaggaacgtctcctctggctttacgaagaagtggagaaaccattgagtcgcgtgctcgcgcatatggaagctaccggtgtcaaattagacgtggcgtatttggagaatctcagccttgaagttgctgcccacatgcgccgcttggaggaagaagtattccgtttagcaggccgttcctttcgccttaactctcgcgatcagttagaacgtgtgttgttcgatgaacttggtctccctcctatcggcaagacagagaagaccggtaaacgtagcacttcagcggcggttttagaagctcttcgcgaagtccatcccattgtggacaagatcttgcagtaccgcgaaatggcgaaattgaaaggcacctatattgaccgtcttccggcattagtccacccgaaaacgggacgcctccatacccgcttcaaccaaacagccacggcgaccggtcgtttgtcctcctctgatccaaaccttcagaatattccagtacgtaccccattgggccagaagatccgccgtgcgtttgtagctgaggagggttggcgtttagtggccctcgattatcgtcaaattgaattacgtgtccttgcccatctttctggcgatgagaacctcatccgcgtgtttcaggaaggcaaagacattcacactcaaacggcaagctggatgtttggattatcagctgaagcgatcgatcctttgatgcgtcgtgcagcgaagaccatcaatttcggtgttctctacggtatgagtgcctttcgtttgtcgcaggaattaggcattccctatgaagaagctcaggcgttcattcagaaatactttcaaagctatcccaaagttaaagtgtggatcgagaagactctccgtgaaggccgcacacgtggttacgtagagaccttatttggacgtcgccgctatgttcccgatttaaacgctcgcgtgaaaggcaagcgtgaagccgccgaacgcatggcgttcaacatgcctgtacagggcacggcagctgacctcatgaaacttgcaatggtgcgcctttttccacaattgcgtgaagttggtgcccgcatgctcttgcaggtccacgatgaactcttgttagaagcgccaaaagagcgtgcggaagaggtggcagccctcgcgaaagaagttatggaaggcgtgtggcccttagcggtgcctcttgaagtcgaagttggtattggcgaggattggctggctgccaaagga

SEQ ID NO: 5574 - protein, 841 aa, synthetic construct
  REGION 1..841: note = Variant of DNA polymerase I from Thermus sp. strain 2.9
MHHHHHHGGSGVLPVFEPKGRVLLVDGHHLAYRNFFALKGLTTSLGEPVQGVYGFAKSLLKALKEDGDVVIVVFDAKAPSFRHEAYEAYKAGRAPTPEDFPRQLALMKELVDLLGLERLEVPGFEADDVLATLAKKAEREGYEVQILTADRDLFQLLSPRISVLHPEGHRITPEWLWEKYGLRPEQWVDFRALAGDPSDNIPGVKGIGEKTALKLLKEWGSLENLLKNLDQVKPESVREKILAHLEDLKLSRELSRVRTDLPLEVDFGRRREPDWEGLKAFLERLEFGSLLHEFGLLESPLLAEEAPWPPPEGAFLGYRLSRPEPMWAELLALAASAQGRVYRAEDPHGALRGLFEVRGLLAKDLAVVALREGLDLPPTDDPMLLAYLLDPSNTTPEGVARRYGGEWTEDAAKRALLAERLHENLLGRLQGEERLLWLYEEVEKPLSRVLAHMEATGVKLDVAYLENLSLEVAAHMRRLEEEVFRLAGRSFRLNSRDQLERVLFDELGLPPIGKTEKTGKRSTSAAVLEALREVHPIVDKILQYREMAKLKGTYIDRLPALVHPKTGRLHTRFNQTATATGRLSSSDPNLQNIPVRTPLGQKIRRAFVAEEGWRLVALDYRQIELRVLAHLSGDENLIRVFQEGKDIHTQTASWMFGLSAEAIDPLMRRAAKTINFGVLYGMSAFRLSQELGIPYEEAQAFIQKYFQSYPKVKVWIEKTLREGRTRGYVETLFGRRRYVPDLNARVKGKREAAERMAFNMPVQGTAADLMKLAMVRLFPQLREVGARMLLQVHDELLLEAPKERAEEVAALAKEVMEGVWPLAVPLEVEVGIGEDWLAAKG

SEQ ID NO: 5575 - DNA, 2523 bp, synthetic construct
  misc_feature 1..2523: note = Variant of DNA polymerase I from Thermus sp. strain 2.9
  source 1..2523: mol_type = other DNA
atgcaccatcatcatcatcatggcggtagcggcgtgttaccggtgttcgagcctaaaggtcgcgtgcttctggttgatggccatcatctcgcgtatcgtaacttctttgccctgaaaggattaaccaccagcctgggcgagccggtacagggtgtctacggctttgcaaagtcgctcctgaaagctctgaaagaagacggtgatgtggtgattgttgtctttgatgcgaaagcgccaagttttcgccacgaagcgtacgaagcttacaaagccgggcgtgctccaacgccggaagactttcctcgccaattggcgcttatgaaggaattagtggatttgcttggcctcgaacgcttggaagttcccggtttcgaggcagacgacgtattagcgactctcgcaaagaaagccgaacgtgagggctatgaagtccagatcttgacagcagatcgcgatcttttccagcttttatctccgcgcatctcggtgttacacccggaagggcatcgtatcaccccggaatggctctgggagaaatatggtttgcgtcccgaacaatgggtggattttcgcgccttagcaggcgatccgagcgacaatattccgggagttaaaggtatcggcgagaagacggcgctcaagctccttaaagaatgggggtcgttggagaacttgcttaagaatttagatcaggtcaaaccagagtcagtgcgtgagaagattcttgctcacctcgaagacctcaaattaagccgcgaattgtcccgtgtacgcaccgatttgccgctcgaagttgatttccgccgccgccgcgaacctgactgggagggtcttaaagcgtttttagagcgtcttgaatttggttcgctcttgcatgaattcggccttttagaaagcccgttactggccgaagaagcaccttggccaccgcccgagggcgcgtttttaggttaccgtttgagtcgcccggaaccgatgtgggccgaattactggctcttgcagcgtctgcccagggacgtgtgtatcgcgcggaagaccctcatggtgcgctccgcggcctcttcgaagtccgtggactccttgccaaagacttagctgttgttgcattgcgcgaaggtcttgatttacctccgactgatgatccaatgcttcttgcgtacctcttggacccgtcaaacacgacgcccgaaggcgtagcccgtcgttacggcggcgagtggaccgaagatgcagcgaaacgcgcgttattggccgaacgtttgcacgaaaatttattaggacgtttgcaaggcgaggaacgtctcctctggctttacgaagaagtggagaaaccattgagtcgcgtgctcgcgcatatggaagctaccggtgtcaaattagacgtggcgtatttggaggcccttagccttgaagttgctgcccacatgcgccgcttggaggaagaagtattccgtttagcaggccgctcctttcgccttaactctcgcgatcagttagaacgtgtgttgttcgatgaacttggtctccctcctatcggcaagacagagaagaccggtaaacgtagcacttcagcggcggttttagaagctcttcgcgaagtccatcccattgtggacaagatcttgcagtaccgcgaaatggcgaaattgaaaggcacctatattgaccgtcttccggcattagtccacccgaaaacgggacgcctccatacccgcttcaaccaaacagccacggcgaccggtcgtttgtcctcctctgatccaaaccttcagaatattccagtacgtaccccattgggccagaagatccgccgtgcgtttgtagctgaggagggttggcgtttagtggccctcgattatcgtcaaattgaattacgtgtccttgcccatctttctggcgatgagaacctcatccgcgtgtttcaggaaggcaaagacattcacactcaaacggcaagctggatgtttggattatcagctgaagcgatcgatcctttgatgcgtcgtgcagcgaagaccatcaatttcggtgttctctacggtatgagtgcctttcgtttgtcgcaggaattaggcattccctatgaagaagctcaggcgttcattcagaaatactttcaaagctatcccaaagttaaagcatggatcgagaagactctccgcgaaggccgcacacgtggttacgtagagaccttatttggacgtcgccgctatgttcccgatttaaacgctcgcgtgaaaggcaagcgtgaagccgccgaacgcatggcgttcaacatgcctgtacagggcacggcagctgacctcatgaaacttgcaatggtgcgcctttttccacaattgcgtgaagttggtgcccgcatgctcttgcaggtccacgatgaactcttgttagaagcgccaaaagagcgtgcggaagaggtggcagccctcgcgaaagaagttatggaaggcgtgtggcccttagcggtgcctcttgaagtcgaagttggtattggcgaggattggctggctgccaaagga

SEQ ID NO: 5576 - protein, 841 aa, synthetic construct
  REGION 1..841: note = Variant of DNA polymerase I from Thermus sp. strain 2.9
MHHHHHHGGSGVLPVFEPKGRVLLVDGHHLAYRNFFALKGLTTSLGEPVQGVYGFAKSLLKALKEDGDVVIVVFDAKAPSFRHEAYEAYKAGRAPTPEDFPRQLALMKELVDLLGLERLEVPGFEADDVLATLAKKAEREGYEVQILTADRDLFQLLSPRISVLHPEGHRITPEWLWEKYGLRPEQWVDFRALAGDPSDNIPGVKGIGEKTALKLLKEWGSLENLLKNLDQVKPESVREKILAHLEDLKLSRELSRVRTDLPLEVDFRRRREPDWEGLKAFLERLEFGSLLHEFGLLESPLLAEEAPWPPPEGAFLGYRLSRPEPMWAELLALAASAQGRVYRAEDPHGALRGLFEVRGLLAKDLAVVALREGLDLPPTDDPMLLAYLLDPSNTTPEGVARRYGGEWTEDAAKRALLAERLHENLLGRLQGEERLLWLYEEVEKPLSRVLAHMEATGVKLDVAYLEALSLEVAAHMRRLEEEVFRLAGRSFRLNSRDQLERVLFDELGLPPIGKTEKTGKRSTSAAVLEALREVHPIVDKILQYREMAKLKGTYIDRLPALVHPKTGRLHTRFNQTATATGRLSSSDPNLQNIPVRTPLGQKIRRAFVAEEGWRLVALDYRQIELRVLAHLSGDENLIRVFQEGKDIHTQTASWMFGLSAEAIDPLMRRAAKTINFGVLYGMSAFRLSQELGIPYEEAQAFIQKYFQSYPKVKAWIEKTLREGRTRGYVETLFGRRRYVPDLNARVKGKREAAERMAFNMPVQGTAADLMKLAMVRLFPQLREVGARMLLQVHDELLLEAPKERAEEVAALAKEVMEGVWPLAVPLEVEVGIGEDWLAAKG

SEQ ID NO: 5577 - DNA, 2523 bp, synthetic construct
  misc_feature 1..2523: note = Variant of DNA polymerase I from Thermus sp. strain 2.9
  source 1..2523: mol_type = other DNA
atgcaccatcatcatcatcatggcggtagcggcgtgttaccggtgttcgagcctaaaggtcgcgtgcttctggttgatggccatcatctcgcgtatcgtaacttctttgccctgaaaggattaaccaccagcctgggcgagccggtacagggtgtctacggctttgcaaagtcgctcctgaaagctctgaaagaagacggtgatgtggtgattgttgtctttgatgcgaaagcgccaagttttcgccacgaagcgtacgaagcttacaaagccgggcgtgctccaacgccggaagactttcctcgccaattggcgcttatgaaggaattagtggatttgcttggcctcgaacgcttggaagttcccggtttcgaggcagacgacgtattagcgactctcgcaaagaaagccgaacgtgagggctatgaagtccagatcttgacagcagatcgcgatcttttccagcttttatctccgcgcatctcggtgttacacccggaagggcatcgtatcaccccggaatggctctgggagaaatatggtttgcgtcccgaacaatgggtggattttcgcgccttagcaggcgatccgagcgacaatattccgggagttaaaggtatcggcgagaagacggcgctcaagctccttaaagaatgggggtcgttggagaacttgcttaagaatttagatcaggtcaaaccagagtcagtgcgtgagaagattcttgctcacctcgaagacctcaaattaagccgcgaattgtcccgtgtacgcaccgatttgccgctcgaagttgatttcggccgccgccgcgaacctgactgggagggtcttaaagcgtttttagagcgtcttgaatttggttcgctcttgcatgaattcggccttttagaaagcccgttaccggccgaagaagcaccttggccaccgcccgagggcgcgtttttaggttaccgtttgagtcgcccggaaccgatgtgggccgaattactggctcttgcagcgtctgcccagggacgtgtgtatcgcgcggaagaccctcatggtgcgctccgcggcctcttcgaagtccgtggactccttgccaaagacttagctgttgttgcattgcgcgaaggtcttgatttacctccgactgatgatccaatgcttcttgcgtacctcttggacccgtcaaacacgacgcccgaaggcgtagcccgtcgttacggcggcgagtggaccgaagatgcagcgaaacgcgcgttattggccgaacgtttgcacgaaaatttattaggacgtttgcaaggcgaggaacgtctcctctggctttacgaagaagtggagaaaccattgagtcgcgtgctcgcgcatatggaagctaccggtgtcaaattagacgtggcgtatttggaggcccttagccttgaagttgctgcccatatgcgccgcttggaggaagaagtattccgtttagcaggccactcctttcgccttaactctcgcgatcagttagaacgtgtgttgttcgatgaacttggtctccctcctatcggcaagacagagaagaccggtaaacgtagcacttcagcggcggttttagaagctcttcgcgaagtccatcccattgtggacaagatcttgcagtaccgcgaaatggcgaaattgaaaggcacctatattgaccgtcttccggcattagtccacccgaaaacgggacgcctccatacccgcttcaaccaaacagccacggcgaccggtcgtttgtccagttctgatccaaaccttcagaatattccagtacgtaccccattgggccagaagatccgccgtgcgtttgtagctgaggagggttggcgtttagtggccctcgattatcgtcaaattgaattacgtgtccttgcccatctttctggcgatgagaacctcatccgcgtgtttcaggaaggcaaagacattcacactcaaacggcaagctggatgtttggattatcagctgaagcgatcgatcctttgatgcgtcgtgcagcgaagaccatcaatttcggtgttctctacggtatgagtgcctttcgtttgtcgcaggaattaggcattccctatgaagaagctcaggcgttcattcagaaatactttcaaagctatcccaaagttaaagcatggatcgagaagactctccgcgaaggccgcacacgtggttacgtagagaccttatttggacgtcgccgctatgttcccgatttaaacgctcgcgtgaaaagcgtacgtgaagccgccgaacgcatggcgttcaacatgcctgtacagggcacggcagctgacctcatgaaacttgcaatggtgcgcctttttccacaattgcgtgaagttggtgcccgcatgctcttgcaggtccacgatgaactcttgttagaagcgccaaaagagcgtgcggaagaggtggcagccctcgcgaaagaagttatggaaggcgtgtggcccttagcggtgcctcttgaagtcgaagttggtattggcgaggattggctggctgccaaagga

SEQ ID NO: 5578 - protein, 841 aa, synthetic construct
  REGION 1..841: note = Variant of DNA polymerase I from Thermus sp. strain 2.9
MHHHHHHGGSGVLPVFEPKGRVLLVDGHHLAYRNFFALKGLTTSLGEPVQGVYGFAKSLLKALKEDGDVVIVVFDAKAPSFRHEAYEAYKAGRAPTPEDFPRQLALMKELVDLLGLERLEVPGFEADDVLATLAKKAEREGYEVQILTADRDLFQLLSPRISVLHPEGHRITPEWLWEKYGLRPEQWVDFRALAGDPSDNIPGVKGIGEKTALKLLKEWGSLENLLKNLDQVKPESVREKILAHLEDLKLSRELSRVRTDLPLEVDFGRRREPDWEGLKAFLERLEFGSLLHEFGLLESPLPAEEAPWPPPEGAFLGYRLSRPEPMWAELLALAASAQGRVYRAEDPHGALRGLFEVRGLLAKDLAVVALREGLDLPPTDDPMLLAYLLDPSNTTPEGVARRYGGEWTEDAAKRALLAERLHENLLGRLQGEERLLWLYEEVEKPLSRVLAHMEATGVKLDVAYLEALSLEVAAHMRRLEEEVFRLAGHSFRLNSRDQLERVLFDELGLPPIGKTEKTGKRSTSAAVLEALREVHPIVDKILQYREMAKLKGTYIDRLPALVHPKTGRLHTRFNQTATATGRLSSSDPNLQNIPVRTPLGQKIRRAFVAEEGWRLVALDYRQIELRVLAHLSGDENLIRVFQEGKDIHTQTASWMFGLSAEAIDPLMRRAAKTINFGVLYGMSAFRLSQELGIPYEEAQAFIQKYFQSYPKVKAWIEKTLREGRTRGYVETLFGRRRYVPDLNARVKSVREAAERMAFNMPVQGTAADLMKLAMVRLFPQLREVGARMLLQVHDELLLEAPKERAEEVAALAKEVMEGVWPLAVPLEVEVGIGEDWLAAKG

SEQ ID NO: 5579 - DNA, 2523 bp, synthetic construct
  misc_feature 1..2523: note = Variant of DNA polymerase I from Thermus sp. strain 2.9
  source 1..2523: mol_type = other DNA
atgcaccatcatcatcatcatggcggtagcggcgtgttaccggtgttcgagcctaaaggtcgcgtgcttctggttgatggccatcatctcgcgtatcgtaacttctttgccctgaaaggattaaccaccagcctgggcgagccggtacagggtgtctacggctttgcaaagtcgctcctgaaagctctgaaagaagacggtgatgtggtgattgttgtctttgatgcgaaagcgccaagttttcgccacgaagcgtacgaagcttacaaagccgggcgtgctccaacgccggaagactttcctcgccaattggcgcttatgaaggaattagtggatttgcttggcctcgaacgcttggaagttcccggtttcgaggcagacgacgtattagcgactctcgcaaagaaagccgaacgtgagggctatgaagtccagatcttgacagcagatcgcgatcttttccagcttttatctccgcgcatctcggtgttacacccggaagggcatcgtatcaccccggaatggctctgggagaaatatggtttgcgtcccgaacaatgggtggattttcgcgccttagcaggcgatccgagcgacaatattccgggagttaaaggtatcggcgagaagacggcgctcaagctccttaaagaatgggggtcgttggagaacttgcttaagaatttagatcaggtcaaaccagagtcagtgcgtgagaagattcttgctcacctcgaagacctcaaattaagccgcgaattgtcccgtgtacgcaccgatttgccgctcgaagttgatttcggtcgccgccgcgaacctgactgggagggtcttaaagcgtttttagagcgtcttgaatttggttcgctcttgcatgaattcggccttttagaaagcccgttactggccgaagaagcaccttggccaccgcccgagggcgcgtttttaggttaccgtttgagtcgcccggaaccgatgtgggccgaattactggctcttgcagcgtctgcccagggacgtgtgtatcgcgcggaagaccctcatggtgcgctccgcggcctcttcgaagtccgtggactccttgccaaagacttagctgttgttgcattgcgcgaaggtcttgatttacctccgactgatgatccaatgcttcttgcgtacctcttggacccgtcaaacacgacgcccgaaggcgtagcccgtcgttacggcggcgagtggaccgaagatgcagcgaaacgcgcgttattggccgaacgtttgcacgaaaatttattaggacgtttgcaaggcgaggaacgtctcctctggctttacgaagaagtggagaaaccattgagtcgcgtgctcgcgcatatggaagctaccggtgtcaaattagacgtggcgtatttggagtgtcttcaccttgaagttgctgcccacatgcgccgcttggaggaagaagtattccgtttagcaggccgttcctttcgccttaactctcgcgatcagttagaacgtgtgttgttcgatgaacttggtctccctcctatcggcaagacagagaagaccggtaaacgtagcacttcagcggcggttttagaagctcttcgcgaagtccatcccattgtggacaagatcttgcagtaccgcgaaatggcgaaattgaaaggcacctatattgaccgtcttccggcattagtccacccgaaaacgggacgcctccatacccgcttcaaccaaacagccacggcgaccggtcgtttgtcctcctctgatccaaaccttcagaatattccagtacgtaccccattgggccagaagatccgccgtgcgtttgtagctgaggagggttggcgtttagtggccctcgattatcgtcaaattgaattacgtgtccttgcccatctttctggcgatgagaacctcatccgcgtgtttcaggaaggcaaagacattcacactcaaacggcaagctggatgtttggattatcagctgaagcgatcgatcctttgatgcgtcgtgcagcgaagaccatcaatttcggtgttctctacggtatgagtgcctttcgtttgtcgcaggaattaggcattccctatgaagaagctcaggcgttcattcagaaatactttcaaagctatcccaaagttaaagcatggatcgagaagactctccgtgaaggccgcacacgtggttacgtagagaccttatttggacgtcgccgctatgttcccgatttaaacgctcgcgtgaaaggcaagcgtgaagccgccgaacgcatggcgttcaacatgcctgtacagggcacggcagctgacctcatgaaacttgcaatggtgcgcctttttccacaattgcgtgaagttggtgcccgcatgctcttgcaggtccacgatgaactcttgttagaagcgccaaaagagcgtgcggaagaggtggcagccctcgcgaaagaagttatggaaggcgtgtggcccttagcggtgcctcttgaagtcgaagttggtattggcgaggattggctggctgccaaagga

SEQ ID NO: 5580 - protein, 841 aa, synthetic construct
  REGION 1..841: note = Variant of DNA polymerase I from Thermus sp. strain 2.9
MHHHHHHGGSGVLPVFEPKGRVLLVDGHHLAYRNFFALKGLTTSLGEPVQGVYGFAKSLLKALKEDGDVVIVVFDAKAPSFRHEAYEAYKAGRAPTPEDFPRQLALMKELVDLLGLERLEVPGFEADDVLATLAKKAEREGYEVQILTADRDLFQLLSPRISVLHPEGHRITPEWLWEKYGLRPEQWVDFRALAGDPSDNIPGVKGIGEKTALKLLKEWGSLENLLKNLDQVKPESVREKILAHLEDLKLSRELSRVRTDLPLEVDFGRRREPDWEGLKAFLERLEFGSLLHEFGLLESPLLAEEAPWPPPEGAFLGYRLSRPEPMWAELLALAASAQGRVYRAEDPHGALRGLFEVRGLLAKDLAVVALREGLDLPPTDDPMLLAYLLDPSNTTPEGVARRYGGEWTEDAAKRALLAERLHENLLGRLQGEERLLWLYEEVEKPLSRVLAHMEATGVKLDVAYLECLHLEVAAHMRRLEEEVFRLAGRSFRLNSRDQLERVLFDELGLPPIGKTEKTGKRSTSAAVLEALREVHPIVDKILQYREMAKLKGTYIDRLPALVHPKTGRLHTRFNQTATATGRLSSSDPNLQNIPVRTPLGQKIRRAFVAEEGWRLVALDYRQIELRVLAHLSGDENLIRVFQEGKDIHTQTASWMFGLSAEAIDPLMRRAAKTINFGVLYGMSAFRLSQELGIPYEEAQAFIQKYFQSYPKVKAWIEKTLREGRTRGYVETLFGRRRYVPDLNARVKGKREAAERMAFNMPVQGTAADLMKLAMVRLFPQLREVGARMLLQVHDELLLEAPKERAEEVAALAKEVMEGVWPLAVPLEVEVGIGEDWLAAKG

SEQ ID NO: 5581 - DNA, 2523 bp, synthetic construct
  misc_feature 1..2523: note = Variant of DNA polymerase I from Thermus sp. strain 2.9
  source 1..2523: mol_type = other DNA
atgcaccatcatcatcatcatggcggtagcggcgtgttaccggtgttcgagcctaaaggtcgcgtgcttctggttgatggccatcatctcgcgtatcgtaacttctttgccctgaaaggattaaccaccagcctgggcgagccggtacagggtgtctacggctttgcaaagtcgctcctgaaagctctgaaagaagacggtgatgtggtgattgttgtctttgatgcgaaagcgccaagttttcgccacgaagcgtacgaagcttacaaagccgggcgtgctccaacgccggaagactttcctcgccaattggcgcttatgaaggaattagtggatttgcttggcctcgaacgcttggaagttcccggtttcgaggcagacgacgtattagcgactctcgcaaagaaagccgaacgtgagggctatgaagtccagatcttgacagcagatcgcgatcttttccagcttttatctccgcgcatctcggtgttacacccggaagggcatcgtatcaccccggaatggctctgggagaaatatggtttgcgtcccgaacaatgggtggattttcgcgccttagcaggcgatccgagcgacaatattccgggagttaaaggtatcggcgagaagacggcgctcaagctccttaaagaatgggggtcgttggagaacttgcttaagaatttagatcaggtcaaaccagagtcagtgcgtgagaagattcttgctcacctcgaagacctcaaattaagccgcgaattgtcccgtgtacgcaccgatttgccgctcgaagttgatttcggtcgccgccgcgaacctgactgggagggtcttaaagcgtttttagagcgtcttgaatttggttcgctcttgcatgaattcggccttttagaaagcccgttactggccgaagaagcaccttggccaccgcccgagggcgcgtttttaggttaccgtttgagtcgcccggaaccgatgtgggccgaattactggctcttgcagcgtctgcccagggacgtgtgtatcgcgcggaagaccctcatggtgcgctccgcggcctcttcgaagtccgtggactccttgccaaagacttagctgttgttgcattgcgcgaaggtcttgatttacctccgactgatgatccaatgcttcttgcgtacctcttggacccgtcaaacacgacgcccgaaggcgtagcccgtcgttacggcggcgagtggaccgaagatgcagcgaaacgcgcgttattggccgaacgtttgcacgaaaatttattaggacgtttgcaaggcgaggaacgtctcctctggctttacgaagaagtggagaaaccattgagtcgcgtgctcgcgcatatggaagctaccggtgtcaaattagacgtggcgtatttggagaatctcagccttgaagttgctgcccacatgcgccgcttggaggaagaagtattccgtttagcaggccgttcctttcgccttaactctcgcgatcagttagaacgtgtgttgttcgatgaacttggtctccctcctatcggcaagacagagaagaccggtaaacgtagcacttcagcggcggttttagaagctcttcgcgaagtccatcccattgtggacaagatcttgcagtaccgcgaaatggcgaaattgaaaggcacctatattgaccgtcttccggcattagtccacccgaaaacgggacgcctccatacccgcttcaaccaaacagccacggcgaccggtcgtttgtcctcctctgatccaaaccttcagaatattccagtacgtaccccattgggccagaagatccgccgtgcgtttgtagctgaggagggttggcgtttagtggccctcgattatcgtcaaattgaattacgtgtccttgcccatctttctggcgatgagaacctcatccgcgtgtttcaggaaggcaaagacattcacactcaaacggcaagctggatgtttggattatcagctgaagcgatcgatcctttgatgcgtcgtgcagcgaagaccatcaatttcggtgttctctacggtatgagtgcctttcgtttgtcgcaggaattaggcattccctatgaagaagctcaggcgttcattcagaaatactttcaaagctatcccaaagttaaagcatggatcgagaagactctccgtgaaggccgcgttcgtggttacgtagagaccttatttggacgtcgccgctatgttcccgatttaaacgctcgcgtgaaaggcaagcgtgaagccgccgaacgcatggcgttcaacatgcctgtacagggcacggcagctgacctcatgaaacttgcaatggtgcgcctttttccacaattgcgtgaagttggtgcccgcatgctcttgcaggtccacgatgaactcttgttagaagcgccaaaagagcgtgcggaagaggtggcagccctcgcgaaagaagttatggaaggcgtgtggcccttagcggtgcctcttgaagtcgaagttggtattggcgaggattggctggctgccaaagga

SEQ ID NO: 5582 - protein, 841 aa, synthetic construct
  REGION 1..841: note = Variant of DNA polymerase I from Thermus sp. strain 2.9
MHHHHHHGGSGVLPVFEPKGRVLLVDGHHLAYRNFFALKGLTTSLGEPVQGVYGFAKSLLKALKEDGDVVIVVFDAKAPSFRHEAYEAYKAGRAPTPEDFPRQLALMKELVDLLGLERLEVPGFEADDVLATLAKKAEREGYEVQILTADRDLFQLLSPRISVLHPEGHRITPEWLWEKYGLRPEQWVDFRALAGDPSDNIPGVKGIGEKTALKLLKEWGSLENLLKNLDQVKPESVREKILAHLEDLKLSRELSRVRTDLPLEVDFGRRREPDWEGLKAFLERLEFGSLLHEFGLLESPLLAEEAPWPPPEGAFLGYRLSRPEPMWAELLALAASAQGRVYRAEDPHGALRGLFEVRGLLAKDLAVVALREGLDLPPTDDPMLLAYLLDPSNTTPEGVARRYGGEWTEDAAKRALLAERLHENLLGRLQGEERLLWLYEEVEKPLSRVLAHMEATGVKLDVAYLENLSLEVAAHMRRLEEEVFRLAGRSFRLNSRDQLERVLFDELGLPPIGKTEKTGKRSTSAAVLEALREVHPIVDKILQYREMAKLKGTYIDRLPALVHPKTGRLHTRFNQTATATGRLSSSDPNLQNIPVRTPLGQKIRRAFVAEEGWRLVALDYRQIELRVLAHLSGDENLIRVFQEGKDIHTQTASWMFGLSAEAIDPLMRRAAKTINFGVLYGMSAFRLSQELGIPYEEAQAFIQKYFQSYPKVKAWIEKTLREGRVRGYVETLFGRRRYVPDLNARVKGKREAAERMAFNMPVQGTAADLMKLAMVRLFPQLREVGARMLLQVHDELLLEAPKERAEEVAALAKEVMEGVWPLAVPLEVEVGIGEDWLAAKG

SEQ ID NO: 5583 - DNA, 2523 bp, synthetic construct
  misc_feature 1..2523: note = Variant of DNA polymerase I from Thermus sp. strain 2.9
  source 1..2523: mol_type = other DNA
atgcaccatcatcatcatcatggcggtagcggcgtgttaccggtgttcgagcctaaaggtcgcgtgcttctggttgatggccatcatctcgcgtatcgtaacttctttgccctgaaaggattaaccaccagcctgggcgagccggtacagggtgtctacggctttgcaaagtcgctcctgaaagctctgaaagaagacggtgatgtggtgattgttgtctttgatgcgaaagcgccaagttttcgccacgaagcgtacgaagcttacaaagccgggcgtgctccaacgccggaagactttcctcgccaattggcgcttatgaaggaattagtggatttgcttggcctcgaacgcttggaagttcccggtttcgaggcagacgacgtattagcgactctcgcaaagaaagccgaacgtgagggctatgaagtccagatcttgacagcagatcgcgatcttttccagcttttatctccgcgcatctcggtgttacacccggaagggcatcgtatcaccccggaatggctctgggagaaatatggtttgcgtcccgaacaatgggtggattttcgcgccttagcaggcgatccgagcgacaatattccgggagttaaaggtatcggcgagaagacggcgctcaagctccttaaagaatgggggtcgttggagaacttgcttaagaatttagatcaggtcaaaccagagtcagtgcgtgagaagattcttgctcacctcgaagacctcaaattaagccgcgaattgtcccgtgtacgcaccgatttgccgctcgaagttgatttcggtcgccgccgcgaacctgactgggagggtcttaaagcgtttttagagcgtcttgaatttggttcgctcttgcatgaattcggccttttagaaagcccgttactggccgaagaagcaccttggccaccgcccgagggcgcgtttttaggttaccgtttgagtcgcccggaaccgatgtgggccgaattactggctcttgcagcgtctgcccagggacgtgtgtatcgcgcggaagaccctcatggtgcgctccgcggcctcttcgaagtccgtggactccttgccaaagacttagctgttgttgcattgcgcgaaggtcttgatttacctccgactgatgatccaatgcttcttgcgtacctcttggacccgtcaaacacgacgcccgaaggcctggcccgtcgttacggcggcgagtggaccgaagatgcagcgaaacgcgcgttattggccgaacgtttgcacgaaaatttattaggacgtttgcaaggcgaggaacgtctcctctggctttacgaagaagtggagaaaccattgagtcgcgtgctcgcgcatatggaagctaccggtgtcaaattagacgtggcgtatttggagaatctcagccttgaagttgctgcccacatgcgccgcttggaggaagaagtattccgtttagcaggccgttcctttcgccttaactctcgcgatcagttagaacgtgtgttgttcgatgaacttggtctccctcctatcggcaagacagagaagaccggtaaacgtagcacttcagcggcggttttagaagctcttcgcgaagtccatcccattgtggacaagatcttgcagtaccgcgaaatggcgaaattgaaaggcacctatattgaccgtcttccggcattagtccacccgaaaacgggacgcctccatacccgcttcaaccaaacagccacggcgaccggtcgtttgtcctcctctgatccaaaccttcagaatattccagtacgtaccccattgggccagaagatccgccgtgcgtttgtagctgaggagggttggcgtttagtggccctcgattatcgtcaaattgaattacgtgtccttgcccatctttctggcgatgagaacctcatccgcgtgtttcaggaaggcaaagacattcacactcaaacggcaagctggatgtttggattatcagctgaagcgatcgatcctttgatgcgtcgtgcagcgaagaccatcaatttcggtgttctctacggtatgagtgcctttcgtttgtcgcaggaattaggcattccctatgaagaagctcaggcgttcattcagaaatactttcaaagctatcccaaagttaaagcatggatcgagaagactctccgtgaaggccgcacacgtggttacgtagagaccttatttggacgtcgccgctatgttcccgatttaaacgctcgcgtgaaaggcaagcgtgaagccgccgaacgcatggcgttcaacatgcctgtacagggcacggcagctgacctcatgaaacttgcaatggtgcgcctttttccacaattgcgtgaagttggtgcccgcatgctcttgcaggtccacgatgaactcttgttagaagcgccaaaagagcgtgcggaagaggtggcagccctcgcgaaagaagttatggaaggcgtgtggcccttagcggtgcctcttgaagtcgaagttggtattggcgaggattggctggctgccaaagga

SEQ ID NO: 5584 - protein, 841 aa, synthetic construct
  REGION 1..841: note = Variant of DNA polymerase I from Thermus sp. strain 2.9
MHHHHHHGGSGVLPVFEPKGRVLLVDGHHLAYRNFFALKGLTTSLGEPVQGVYGFAKSLLKALKEDGDVVIVVFDAKAPSFRHEAYEAYKAGRAPTPEDFPRQLALMKELVDLLGLERLEVPGFEADDVLATLAKKAEREGYEVQILTADRDLFQLLSPRISVLHPEGHRITPEWLWEKYGLRPEQWVDFRALAGDPSDNIPGVKGIGEKTALKLLKEWGSLENLLKNLDQVKPESVREKILAHLEDLKLSRELSRVRTDLPLEVDFGRRREPDWEGLKAFLERLEFGSLLHEFGLLESPLLAEEAPWPPPEGAFLGYRLSRPEPMWAELLALAASAQGRVYRAEDPHGALRGLFEVRGLLAKDLAVVALREGLDLPPTDDPMLLAYLLDPSNTTPEGLARRYGGEWTEDAAKRALLAERLHENLLGRLQGEERLLWLYEEVEKPLSRVLAHMEATGVKLDVAYLENLSLEVAAHMRRLEEEVFRLAGRSFRLNSRDQLERVLFDELGLPPIGKTEKTGKRSTSAAVLEALREVHPIVDKILQYREMAKLKGTYIDRLPALVHPKTGRLHTRFNQTATATGRLSSSDPNLQNIPVRTPLGQKIRRAFVAEEGWRLVALDYRQIELRVLAHLSGDENLIRVFQEGKDIHTQTASWMFGLSAEAIDPLMRRAAKTINFGVLYGMSAFRLSQELGIPYEEAQAFIQKYFQSYPKVKAWIEKTLREGRTRGYVETLFGRRRYVPDLNARVKGKREAAERMAFNMPVQGTAADLMKLAMVRLFPQLREVGARMLLQVHDELLLEAPKERAEEVAALAKEVMEGVWPLAVPLEVEVGIGEDWLAAKG

SEQ ID NO: 5585 - DNA, 2523 bp, synthetic construct
  misc_feature 1..2523: note = Variant of DNA polymerase I from Thermus sp. strain 2.9
  source 1..2523: mol_type = other DNA
atgcaccatcatcatcatcatggcggtagcggcgtgttaccggtgttcgagcctaaaggtcgcgtgcttctggttgatggccatcatctcgcgtatcgtaacttctttgccctgaaaggattaaccaccagcctgggcgagccggtacagggtgtctacggctttgcaaagtcgctcctgaaagctctgaaagaagacggtgatgtggtgattgttgtctttgatgcgaaagcgccaagttttcgccacgaagcgtacgaagcttacaaagccgggcgtgctccaacgccggaagactttcctcgccaattggcgcttatgaaggaattagtggatttgcttggcctcgaacgcttggaagttcccggtttcgaggcagacgacgtattagcgactctcgcaaagaaagccgaacgtgagggctatgaagtccagatcttgacagcagatcgcgatcttttccagcttttatctccgcgcatctcggtgttacacccggaagggcatcgtatcaccccggaatggctctgggagaaatatggtttgcgtcccgaacaatgggtggattttcgcgccttagcaggcgatccgagcgacaatattccgggagttaaaggtatcggcgagaagacggcgctcaagctccttaaagaatgggggtcgttggagaacttgcttaagaatttagatcaggtcaaaccagagtcagtgcgtgagaagattcttgctcacctcgaagacctcaaattaagccgcgaattgtcccgtgtacgcaccgatttgccgctcgaagttgatttcggtcgccgccgcgaacctgactgggagggtcttaaagcgtttttagagcgtcttgaatttggttcgctcttgcatgaattcggccttttagaaagcccgttactggccgaagaagcaccttggccaccgcccgagggcgcgtttttaggttaccgtttgagtcgcccggaaccgatgtgggccgaattactggctcttgcagcgtctgcccagggacgtgtgtatcgcgcggaagaccctcatggtgcgctccgcggcctcttcgaagtccgtggactccttgccaaagacttagctgttgttgcattgcgcgaaggtcttgatttacctccgactgatgatccaatgcttcttgcgtacctcttggacccgtcaaacacgacgcccgaaggcgtagcccgtcgttacggcggcgagtggaccgaagatgcagcgaaacgcgcgttattggccgaacgtttgcacgaaaatttattaggacgtttgcaaggcgaggaacgtctcctctggctttacgaagaagtggagaaaccattgagtcgcgtgctcgcgcatatggaagctaccggtgtcaaattagacgtggcgtatttggagaatctcagccttgaagttgctgcccacatgcgccgcttggaggaagaagtattccgtttagcaggccgttcctttcgccttaactctcgcgatcagttagaacgtgtgttgttcgatgaacagggtctccctcctatcggcaagacagagaagaccggtaaacgtagcacttcagcggcggttttagaagctcttcgcgaagtccatcccattgtggacaagatcttgcagtaccgcgaaatggcgaaattgaaaggcacctatattgaccgtcttccggcattagtccacccgaaaacgggacgcctccatacccgcttcaaccaaacagccacggcgaccggtcgtttgtcctcctctgatccaaaccttcagaatattccagtacgtaccccattgggccagaagatccgccgtgcgtttgtagctgaggagggttggcgtttagtggccctcgattatcgtcaaattgaattacgtgtccttgcccatctttctggcgatgagaacctcatccgcgtgtttcaggaaggcaaagacattcacactcaaacggcaagctggatgtttggattatcagctgaagcgatcgatcctttgatgcgtcgtgcagcgaagaccatcaatttcggtgttctctacggtatgagtgcctttcgtttgtcgcaggaattaggcattccctatgaagaagctcaggcgttcattcagaaatactttcaaagctatcccaaagttaaagcatggatcgagaagactctccgtgaaggccgcacacgtggttacgtagagaccttatttggacgtcgccgctatgttcccgatttaaacgctcgcgtgaaaggcaagcgtgaagccgccgaacgcatggcgttcaacatgcctgtacagggcacggcagctgacctcatgaaacttgcaatggtgcgcctttttccacaattgcgtgaagttggtgcccgcatgctcttgcaggtccacgatgaactcttgttagaagcgccaaaagagcgtgcggaagaggtggcagccctcgcgaaagaagttatggaaggcgtgtggcccttagcggtgcctcttgaagtcgaagttggtattggcgaggattggctggctgccaaagga

SEQ ID NO: 5586 - protein, 841 aa, synthetic construct
  REGION 1..841: note = Variant of DNA polymerase I from Thermus sp. strain 2.9
MHHHHHHGGSGVLPVFEPKGRVLLVDGHHLAYRNFFALKGLTTSLGEPVQGVYGFAKSLLKALKEDGDVVIVVFDAKAPSFRHEAYEAYKAGRAPTPEDFPRQLALMKELVDLLGLERLEVPGFEADDVLATLAKKAEREGYEVQILTADRDLFQLLSPRISVLHPEGHRITPEWLWEKYGLRPEQWVDFRALAGDPSDNIPGVKGIGEKTALKLLKEWGSLENLLKNLDQVKPESVREKILAHLEDLKLSRELSRVRTDLPLEVDFGRRREPDWEGLKAFLERLEFGSLLHEFGLLESPLLAEEAPWPPPEGAFLGYRLSRPEPMWAELLALAASAQGRVYRAEDPHGALRGLFEVRGLLAKDLAVVALREGLDLPPTDDPMLLAYLLDPSNTTPEGVARRYGGEWTEDAAKRALLAERLHENLLGRLQGEERLLWLYEEVEKPLSRVLAHMEATGVKLDVAYLENLSLEVAAHMRRLEEEVFRLAGRSFRLNSRDQLERVLFDEQGLPPIGKTEKTGKRSTSAAVLEALREVHPIVDKILQYREMAKLKGTYIDRLPALVHPKTGRLHTRFNQTATATGRLSSSDPNLQNIPVRTPLGQKIRRAFVAEEGWRLVALDYRQIELRVLAHLSGDENLIRVFQEGKDIHTQTASWMFGLSAEAIDPLMRRAAKTINFGVLYGMSAFRLSQELGIPYEEAQAFIQKYFQSYPKVKAWIEKTLREGRTRGYVETLFGRRRYVPDLNARVKGKREAAERMAFNMPVQGTAADLMKLAMVRLFPQLREVGARMLLQVHDELLLEAPKERAEEVAALAKEVMEGVWPLAVPLEVEVGIGEDWLAAKG

SEQ ID NO: 5587 - DNA, 2523 bp, synthetic construct
  misc_feature 1..2523: note = Variant of DNA polymerase I from Thermus sp. strain 2.9
  source 1..2523: mol_type = other DNA
atgcaccatcatcatcatcatggcggtagcggcgtgttaccggtgttcgagcctaaaggtcgcgtgcttctggttgatggccatcatctcgcgtatcgtaacttctttgccctgaaaggattaaccaccagcctgggcgagccggtacagggtgtctacggctttgcaaagtcgctcctgaaagctctgaaagaagacggtgatgtggtgattgttgtctttgatgcgaaagcgccaagttttcgccacgaagcgtacgaagcttacaaagccgggcgtgctccaacgccggaagactttcctcgccaattggcgcttatgaaggaattagtggatttgcttggcctcgaacgcttggaagttcccggtttcgaggcagacgacgtattagcgactctcgcaaagaaagccgaacgtgagggctatgaagtccagatcttgacagcagatcgcgatcttttccagcttttatctccgcgcatctcggtgttacacccggaagggcatcgtatcaccccggaatggctctgggagaaatatggtttgcgtcccgaacaatgggtggattttcgcgccttagcaggcgatccgagcgacaatattccgggagttaaaggtatcggcgagaagacggcgctcaagctccttaaagaatgggggtcgttggagaacttgcttaagaatttagatcaggtcaaaccagagtcagtgcgtgagaagattcttgctcacctcgaagacctcaaattaagccgcgaattgtcccgtgtacgcaccgatttgccgctcgaagttgatttcggtcgccgccgcgaacctgactgggagggtcttaaagcgtttttagagcgtcttgaatttggttcgctcttgcatgaattcggccttttagaaagcccgttactggccgaagaagcaccttggccaccgcccgagggcgcgtttttaggttaccgtttgagtcgcccggaaccgatgtgggccgaattactggctcttgcagcgtctgcccagggacgtgtgtatcgcgcggaagaccctcatggtgcgctccgcggcctcttcgaagtccgtggactccttgccaaagacttagctgttgttgcattgcgcgaaggtcttgatttacctccgactgatgatccaatgcttcttgcgtacctcttggacccgtcaaacacgacgcccgaaggcgtagcccgtcgttacggcggcgagtggaccgaagatgcagcgaaacgcgcgttattggccgaacgtttgcacgaaaatttattaggacgtttgcaaggcgaggaacgtctcctctggctttacgaagaagtggagaaaccattgagtcgcgtgctcgcgcatatggaagctaccggtgtcaaattagacgtggcgtatttggagaatctcagccttgaagttgctgcccacatgcgccgcttggaggaagaagtattccgtttagcaggccgttcctttcgccttaactctcgcgatcagttagaacgtgtgttgttcgatgaacttggtctccctaatatcggcaagacagagaagaccggtaaacgtagcacttcagcggcggttttagaagctcttcgcgaagtccatcccattgtggacaagatcttgcagtaccgcgaaatggcgaaattgaaaggcacctatattgaccgtcttccggcattagtccacccgaaaacgggacgcctccatacccgcttcaaccaaacagccacggcgaccggtcgtttgtcctcctctgatccaaaccttcagaatattccagtacgtaccccattgggccagaagatccgccgtgcgtttgtagctgaggagggttggcgtttagtggccctcgattatcgtcaaattgaattacgtgtccttgcccatctttctggcgatgagaacctcatccgcgtgtttcaggaaggcaaagacattcacactcaaacggcaagctggatgtttggattatcagctgaagcgatcgatcctttgatgcgtcgtgcagcgaagaccatcaatttcggtgttctctacggtatgagtgcctttcgtttgtcgcaggaattaggcattccctatgaagaagctcaggcgttcattcagaaatactttcaaagctatcccaaagttaaagcatggatcgagaagactctccgtgaaggccgcacacgtggttacgtagagaccttatttggacgtcgccgctatgttcccgatttaaacgctcgcgtgaaaggcaagcgtgaagccgccgaacgcatggcgttcaacatgcctgtacagggcacggcagctgacctcatgaaacttgcaatggtgcgcctttttccacaattgcgtgaagttggtgcccgcatgctcttgcaggtccacgatgaactcttgttagaagcgccaaaagagcgtgcggaagaggtggcagccctcgcgaaagaagttatggaaggcgtgtggcccttagcggtgcctcttgaagtcgaagttggtattggcgaggattggctggctgccaaagga

SEQ ID NO: 5588 - protein, 841 aa, synthetic construct
  REGION 1..841: note = Variant of DNA polymerase I from Thermus sp. strain 2.9
MHHHHHHGGSGVLPVFEPKGRVLLVDGHHLAYRNFFALKGLTTSLGEPVQGVYGFAKSLLKALKEDGDVVIVVFDAKAPSFRHEAYEAYKAGRAPTPEDFPRQLALMKELVDLLGLERLEVPGFEADDVLATLAKKAEREGYEVQILTADRDLFQLLSPRISVLHPEGHRITPEWLWEKYGLRPEQWVDFRALAGDPSDNIPGVKGIGEKTALKLLKEWGSLENLLKNLDQVKPESVREKILAHLEDLKLSRELSRVRTDLPLEVDFGRRREPDWEGLKAFLERLEFGSLLHEFGLLESPLLAEEAPWPPPEGAFLGYRLSRPEPMWAELLALAASAQGRVYRAEDPHGALRGLFEVRGLLAKDLAVVALREGLDLPPTDDPMLLAYLLDPSNTTPEGVARRYGGEWTEDAAKRALLAERLHENLLGRLQGEERLLWLYEEVEKPLSRVLAHMEATGVKLDVAYLENLSLEVAAHMRRLEEEVFRLAGRSFRLNSRDQLERVLFDELGLPNIGKTEKTGKRSTSAAVLEALREVHPIVDKILQYREMAKLKGTYIDRLPALVHPKTGRLHTRFNQTATATGRLSSSDPNLQNIPVRTPLGQKIRRAFVAEEGWRLVALDYRQIELRVLAHLSGDENLIRVFQEGKDIHTQTASWMFGLSAEAIDPLMRRAAKTINFGVLYGMSAFRLSQELGIPYEEAQAFIQKYFQSYPKVKAWIEKTLREGRTRGYVETLFGRRRYVPDLNARVKGKREAAERMAFNMPVQGTAADLMKLAMVRLFPQLREVGARMLLQVHDELLLEAPKERAEEVAALAKEVMEGVWPLAVPLEVEVGIGEDWLAAKG

SEQ ID NO: 5589 - DNA, 2523 bp, synthetic construct
  misc_feature 1..2523: note = Variant of DNA polymerase I from Thermus sp. strain 2.9
  source 1..2523: mol_type = other DNA
atgcaccatcatcatcatcatggcggtagcggcgtgttaccggtgttcgagcctaaaggtcgcgtgcttctggttgatggccatcatctcgcgtatcgtaacttctttgccctgaaaggattaaccaccagcctgggcgagccggtacagggtgtctacggctttgcaaagtcgctcctgaaagctctgaaagaagacggtgatgtggtgattgttgtctttgatgcgaaagcgccaagttttcgccacgaagcgtacgaagcttacaaagccgggcgtgctccaacgccggaagactttcctcgccaattggcgcttatgaaggaattagtggatttgcttggcctcgaacgcttggaagttcccggtttcgaggcagacgacgtattagcgactctcgcaaagaaagccgaacgtgagggctatgaagtccagatcttgacagcagatcgcgatcttttccagcttttatctccgcgcatctcggtgttacacccggaagggcatcgtatcaccccggaatggctctgggagaaatatggtttgcgtcccgaacaatgggtggattttcgcgccttagcaggcgatccgagcgacaatattccgggagttaaaggtatcggcgagaagacggcgctcaagctccttaaagaatgggggtcgttggagaacttgcttaagaatttagatcaggtcaaaccagagtcagtgcgtgagaagattcttgctcacctcgaagacctcaaattaagccgcgaattgtcccgtgtacgcaccgatttgccgctcgaagttgatttcggtcgccgccgcgaacctgactgggagggtcttaaagcgtttttagagcgtcttgaatttggttcgctcttgcatgaattcggccttttagaaagcccgttactggccgaagaagcaccttggccaccgcccgagggcgcgtttttaggttaccgtttgagtcgcccggaaccgatgtgggccgaattactggctcttgcagcgtctgcccagggacgtgtgtatcgcgcggaagaccctcatggtgcgctccgcggcctcttcgaagtccgtggactccttgccaaagacttagctgttgttgcattgcgcgaaggtcttgatttacctccgactgatgatccaatgcttcttgcgtacctcttggacccgtcaaacacgacgcccgaaggcgtagcccgtcgttacggcggcgagtggaccgaagatgcagcgaaacgcgcgttattggccgaacgtttgcacgaaaatttattaggacgtttgcaaggcgaggaacgtctcctctggctttacgaagaagtggagaaaccattgagtcgcgtgctcgcgcatatggaagctaccggtgtcaaattagacgtggcgtatttggagaatcttcaccttgaagttgctgcccacatgcgccgcttggaggaagaagtattccgtttagcaggccgttcctttcgccttaactctcgcgatcagttagaacgtgtgttgttcgatgaacttggtctccctcctatcggcaagacagagaagaccggtaaacgtagcacttcagcggcggttttagaagctcttcgcgaagtccatcccattgtggacaagatcttgcagtaccgcgaaatggcgaaattgaaaggcacctatattgaccgtcttccggcattagtccacccgaaaacgggacgcctccatacccgcttcaaccaaacagccacggcgaccggtcgtttgtcctcctctgatccaaaccttcagaatattccagtacgtaccccattgggccagaagatccgccgtgcgtttgtagctgaggagggttggcgtttagtggccctcgattatagtcaaattgaattacgtgtccttgcccatctttctggcgatgagaacctcatccgcgtgtttcaggaaggcaaagacattcacactcaaacggcaagctggatgtttggattatcagctgaagcgatcgatcctttgatgcgtcgtgcagcgaagaccatcaatttcggtgttctctacggtatgagtgcctttcgtttgtcgcaggaattaggcattccctatgaagaagctcaggcgttcattcagaaatactttcaaagctatcccaaagttaaagcatggatcgagaagactctccgtgaaggccgcacacgtggttacgtagagaccttatttggacgtcgccgctatgttcccgatttaaacgctcgcgtgaaaggcaagcgtgaagccgccgaacgcatggcgttcaacatgcctgtacagggcacggcagctgacctcatgaaacttgcaatggtgcgcctttttccacaattgcgtgaagttggtgcccgcatgctcttgcaggtccacgatgaactcttgttagaagcgccaaaagagcgtgcggaagaggtggcagccctcgcgaaagaagttatggaaggcgtgtggcccttagcggtgcctcttgaagtcgaagttggtattggcgaggattggctggctgccaaagga

SEQ ID NO: 5590 - protein, 841 aa, synthetic construct
  REGION 1..841: note = Variant of DNA polymerase I from Thermus sp. strain 2.9
MHHHHHHGGSGVLPVFEPKGRVLLVDGHHLAYRNFFALKGLTTSLGEPVQGVYGFAKSLLKALKEDGDVVIVVFDAKAPSFRHEAYEAYKAGRAPTPEDFPRQLALMKELVDLLGLERLEVPGFEADDVLATLAKKAEREGYEVQILTADRDLFQLLSPRISVLHPEGHRITPEWLWEKYGLRPEQWVDFRALAGDPSDNIPGVKGIGEKTALKLLKEWGSLENLLKNLDQVKPESVREKILAHLEDLKLSRELSRVRTDLPLEVDFGRRREPDWEGLKAFLERLEFGSLLHEFGLLESPLLAEEAPWPPPEGAFLGYRLSRPEPMWAELLALAASAQGRVYRAEDPHGALRGLFEVRGLLAKDLAVVALREGLDLPPTDDPMLLAYLLDPSNTTPEGVARRYGGEWTEDAAKRALLAERLHENLLGRLQGEERLLWLYEEVEKPLSRVLAHMEATGVKLDVAYLENLHLEVAAHMRRLEEEVFRLAGRSFRLNSRDQLERVLFDELGLPPIGKTEKTGKRSTSAAVLEALREVHPIVDKILQYREMAKLKGTYIDRLPALVHPKTGRLHTRFNQTATATGRLSSSDPNLQNIPVRTPLGQKIRRAFVAEEGWRLVALDYSQIELRVLAHLSGDENLIRVFQEGKDIHTQTASWMFGLSAEAIDPLMRRAAKTINFGVLYGMSAFRLSQELGIPYEEAQAFIQKYFQSYPKVKAWIEKTLREGRTRGYVETLFGRRRYVPDLNARVKGKREAAERMAFNMPVQGTAADLMKLAMVRLFPQLREVGARMLLQVHDELLLEAPKERAEEVAALAKEVMEGVWPLAVPLEVEVGIGEDWLAAKG

SEQ ID NO: 5591 - DNA, 2523 bp, synthetic construct
  misc_feature 1..2523: note = Variant of DNA polymerase I from Thermus sp. strain 2.9
  source 1..2523: mol_type = other DNA
atgcaccatcatcatcatcatggcggtagcggcgtgttaccggtgttcgagcctaaaggtcgcgtgcttctggttgatggccatcatctcgcgtatcgtaacttctttgccctgaaaggattaaccaccagccgcggcgagccggtacagggtgtctacggctttgcaaagtcgctcctgaaagctctgaaagaagacggtgatgtggtgattgttgtctttgatgcgaaagcgccaagttttcgccacgaagcgtacgaagcttacaaagccgggcgtgctccaacgccggaagactttcctcgccaattggcgcttatgaaggaattagtggatttgcttggcctcgaacgcttggaagttcccggtttcgaggcagacgacgtattagcgactctcgcaaagaaagccgaacgtgagggctatgaagtccagatcttgacagcagatcgcgatcttttccagcttttatctccgcgcatctcggtgttacacccggaagggcatcgtatcaccccggaatggctctgggagaaatatggtttgcgtcccgaacaatgggtggattttcgcgccttagcaggcgatccgagcgacaatattccgggagttaaaggtatcggcgagaagacggcgctcaagctccttaaagaatgggggtcgttggagaacttgcttaagaatttagatcaggtcaaaccagagtcagtgcgtgagaagattcttgctcacctcgaagacctcaaattaagccgcgaattgtcccgtgtacgcaccgatttgccgctcgaagttgatttcggccgccgccgcgaacctgactgggagggtcttaaagcgtttttagagcgtcttgaatttggttcgctcttgcatgaattcggccttttagaaagcccgttactggccgaagaagcaccttggccaccgcccgagggcgcgtttttaggttaccgtttgagtcgcccggaaccgatgtgggccgaattactggctcttgcagcgtctgcccagggacgtgtgtatcgcgcggaagaccctcatggtgcgctccgcggcctcttcgaagtccgtggactccttgccaaagacttagctgttgttgcattgcgcgaaggtcttgatttacctccgactgatgatccaatgcttcttgcgtacctcttggacccgtcaaacacgacgcccgaaggcgtagcccgtcgttacggcggcgagtggaccgaagatgcagcgaaacgcgcgttattggccgaacgtttgcacgaaaatttattaggacgtttgcaaggcgaggaacgtctcctctggctttacgaagaagtggagaaaccattgagtcgcgtgctcgcgcatatggaagctaccggtgtcaaattagacgtggcgtatttggagaatcttagccttgaagttgctgcccatatgcgccgcttggaggaagaagtattccgtttagcaggccgttcctttcgccttaactctcgcgatcagttagaacgtgtgttgttcgatgaacttggtctccctcctatcggcaagacagagaagaccggtaaacgtagcacttcagcggcggttttagaagctcttcgcgaagtccatcccattgtggacaagatcttgcagtaccgcgaactggcgaaattgaaaggcacctatattgaccgtcttccggcattagtccacccgaaaacgggacgcctccatacccgcttcaaccaaacagccacggcgaccggtcgtttgtccagttctgatccaaaccttcagaatattccagtacgtaccccattgggccagaagatccgccgtgcgtttgtagctgaggagggttggcgtttagtggccctcgattatcgtcaaattgaattacgtgtccttgcccatctttctggcgatgagaacctcatccgcgtgtttcaggaaggcaaagacattcacactcaaacggcaagctggatgtttggattatcagctgaagcgatcgatcctttgatgcgtcgtgcagcgaagaccatcaatttcggtgttctctacggtatgagtgcctttcgtttgtcgcaggaattaggcattccctatgaagaagctcaggcgttcattcagaaatactttcaaagctatcccaaagttaaagcatggatcgagaagactctccgcgaaggccgcacacgtggttacgtagagaccttatttggacgtcgccgctatgttcccgatttaaacgctcgcgtgaaaggcgtacgtgaagccgccgaacgcatggcgttcaacatgcctgtacagggcacggcagctgacctcatgaaacttgcaatggtgcgcctttttccacaattgcgtgaagttggtgcccgcatgctcttgcaggtccacgatgaactcttgttagaagcgccaaaagagcgtgcggaagaggtggcagccctcgcgaaagaagttatggaaggcgtgtggcccttagcggtgcctcttgaagtcgaagttggtattggcgaggattggctggctgccaaagga

SEQ ID NO: 5592 - protein, 841 aa, synthetic construct
  REGION 1..841: note = Variant of DNA polymerase I from Thermus sp. strain 2.9
MHHHHHHGGSGVLPVFEPKGRVLLVDGHHLAYRNFFALKGLTTSRGEPVQGVYGFAKSLLKALKEDGDVVIVVFDAKAPSFRHEAYEAYKAGRAPTPEDFPRQLALMKELVDLLGLERLEVPGFEADDVLATLAKKAEREGYEVQILTADRDLFQLLSPRISVLHPEGHRITPEWLWEKYGLRPEQWVDFRALAGDPSDNIPGVKGIGEKTALKLLKEWGSLENLLKNLDQVKPESVREKILAHLEDLKLSRELSRVRTDLPLEVDFGRRREPDWEGLKAFLERLEFGSLLHEFGLLESPLLAEEAPWPPPEGAFLGYRLSRPEPMWAELLALAASAQGRVYRAEDPHGALRGLFEVRGLLAKDLAVVALREGLDLPPTDDPMLLAYLLDPSNTTPEGVARRYGGEWTEDAAKRALLAERLHENLLGRLQGEERLLWLYEEVEKPLSRVLAHMEATGVKLDVAYLENLSLEVAAHMRRLEEEVFRLAGRSFRLNSRDQLERVLFDELGLPPIGKTEKTGKRSTSAAVLEALREVHPIVDKILQYRELAKLKGTYIDRLPALVHPKTGRLHTRFNQTATATGRLSSSDPNLQNIPVRTPLGQKIRRAFVAEEGWRLVALDYRQIELRVLAHLSGDENLIRVFQEGKDIHTQTASWMFGLSAEAIDPLMRRAAKTINFGVLYGMSAFRLSQELGIPYEEAQAFIQKYFQSYPKVKAWIEKTLREGRTRGYVETLFGRRRYVPDLNARVKGVREAAERMAFNMPVQGTAADLMKLAMVRLFPQLREVGARMLLQVHDELLLEAPKERAEEVAALAKEVMEGVWPLAVPLEVEVGIGEDWLAAKG

SEQ ID NO: 5593 - DNA, 2523 bp, synthetic construct
  misc_feature 1..2523: note = Variant of DNA polymerase I from Thermus sp. strain 2.9
  source 1..2523: mol_type = other DNA
atgcaccatcatcatcatcatggcggtagcggcgtgttaccggtgttcgagcctaaaggtcgcgtgcttctggttgatggccatcatctcgcgtatcgtaacttctttgccctgaaaggattaaccaccagcctgggcgagccggtacagggtgtctacggctttgcaaagtcgctcctgaaagctctgaaagaagacggtgatgtggtgattgttgtctttgatgcgaaagcgccaagttttcgccacgaagcgtacgaagcttacaaagccgggcgtgctccaacgccggaagactttcctcgccaattggcgcttatgaaggaattagtggatttgcttggcctcgaacgcttggaagttcccggtttcgaggcagacgacgtattagcgactctcgcaaagaaagccgaacgtgagggctatgaagtccagatcttgacagcagatcgcgatcttttccagcttttatctccgcgcatctcggtgttacacccggaagggcatcgtatcaccccggaatggctctgggagaaatatggtttgcgtcccgaacaatgggtggattttcgcgccttagcaggcgatccgagcgacaatattccgggagttaaaggtatcggcgagaagacggcgctcaagctccttaaagaatgggggtcgttggagaacttgcttaagaatttagatcaggtcaaaccagagtcagtgcgtgagaagattcttgctcacctcgaagacctcaaattaagccgcgaattgtcccgtgtacgcaccgatttgccgctcgaagttgatttcggtcgccgccgcgaacctgactgggagggtcttaaagcgtttttagagcgtcttgaatttggttcgctcttgcatgaattcggccttttagaaagcccgttactggccgaagaagcaccttggccaccgcccgagggcgcgtttttaggttaccgtttgagtcgcccggaaccgatgtgggccgaattactggctcttgcagcgtctgcccagggacgtgtgtatcgcgcggaagaccctcatggtgcgctccgcggcctcttcgaagtccgtggactccttgccaaagacttagctgttgttgcattgcgcgaaggtcttgatttacctccgactgatgatccaatgcttcttgcgtacctcttggacccgtcaaacacgacgcccgaaggcgtagcccgtcgttacggcggcgagtggaccgaagatgcagcgaaacgcgcgttattggccgaacgtttgcacgaaaatttattaggacgtttgcaaggcgaggaacgtctcctctggctttacgaagaagtggagaaaccattgagtcgcgtgctcgcgcatatggaagctaccggtgtcaaattagacgtggcgtatttggagaatctcagccttgaagttgctgcccacatgcgccgcttggaggaagaagtattccgtttagcaggccgttcctttcgccttaactctcgcgatcagttagaacgtgtgttgttcgatgaacttggtctccctcctatcggcaagacagagaagaccggtaaacgtagcacttcagcggcggttttagaagctcttcgcgaagtccatcccattgtggacaagatcttgcagtaccgcgaaatggcgaaattgaaaggcacctatattgaccgtcttccggcattagtccacccgaaaacgggacgcctccatacccgcttcaaccaaacagccacggcgaccggtcgtttgtcctcctctgatccaaaccttcagaatattccagtacgtaccccattgggccagaagatccgccgtgcgtttgtagctgaggagggttggcgtttagtggccctcgattatcgtcaaattgaattacgtgtccttgcccatctttctggcgatgagaacctcatccgcgtgtttcaggaaggcaaagacattcacactcaaacggcaagctggatgtttggattatcagctgaagcgatcgatcctttgatgcgtcgtgcagcgaagaccatcaatttcggtgttctctacggtatgagtgcctttcgtttgtcgcaggaattaggcattccctatgaagaagctcaggcgttcattcagaaatactttcaaagctatcccaaagttaaagcatggatcgagaagactctccgtgaaggccgcacacgtggttacgtagagaccttatttggacgtcgccgctatgttcccgatttaaacgctcgcgtgaaaggcaagcgtgaagccgccgaacgcatggcgttcaacatgcctgtacagggcacggcagctgacctcatgaaacttgcaatggtgcgcctttttccacaattgcgtgaagttggtgcccgcatgctcttgcaggtccacgatgaactcttgttagaagcgccaaaagagcgtgcggaagaggtggcagccctcgcgaaagaagttatgtcgggcgtgtggcccttagcggtgcctcttgaagtcgaagttggtattggcgaggattggctggctgccaaagga

SEQ ID NO: 5594 - protein, 841 aa, synthetic construct
  REGION 1..841: note = Variant of DNA polymerase I from Thermus sp. strain 2.9
MHHHHHHGGSGVLPVFEPKGRVLLVDGHHLAYRNFFALKGLTTSLGEPVQGVYGFAKSLLKALKEDGDVVIVVFDAKAPSFRHEAYEAYKAGRAPTPEDFPRQLALMKELVDLLGLERLEVPGFEADDVLATLAKKAEREGYEVQILTADRDLFQLLSPRISVLHPEGHRITPEWLWEKYGLRPEQWVDFRALAGDPSDNIPGVKGIGEKTALKLLKEWGSLENLLKNLDQVKPESVREKILAHLEDLKLSRELSRVRTDLPLEVDFGRRREPDWEGLKAFLERLEFGSLLHEFGLLESPLLAEEAPWPPPEGAFLGYRLSRPEPMWAELLALAASAQGRVYRAEDPHGALRGLFEVRGLLAKDLAVVALREGLDLPPTDDPMLLAYLLDPSNTTPEGVARRYGGEWTEDAAKRALLAERLHENLLGRLQGEERLLWLYEEVEKPLSRVLAHMEATGVKLDVAYLENLSLEVAAHMRRLEEEVFRLAGRSFRLNSRDQLERVLFDELGLPPIGKTEKTGKRSTSAAVLEALREVHPIVDKILQYREMAKLKGTYIDRLPALVHPKTGRLHTRFNQTATATGRLSSSDPNLQNIPVRTPLGQKIRRAFVAEEGWRLVALDYRQIELRVLAHLSGDENLIRVFQEGKDIHTQTASWMFGLSAEAIDPLMRRAAKTINFGVLYGMSAFRLSQELGIPYEEAQAFIQKYFQSYPKVKAWIEKTLREGRTRGYVETLFGRRRYVPDLNARVKGKREAAERMAFNMPVQGTAADLMKLAMVRLFPQLREVGARMLLQVHDELLLEAPKERAEEVAALAKEVMSGVWPLAVPLEVEVGIGEDWLAAKG

SEQ ID NO: 5595 - DNA, 2523 bp, synthetic construct
  misc_feature 1..2523: note = Variant of DNA polymerase I from Thermus sp. strain 2.9
  source 1..2523: mol_type = other DNA
atgcaccatcatcatcatcatggcggtagcggcgtgttaccggtgttcgagcctaaaggtcgcgtgcttctggttgatggccatcatctcgcgtatcgtaacttctttgccctgaaaggattaaccaccagcctgggcgagccggtacagggtgtctacggctttgcaaagtcgctcctgaaagctctgaaagaagacggtgatgtggtgattgttgtctttgatgcgaaagcgccaagttttcgccacgaagcgtacgaagcttacaaagccgggcgtgctccaacgccggaagactttcctcgccaattggcgcttatgaaggaattagtggatttgcttggcctcgaacgcttggaagttcccggtttcgaggcagacgacgtattagcgactctcgcaaagaaagccgaacgtgagggctatgaagtccagatcttgacagcagatcgcgatcttttccagcttttatctccgcgcatctcggtgttacacccggaagggcatcgtatcaccccggaatggctctgggagaaatatggtttgcgtcccgaacaatgggtggattttcgcgccttagcaggcgatccgagcgacaatattccgggagttaaaggtatcggcgagaagacggcgctcaagctccttaaagaatgggggtcgttggagaacttgcttaagaatttagatcaggtcaaaccagagtcagtgcgtgagaagattcttgctcacctcgaagacctcaaattaagccgcgaattgtcccgtgtacgcaccgatttgccgctcgaagttgatttcggtcgccgccgcgaacctgactgggagggtcttaaagcgtttttagagcgtcttgaatttggttcgctcttgcatgaattcggccttttagaaagcccgttactggccgaagaagcaccttggccaccgcccgagggcgcgtttttaggttaccgtttgagtcgcccggaaccgatgtgggccgaattactggctcttgcagcgtctgcccagggacgtgtgtatcgcgcggaagaccctcatggtgcgctccgcggcctcttcgaagtccgtggactccttgccaaagacttagctgttgttgcattgcgcgaaggtcttgatttacctccgactgatgatccaatgcttcttgcgtacctcttggacccgtcaaacacgacgcccgaaggcgtagcccgtcgttacggcggcgagtggaccgaagatgcagcgaaacgcgcgttattggccgaacgtttgcacgaaaatttattaggacgtttgcaaggcgaggaacgtctcctctggctttacgaagaagtggagaaaccattgagtcgcgtgctcgcgcatatggaagctaccggtgtcaaattagacgtggcgtatttggagaatctcagccttgaagttgctgcccacatgcgccgcttggaggaagaagtattccgtttagcaggccgttcctttcgccttaactctcgcgatcagttagaacgtgtgttgttcgatgaacttggtctccctcctatcggcaagacagagaagaccggtaaacgtagcacttcagcggcggttttagaagctcttcgcgaagtccatcccattgtggacaagatcttgcagtaccgcgaaatggcgaaattgaaaggcacctatattgaccgtcttccggcattagtccacccgaaaacgggacgcctccatacccgcttcaaccaaacagccacggcgaccggtcgtttgtcctcctctgatccaaaccttcagaatattccagtacgtaccccattgggccagaagatccgccgtgcgtttgtagctgagtggggttggcgtttagtggccctcgattatcgtcaaattgaattacgtgtccttgcccatctttctggcgatgagaacctcatccgcgtgtttcaggaaggcaaagacattcacactcaaacggcaagctggatgtttggattatcagctgaagcgatcgatcctttgatgcgtcgtgcagcgaagaccatcaatttcggtgttctctacggtatgagtgcctttcgtttgtcgcaggaattaggcattccctatgaagaagctcaggcgttcattcagaaatactttcaaagctatcccaaagttaaagcatggatcgagaagactctccgtgaaggccgcacacgtggttacgtagagaccttatttggacgtcgccgctatgttcccgatttaaacgctcgcgtgaaaggcaagcgtgaagccgccgaacgcatggcgttcaacatgcctgtacagggcacggcagctgacctcatgaaacttgcaatggtgcgcctttttccacaattgcgtgaagttggtgcccgcatgctcttgcaggtccacgatgaactcttgttagaagcgccaaaagagcgtgcggaagaggtggcagccctcgcgaaagaagttatggaaggcgtgtggcccttagcggtgcctcttgaagtcgaagttggtattggcgaggattggctggctgccaaagga

SEQ ID NO: 5596 - protein, 841 aa, synthetic construct
  REGION 1..841: note = Variant of DNA polymerase I from Thermus sp. strain 2.9
MHHHHHHGGSGVLPVFEPKGRVLLVDGHHLAYRNFFALKGLTTSLGEPVQGVYGFAKSLLKALKEDGDVVIVVFDAKAPSFRHEAYEAYKAGRAPTPEDFPRQLALMKELVDLLGLERLEVPGFEADDVLATLAKKAEREGYEVQILTADRDLFQLLSPRISVLHPEGHRITPEWLWEKYGLRPEQWVDFRALAGDPSDNIPGVKGIGEKTALKLLKEWGSLENLLKNLDQVKPESVREKILAHLEDLKLSRELSRVRTDLPLEVDFGRRREPDWEGLKAFLERLEFGSLLHEFGLLESPLLAEEAPWPPPEGAFLGYRLSRPEPMWAELLALAASAQGRVYRAEDPHGALRGLFEVRGLLAKDLAVVALREGLDLPPTDDPMLLAYLLDPSNTTPEGVARRYGGEWTEDAAKRALLAERLHENLLGRLQGEERLLWLYEEVEKPLSRVLAHMEATGVKLDVAYLENLSLEVAAHMRRLEEEVFRLAGRSFRLNSRDQLERVLFDELGLPPIGKTEKTGKRSTSAAVLEALREVHPIVDKILQYREMAKLKGTYIDRLPALVHPKTGRLHTRFNQTATATGRLSSSDPNLQNIPVRTPLGQKIRRAFVAEWGWRLVALDYRQIELRVLAHLSGDENLIRVFQEGKDIHTQTASWMFGLSAEAIDPLMRRAAKTINFGVLYGMSAFRLSQELGIPYEEAQAFIQKYFQSYPKVKAWIEKTLREGRTRGYVETLFGRRRYVPDLNARVKGKREAAERMAFNMPVQGTAADLMKLAMVRLFPQLREVGARMLLQVHDELLLEAPKERAEEVAALAKEVMEGVWPLAVPLEVEVGIGEDWLAAKG

SEQ ID NO: 5597 - DNA, 2523 bp, synthetic construct
  misc_feature 1..2523: note = Variant of DNA polymerase I from Thermus sp. strain 2.9
  source 1..2523: mol_type = other DNA
atgcaccatcatcatcatcatggcggtagcggcgtgttaccggtgttcgagcctaaaggtcgcgtgcttctggttgatggccatcatctcgcgtatcgtaacttctttgccctgaaaggattaaccaccagcctgggcgagccggtacagggtgtctacggctttgcaaagtcgctcctgaaagctctgaaagaagacggtgatgtggtgattgttgtctttgatgcgaaagcgccaagttttcgccacgaagcgtacgaagcttacaaagccgggcgtgctccaacgccggaagactttcctcgccaattggcgcttatgaaggaattagtggatttgcttggcctcgaacgcttggaagttcccggtttcgaggcagacgacgtattagcgactctcgcaaagaaagccgaacgtgagggctatgaagtccagatcttgacagcagatcgcgatcttttccagcttttatctccgcgcatctcggtgttacacccggaagggcatcgtatcaccccggaatggctctgggagaaatatggtttgcgtcccgaacaatgggtggattttcgcgccttagcaggcgatccgagcgacaatattccgggagttaaaggtatcggcgagaagacggcgctcaagctccttaaagaatgggggtcgttggagaacttgcttaagaatttagatcaggtcaaaccagagtcagtgcgtgagaagattcttgctcacctcgaagacctcaaattaagccgcgaattgtcccgtgtacgcaccgatttgccgctcgaagttgatttcggtcgccgccgcgaacctgactgggagggtcttaaagcgtttttagagcgtcttgaatttggttcgctcttgcatgaattcggccttttagaaagcccgttactggccgaagaagcaccttggccaccgcccgagggcgcgtttttaggttaccgtttgagtcgcccggaaccgatgtgggccgaattactggctcttgcagcgtctgcccagggacgtgtgtatcgcgcggaagaccctcatggtgcgctccgcggcctcttcgaagtccgtggactccttgccaaagacttagctgttgttgcattgcgcgaaggtcttgatttacctccgactgatgatccaatgcttcttgcgtacctcttggacccgtcaaacacgacgcccgaaggcgtagcccgtcgttacggcggcgagtggaccgaagatgcagcgactcgcgcgttattggccgaacgtttgcacgaaaatttattaggacgtttgcaaggcgaggaacgtctcctctggctttacgaagaagtggagaaaccattgagtcgcgtgctcgcgcatatggaagctaccggtgtcaaattagacgtggcgtatttggagaatctcagccttgaagttgctgcccacatgcgccgcttggaggaagaagtattccgtttagcaggccgttcctttcgccttaactctcgcgatcagttagaacgtgtgttgttcgatgaacttggtctccctcctatcggcaagacagagaagaccggtaaacgtagcacttcagcggcggttttagaagctcttcgcgaagtccatcccattgtggacaagatcttgcagtaccgcgaaatggcgaaattgaaaggcacctatattgaccgtcttccggcattagtccacccgaaaacgggacgcctccatacccgcttcaaccaaacagccacggcgaccggtcgtttgtcctcctctgatccaaaccttcagaatattccagtacgtaccccattgggccagaagatccgccgtgcgtttgtagctgaggagggttggcgtttagtggccctcgattatcgtcaaattgaattacgtgtccttgcccatctttctggcgatgagaacctcatccgcgtgtttcaggaaggcaaagacattcacactcaaacggcaagctggatgtttggattatcagctgaagcgatcgatcctttgatgcgtcgtgcagcgaagaccatcaatttcggtgttctctacggtatgagtgcctttcgtttgtcgcaggaattaggcattccctatgaagaagctcaggcgttcattcagaaatactttcaaagctatcccaaagttaaagcatggatcgagaagactctccgtgaaggccgcacacgtggttacgtagagaccttatttggacgtcgccgctatgttcccgatttaaacgctcgcgtgaaaggcaagcgtgaagccgccgaacgcatggcgttcaacatgcctgtacagggcacggcagctgacctcatgaaacttgcaatggtgcgcctttttccacaattgcgtgaagttggtgcccgcatgctcttgcaggtccacgatgaactcttgttagaagcgccaaaagagcgtgcggaagaggtggcagccctcgcgaaagaagttatggaaggcgtgtggcccttagcggtgcctcttgaagtcgaagttggtattggcgaggattggctggctgccaaagga

SEQ ID NO: 5598 - protein, 841 aa, synthetic construct
  REGION 1..841: note = Variant of DNA polymerase I from Thermus sp. strain 2.9
MHHHHHHGGSGVLPVFEPKGRVLLVDGHHLAYRNFFALKGLTTSLGEPVQGVYGFAKSLLKALKEDGDVVIVVFDAKAPSFRHEAYEAYKAGRAPTPEDFPRQLALMKELVDLLGLERLEVPGFEADDVLATLAKKAEREGYEVQILTADRDLFQLLSPRISVLHPEGHRITPEWLWEKYGLRPEQWVDFRALAGDPSDNIPGVKGIGEKTALKLLKEWGSLENLLKNLDQVKPESVREKILAHLEDLKLSRELSRVRTDLPLEVDFGRRREPDWEGLKAFLERLEFGSLLHEFGLLESPLLAEEAPWPPPEGAFLGYRLSRPEPMWAELLALAASAQGRVYRAEDPHGALRGLFEVRGLLAKDLAVVALREGLDLPPTDDPMLLAYLLDPSNTTPEGVARRYGGEWTEDAATRALLAERLHENLLGRLQGEERLLWLYEEVEKPLSRVLAHMEATGVKLDVAYLENLSLEVAAHMRRLEEEVFRLAGRSFRLNSRDQLERVLFDELGLPPIGKTEKTGKRSTSAAVLEALREVHPIVDKILQYREMAKLKGTYIDRLPALVHPKTGRLHTRFNQTATATGRLSSSDPNLQNIPVRTPLGQKIRRAFVAEEGWRLVALDYRQIELRVLAHLSGDENLIRVFQEGKDIHTQTASWMFGLSAEAIDPLMRRAAKTINFGVLYGMSAFRLSQELGIPYEEAQAFIQKYFQSYPKVKAWIEKTLREGRTRGYVETLFGRRRYVPDLNARVKGKREAAERMAFNMPVQGTAADLMKLAMVRLFPQLREVGARMLLQVHDELLLEAPKERAEEVAALAKEVMEGVWPLAVPLEVEVGIGEDWLAAKG

SEQ ID NO: 5599 - DNA, 2523 bp, synthetic construct
  misc_feature 1..2523: note = Variant of DNA polymerase I from Thermus sp. strain 2.9
  source 1..2523: mol_type = other DNA
atgcaccatcatcatcatcatggcggtagcggcgtgttaccggtgttcgagcctaaaggtcgcgtgcttctggttgatggccatcatctcgcgtatcgtaacttctttgccctgaaaggattaaccaccagcctgggcgagccggtacagggtgtctacggctttgcaaagtcgctcctgaaagctctgaaagaagacggtgatgtggtgattgttgtctttgatgcgaaagcgccaagttttcgccacgaagcgtacgaagcttacaaagccgggcgtgctccaacgccggaagactttcctcgccaattggcgcttatgaaggaattagtggatttgcttggcctcgaacgcttggaagttcccggtttcgaggcagacgacgtattagcgactctcgcaaagaaagccgaacgtgagggctatgaagtccagatcttgacagcagatcgcgatcttttccagcttttatctccgcgcatctcggtgttacacccggaagggcatcgtatcaccccggaatggctctgggagaaatatggtttgcgtcccgaacaatgggtggattttcgcgccttagcaggcgatccgagcgacaatattccgggagttaaaggtatcggcgagaagacggcgctcaagctccttaaagaatgggggtcgttggagaacttgcttaagaatttagatcaggtcaaaccagagtcagtgcgtgagaagattcttgctcacctcgaagacctcaaattaagccgcgaattgtcccgtgtacgcaccgatttgccgctcgaagttgatttcggtcgccgccgcgaacctgactgggagggtcttaaagcgtttttagagcgtcttgaatttggttcgctcttgcatgaattcggccttttagaaagcccgttactggccgaagaagcaccttggccaccgcccgagggcgcgtttttaggttaccgtttgagtcgcccggaaccgatgtgggccgaattactggctcttgcagcgtctgcccagggacgtgtgtatcgcgcggaagaccctcatggtgcgctccgcggcctcttcgaagtccgtggactccttgccaaagacttagctgttgttgcattgcgcgaaggtcttgatttacctccgactgatgatccaatgcttcttgcgtacctcttggacccgtcaaacacgacgcccgaaggcgtagcccgtcgttacggcggcgagtggaccgaagatgcagcgaaacgcgcgttattggccgaacgtttgcacgaaaatttattaggacgtttgcaaggcgaggaacgtctcctctggctttacgaagaagtggagaaaccattgagtcgcgtgctcgcgcatatggaagctaccggtgtcaaattagacgtggcgtatttggagaatctcagccttgaagttgctgcccacatgcgccgcttggaggaagaagtattccgtttagcaggccgttcctttcgccttaactctcgcgatcagttagaacgtgtgttgttcgatgaacttggtctccctgctatcggcaagacagagaagaccggtaaacgtagcacttcagcggcggttttagaagctcttcgcgaagtccatcccattgtggacaagatcttgcagtaccgcgaaatggcgaaattgaaaggcacctatattgaccgtcttccggcattagtccacccgaaaacgggacgcctccatacccgcttcaaccaaacagccacggcgaccggtcgtttgtcctcctctgatccaaaccttcagaatattccagtacgtaccccattgggccagaagatccgccgtgcgtttgtagctgaggagggttggcgtttagtggccctcgattatcgtcaaattgaattacgtgtccttgcccatctttctggcgatgagaacctcatccgcgtgtttcaggaaggcaaagacattcacactcaaacggcaagctggatgtttggattatcagctgaagcgatcgatcctttgatgcgtcgtgcagcgaagaccatcaatttcggtgttctctacggtatgagtgcctttcgtttgtcgcaggaattaggcattccctatgaagaagctcaggcgttcattcagaaatactttcaaagctatcccaaagttaaagcatggatcgagaagactctccgtgaaggccgcacacgtggttacgtagagaccttatttggacgtcgccgctatgttcccgatttaaacgctcgcgtgaaaggcaagcgtgaagccgccgaacgcatggcgttcaacatgcctgtacagggcacggcagctgacctcatgaaacttgcaatggtgcgcctttttccacaattgcgtgaagttggtgcccgcatgctcttgcaggtccacgatgaactcttgttagaagcgccaaaagagcgtgcggaagaggtggcagccctcgcgaaagaagttatggaaggcgtgtggcccttagcggtgcctcttgaagtcgaagttggtattggcgaggattggctggctgccaaagga

SEQ ID NO: 5600 - protein, 841 aa, synthetic construct
  REGION 1..841: note = Variant of DNA polymerase I from Thermus sp. strain 2.9
MHHHHHHGGSGVLPVFEPKGRVLLVDGHHLAYRNFFALKGLTTSLGEPVQGVYGFAKSLLKALKEDGDVVIVVFDAKAPSFRHEAYEAYKAGRAPTPEDFPRQLALMKELVDLLGLERLEVPGFEADDVLATLAKKAEREGYEVQILTADRDLFQLLSPRISVLHPEGHRITPEWLWEKYGLRPEQWVDFRALAGDPSDNIPGVKGIGEKTALKLLKEWGSLENLLKNLDQVKPESVREKILAHLEDLKLSRELSRVRTDLPLEVDFGRRREPDWEGLKAFLERLEFGSLLHEFGLLESPLLAEEAPWPPPEGAFLGYRLSRPEPMWAELLALAASAQGRVYRAEDPHGALRGLFEVRGLLAKDLAVVALREGLDLPPTDDPMLLAYLLDPSNTTPEGVARRYGGEWTEDAAKRALLAERLHENLLGRLQGEERLLWLYEEVEKPLSRVLAHMEATGVKLDVAYLENLSLEVAAHMRRLEEEVFRLAGRSFRLNSRDQLERVLFDELGLPAIGKTEKTGKRSTSAAVLEALREVHPIVDKILQYREMAKLKGTYIDRLPALVHPKTGRLHTRFNQTATATGRLSSSDPNLQNIPVRTPLGQKIRRAFVAEEGWRLVALDYRQIELRVLAHLSGDENLIRVFQEGKDIHTQTASWMFGLSAEAIDPLMRRAAKTINFGVLYGMSAFRLSQELGIPYEEAQAFIQKYFQSYPKVKAWIEKTLREGRTRGYVETLFGRRRYVPDLNARVKGKREAAERMAFNMPVQGTAADLMKLAMVRLFPQLREVGARMLLQVHDELLLEAPKERAEEVAALAKEVMEGVWPLAVPLEVEVGIGEDWLAAKG

SEQ ID NO: 5601 - DNA, 2523 bp, synthetic construct
  misc_feature 1..2523: note = Variant of DNA polymerase I from Thermus sp. strain 2.9
  source 1..2523: mol_type = other DNA
atgcaccatcatcatcatcatggcggtagcggcgtgttaccggtgttcgagcctaaaggtcgcgtgcttctggttgatggccatcatctcgcgtatcgtaacttctttgccctgaaaggattaaccaccagcctgggcgagccggtacagggtgtctacggctttgcaaagtcgctcctgaaagctctgaaagaagacggtgatgtggtgattgttgtctttgatgcgaaagcgccaagttttcgccacgaagcgtacgaagcttacaaagccgggcgtgctccaacgccggaagactttcctcgccaattggcgcttatgaaggaattagtggatttgcttggcctcgaacgcttggaagttcccggtttcgaggcagacgacgtattagcgactctcgcaaagaaagccgaacgtgagggctatgaagtccagatcttgacagcagatcgcgatcttttccagcttttatctccgcgcatctcggtgttacacccggaagggcatcgtatcaccccggaatggctctgggagaaatatggtttgcgtcccgaacaatgggtggattttcgcgccttagcaggcgatccgagcgacaatattccgggagttaaaggtatcggcgagaagacggcgctcaagctccttaaagaatgggggtcgttggagaacttgcttaagaatttagatcaggtcaaaccagagtcagtgcgtgagaagattcttgctcacctcgaagacctcaaattaagccgcgaattgtcccgtgtacgcaccgatttgccgctcgaagttgatttcggtcgccgccgcgaacctgactgggagggtcttaaagcgtttttagagcgtcttgaatttggttcgctcttgcatgaattcggccttttagaaagcccgttactggccgaagaagcaccttggccaccgcccgagggcgcgtttttaggttaccgtttgagtcgcccggaaccgatgtgggccgaattactggctcttgcagcgtctgcccagggacgtgtgtatcgcgcggaagaccctcatggtgcgctccgcggcctcttcgaagtccgtggactccttgccaaaacgttagctgttgttgcattgcgcgaaggtcttgatttacctccgactgatgatccaatgcttcttgcgtacctcttggacccgtcaaacacgacgcccgaaggcgtagcccgtcgttacggcggcgagtggaccgaagatgcagcgaaacgcgcgttattggccgaacgtttgcacgaaaatttattaggacgtttgcaaggcgaggaacgtctcctctggctttacgaagaagtggagaaaccattgagtcgcgtgctcgcgcatatggaagctaccggtgtcaaattagacgtggcgtatttggagaatctcagccttgaagttgctgcccacatgcgccgcttggaggaagaagtattccgtttagcaggccgttcctttcgccttaactctcgcgatcagttagaacgtgtgttgttcgatgaacttggtctccctcctatcggcaagacagagaagaccggtaaacgtagcacttcagcggcggttttagaagctcttcgcgaagtccatcccattgtggacaagatcttgcagtaccgcgaaatggcgaaattgaaaggcacctatattgaccgtcttccggcattagtccacccgaaaacgggacgcctccatacccgcttcaaccaaacagccacggcgaccggtcgtttgtcctcctctgatccaaaccttcagaatattccagtacgtaccccattgggccagaagatccgccgtgcgtttgtagctgaggagggttggcgtttagtggccctcgattatcgtcaaattgaattacgtgtccttgcccatctttctggcgatgagaacctcatccgcgtgtttcaggaaggcaaagacattcacactcaaacggcaagctggatgtttggattatcagctgaagcgatcgatcctttgatgcgtcgtgcagcgaagaccatcaatttcggtgttctctacggtatgagtgcctttcgtttgtcgcaggaattaggcattccctatgaagaagctcaggcgttcattcagaaatactttcaaagctatcccaaagttaaagcatggatcgagaagactctccgtgaaggccgcacacgtggttacgtagagaccttatttggacgtcgccgctatgttcccgatttaaacgctcgcgtgaaaggcaagcgtgaagccgccgaacgcatggcgttcaacatgcctgtacagggcacggcagctgacctcatgaaacttgcaatggtgcgcctttttccacaattgcgtgaagttggtgcccgcatgctcttgcaggtccacgatgaactcttgttagaagcgccaaaagagcgtgcggaagaggtggcagccctcgcgaaagaagttatggaaggcgtgtggcccttagcggtgcctcttgaagtcgaagttggtattggcgaggattggctggctgccaaagga

SEQ ID NO: 5602 - protein, 841 aa, synthetic construct
  REGION 1..841: note = Variant of DNA polymerase I from Thermus sp. strain 2.9
MHHHHHHGGSGVLPVFEPKGRVLLVDGHHLAYRNFFALKGLTTSLGEPVQGVYGFAKSLLKALKEDGDVVIVVFDAKAPSFRHEAYEAYKAGRAPTPEDFPRQLALMKELVDLLGLERLEVPGFEADDVLATLAKKAEREGYEVQILTADRDLFQLLSPRISVLHPEGHRITPEWLWEKYGLRPEQWVDFRALAGDPSDNIPGVKGIGEKTALKLLKEWGSLENLLKNLDQVKPESVREKILAHLEDLKLSRELSRVRTDLPLEVDFGRRREPDWEGLKAFLERLEFGSLLHEFGLLESPLLAEEAPWPPPEGAFLGYRLSRPEPMWAELLALAASAQGRVYRAEDPHGALRGLFEVRGLLAKTLAVVALREGLDLPPTDDPMLLAYLLDPSNTTPEGVARRYGGEWTEDAAKRALLAERLHENLLGRLQGEERLLWLYEEVEKPLSRVLAHMEATGVKLDVAYLENLSLEVAAHMRRLEEEVFRLAGRSFRLNSRDQLERVLFDELGLPPIGKTEKTGKRSTSAAVLEALREVHPIVDKILQYREMAKLKGTYIDRLPALVHPKTGRLHTRFNQTATATGRLSSSDPNLQNIPVRTPLGQKIRRAFVAEEGWRLVALDYRQIELRVLAHLSGDENLIRVFQEGKDIHTQTASWMFGLSAEAIDPLMRRAAKTINFGVLYGMSAFRLSQELGIPYEEAQAFIQKYFQSYPKVKAWIEKTLREGRTRGYVETLFGRRRYVPDLNARVKGKREAAERMAFNMPVQGTAADLMKLAMVRLFPQLREVGARMLLQVHDELLLEAPKERAEEVAALAKEVMEGVWPLAVPLEVEVGIGEDWLAAKG

SEQ ID NO: 5603 - DNA, 2523 bp, synthetic construct
  misc_feature 1..2523: note = Variant of DNA polymerase I from Thermus sp. strain 2.9
  source 1..2523: mol_type = other DNA
atgcaccatcatcatcatcatggcggtagcggcgtgttaccggtgttcgagcctaaaggtcgcgtgcttctggttgatggccatcatctcgcgtatcgtaacttctttgccctgaaaggattaaccaccagcctgggcgagccggtacagggtgtctacggctttgcaaagtcgctcctgaaagctctgaaagaagacggtgatgtggtgattgttgtctttgatgcgaaagcgccaagttttcgccacgaagcgtacgaagcttacaaagccgggcgtgctccaacgccggaagactttcctcgccaattggcgcttatgaaggaattagtggatttgcttggcctcgaacgcttggaagttcccggtttcgaggcagacgacgtattagcgactctcgcaaagaaagccgaacgtgagggctatgaagtccagatcttgacagcagatcgcgatcttttccagcttttatctccgcgcatctcggtgttacacccggaagggcatcgtatcaccccggaatggctctgggagaaatatggtttgcgtcccgaacaatgggtggattttcgcgccttagcaggcgatccgagcgacaatattccgggagttaaaggtatcggcgagaagacggcgctcaagctccttaaagaatgggggtcgttggagaacttgcttaagaatttagatcaggtcaaaccagagtcagtgcgtgagaagattcttgctcacctcgaagacctcaaattaagccgcgaattgtcccgtgtacgcaccgatttgccgctcgaagttgatttcggtcgccgccgcgaacctgactgggagggtcttaaagcgtttttagagcgtcttgaatttggttcgctcttgcatgaattcggccttttagaaagcccgttactggccgaagaagcaccttggccaccgcccgagggcgcgtttttaggttaccgtttgagtcgcccggaaccgatgtgggccgaattactggctcttgcagcgtctgcccagggacgtgtgtatcgcgcggaagaccctcatggtgcgctccgcggcctcttcgaagtccgtggactccttgccaaagacttagctgttgttgcattgcgcgaaggtcttgatttacctccgactgatgatccaatgcttcttgcgtacctcttggacccgtcaaacacgacgcccgaaggcgtagcccgtcgttacggcggcgagtggaccgaagatgcagcgaaacgcgcgttattggccgaacgtttgcacgaaaatttattaggacgtttgcaaggcgaggaacgtctcctctggctttacgaagaagtggagaaaccattgagtcgcgtgctcgcgcatatggaagctaccggtgtcaaattagacgtggcgtatttggagaatcttcacctttttgttgctgcccacatgcgccgcttggaggaagaagtattccgtttagcaggccgttcctttcgccttaactctcgcgatcagttagaacgtgtgttgttcgatgaacttggtctccctcctatcggcaagacagagaagaccggtaaacgtagcacttcagcggcggttttagaagctcttcgcgaagtccatcccattgtggacaagatcttgcagtaccgcgaaatggcgaaattgaaaggcacctatattgaccgtcttccggcattagtccacccgaaaacgggacgcctccatacccgcttcaaccaaacagccacggcgaccggtcgtttgtcctcctctgatccaaaccttcagaatattccagtacgtaccccattgggccagaagatccgccgtgcgtttgtagctgaggagggttggcgtttagtggccctcgattatcgtcaaattgaattacgtgtccttgcccatctttctggcgatgagaacctcatccgcgtgtttcaggaaggcaaagacattcacactcaaacggcaagctggatgtttggattatcagctgaagcgatcgatcctttgatgcgtcgtgcagcgaagaccatcaatttcggtgttctctacggtatgagtgcctttcgtttgtcgcaggaattaggcattccctatgaagaagctcaggcgttcattcagaaatactttcaaagctatcccaaagttaaagcatggatcgagaagactctccgtgaaggccgcacacgtggttacgtagagaccttatttggacgtcgccgctatgttcccgatttaaacgctcgcgtgaaaggcaagcgtgaagccgccgaacgcatggcgttcaacatgcctgtacagggcacggcagctgacctcatgaaacttgcaatggtgcgcctttttccacaattgcgtgaagttggtgcccgcatgctcttgcaggtccacgatgaactcttgttagaagcgccaaaagagcgtgcggaagaggtggcagccctcgcgaaagaagttatggaaggcgtgtggcccttagcggtgcctcttgaagtcgaagttggtattggcgaggattggctggctgccaaagga

SEQ ID NO: 5604 - protein, 841 aa, synthetic construct
  REGION 1..841: note = Variant of DNA polymerase I from Thermus sp. strain 2.9
MHHHHHHGGSGVLPVFEPKGRVLLVDGHHLAYRNFFALKGLTTSLGEPVQGVYGFAKSLLKALKEDGDVVIVVFDAKAPSFRHEAYEAYKAGRAPTPEDFPRQLALMKELVDLLGLERLEVPGFEADDVLATLAKKAEREGYEVQILTADRDLFQLLSPRISVLHPEGHRITPEWLWEKYGLRPEQWVDFRALAGDPSDNIPGVKGIGEKTALKLLKEWGSLENLLKNLDQVKPESVREKILAHLEDLKLSRELSRVRTDLPLEVDFGRRREPDWEGLKAFLERLEFGSLLHEFGLLESPLLAEEAPWPPPEGAFLGYRLSRPEPMWAELLALAASAQGRVYRAEDPHGALRGLFEVRGLLAKDLAVVALREGLDLPPTDDPMLLAYLLDPSNTTPEGVARRYGGEWTEDAAKRALLAERLHENLLGRLQGEERLLWLYEEVEKPLSRVLAHMEATGVKLDVAYLENLHLFVAAHMRRLEEEVFRLAGRSFRLNSRDQLERVLFDELGLPPIGKTEKTGKRSTSAAVLEALREVHPIVDKILQYREMAKLKGTYIDRLPALVHPKTGRLHTRFNQTATATGRLSSSDPNLQNIPVRTPLGQKIRRAFVAEEGWRLVALDYRQIELRVLAHLSGDENLIRVFQEGKDIHTQTASWMFGLSAEAIDPLMRRAAKTINFGVLYGMSAFRLSQELGIPYEEAQAFIQKYFQSYPKVKAWIEKTLREGRTRGYVETLFGRRRYVPDLNARVKGKREAAERMAFNMPVQGTAADLMKLAMVRLFPQLREVGARMLLQVHDELLLEAPKERAEEVAALAKEVMEGVWPLAVPLEVEVGIGEDWLAAKG

SEQ ID NO: 5605 - DNA, 2523 bp, synthetic construct
  misc_feature 1..2523: note = Variant of DNA polymerase I from Thermus sp. strain 2.9
  source 1..2523: mol_type = other DNA
atgcaccatcatcatcatcatggcggtagcggcgtgttaccggtgttcgagcctaaaggtcgcgtgcttctggttgatggccatcatctcgcgtatcgtaacttctttgccctgaaaggattaaccaccagcctgggcgagccggtacagggtgtctacggctttgcaaagtcgctcctgaaagctctgaaagaagacggtgatgtggtgattgttgtctttgatgcgaaagcgccaagttttcgccacgaagcgtacgaagcttacaaagccgggcgtgctccaacgccggaagactttcctcgccaattggcgcttatgaaggaattagtggatttgcttggcctcgaacgcttggaagttcccggtttcgaggcagacgacgtattagcgactctcgcaaagaaagccgaacgtgagggctatgaagtccagatcttgacagcagatcgcgatcttttccagcttttatctccgcgcatctcggtgttacacccggaagggcatcgtatcaccccggaatggctctgggagaaatatggtttgcgtcccgaacaatgggtggattttcgcgccttagcaggcgatccgagcgacaatattccgggagttaaaggtatcggcgagaagacggcgctcaagctccttaaagaatgggggtcgttggagaacttgcttaagaatttagatcaggtcaaaccagagtcagtgcgtgagaagattcttgctcacctcgaagacctcaaattaagccgcgaattgtcccgtgtacgcaccgatttgccgctcgaagttgatttcggtcgccgccgcgaacctgactgggagggtcttaaagcgtttttagagcgtcttgaatttggttcgctcttgcatgaattcggccttttagaaagcccgttactggccgaagaagcaccttggccaccgcccgagggcgcgtttttaggttaccgtttgagtcgcccggaaccgatgtgggccgaattactggctcttgcagcgtctgcccagggacgtgtgtatcgcgcggaagaccctcatggtgcgctccgcggcctcttcgaagtccgtggactccttgccaaagacttagctgttgttgcattgcgcgaaggtcttgatttacctccgactgatgatccaatgcttcttgcgtacctcttggacccgtcaaacacgacgcccgaaggcgtagcccgtcgttacggcggcgagtggaccgaagatgcagcgaaacgcgcgttattggccgaacgtttgcacgaaaatttattaggacgtttgcaaggcgaggaacgtctcctctggctttacgaagaagtggagaaaccattgagtcgcgtgctcgcgcatatggaagctaccggtgtcaaattagacgtggcgtatttggagacgcttcaccttgaagttgctgcccacatgcgccgcttggaggaagaagtattccgtttagcaggccgttcctttcgccttaactctcgcgatcagttagaacgtgtgttgttcgatgaacttggtctccctcctatcggcaagacagagaagaccggtaaacgtagcacttcagcggcggttttagaagctcttcgcgaagtccatcccattgtggacaagatcttgcagtaccgcgaaatggcgaaattgaaaggcacctatattgaccgtcttccggcattagtccacccgaaaacgggacgcctccatacccgcttcaaccaaacagccacggcgaccggtcgtttgtcctcctctgatccaaaccttcagaatattccagtacgtaccccattgggccagaagatccgccgtgcgtttgtagctgaggagggttggcgtttagtggccctcgattatcgtcaaattgaattacgtgtccttgcccatctttctggcgatgagaacctcatccgcgtgtttcaggaaggcaaagacattcacactcaaacggcaagctggatgtttggattatcagctgaagcgatcgatcctttgatgcgtcgtgcagcgaagaccatcaatttcggtgttctctacggtatgagtgcctttcgtttgtcgcaggaattaggcattccctatgaagaagctcaggcgttcattcagaaatactttcaaagctatcccaaagttaaagcatggatcgagaagactctccgtgaaggccgcacacgtggttacgtagagaccttatttggacgtcgccgctatgttcccgatttaaacgctcgcgtgaaaggcaagcgtgaagccgccgaacgcatggcgttcaacatgcctgtacagggcacggcagctgacctcatgaaacttgcaatggtgcgcctttttccacaattgcgtgaagttggtgcccgcatgctcttgcaggtccacgatgaactcttgttagaagcgccaaaagagcgtgcggaagaggtggcagccctcgcgaaagaagttatggaaggcgtgtggcccttagcggtgcctcttgaagtcgaagttggtattggcgaggattggctggctgccaaagga

SEQ ID NO: 5606 - protein, 841 aa, synthetic construct
  REGION 1..841: note = Variant of DNA polymerase I from Thermus sp. strain 2.9
MHHHHHHGGSGVLPVFEPKGRVLLVDGHHLAYRNFFALKGLTTSLGEPVQGVYGFAKSLLKALKEDGDVVIVVFDAKAPSFRHEAYEAYKAGRAPTPEDFPRQLALMKELVDLLGLERLEVPGFEADDVLATLAKKAEREGYEVQILTADRDLFQLLSPRISVLHPEGHRITPEWLWEKYGLRPEQWVDFRALAGDPSDNIPGVKGIGEKTALKLLKEWGSLENLLKNLDQVKPESVREKILAHLEDLKLSRELSRVRTDLPLEVDFGRRREPDWEGLKAFLERLEFGSLLHEFGLLESPLLAEEAPWPPPEGAFLGYRLSRPEPMWAELLALAASAQGRVYRAEDPHGALRGLFEVRGLLAKDLAVVALREGLDLPPTDDPMLLAYLLDPSNTTPEGVARRYGGEWTEDAAKRALLAERLHENLLGRLQGEERLLWLYEEVEKPLSRVLAHMEATGVKLDVAYLETLHLEVAAHMRRLEEEVFRLAGRSFRLNSRDQLERVLFDELGLPPIGKTEKTGKRSTSAAVLEALREVHPIVDKILQYREMAKLKGTYIDRLPALVHPKTGRLHTRFNQTATATGRLSSSDPNLQNIPVRTPLGQKIRRAFVAEEGWRLVALDYRQIELRVLAHLSGDENLIRVFQEGKDIHTQTASWMFGLSAEAIDPLMRRAAKTINFGVLYGMSAFRLSQELGIPYEEAQAFIQKYFQSYPKVKAWIEKTLREGRTRGYVETLFGRRRYVPDLNARVKGKREAAERMAFNMPVQGTAADLMKLAMVRLFPQLREVGARMLLQVHDELLLEAPKERAEEVAALAKEVMEGVWPLAVPLEVEVGIGEDWLAAKG

SEQ ID NO: 5607 - DNA, 2523 bp, synthetic construct
  misc_feature 1..2523: note = Variant of DNA polymerase I from Thermus sp. strain 2.9
  source 1..2523: mol_type = other DNA
atgcaccatcatcatcatcatggcggtagcggcgtgttaccggtgttcgagcctaaaggtcgcgtgcttctggttgatggccatcatctcgcgtatcgtaacttctttgccctgaaaggattaaccaccagcctgggcgagccggtacagggtgtctacggctttgcaaagtcgctcctgaaagctctgaaagaagacggtgatgtggtgattgttgtctttgatgcgaaagcgccaagttttcgccacgaagcgtacgaagcttacaaagccgggcgtgctccaacgccggaagactttcctcgccaattggcgcttatgaaggaattagtggatttgcttggcctcgaacgcttggaagttcccggtttcgaggcagacgacgtattagcgactctcgcaaagaaagccgaacgtgagggctatgaagtccagatcttgacagcagatcgcgatcttttccagcttttatctccgcgcatctcggtgttacacccggaagggcatcgtatcaccccggaatggctctgggagaaatatggtttgcgtcccgaacaatgggtggattttcgcgccttagcaggcgatccgagcgacaatattccgggagttaaaggtatcggcgagaagacggcgctcaagctccttaaagaatgggggtcgttggagaacttgcttaagaatttagatcaggtcaaaccagagtcagtgcgtgagaagattcttgctcacctcgaagacctcaaattaagccgcgaattgtcccgtgtacgcaccgatttgccgctcgaagttgatttcggtcgccgccgcgaacctgactgggagggtcttaaagcgtttttagagcgtcttgaatttggttcgctcttgcatgaattcggccttttagaaagcccgttactggccgaagaagcaccttggccaccgcccgagggcgcgtttttaggttaccgtttgagtcgcccggaaccgatgtgggccgaattactgactcttgcagcgtctgcccagggacgtgtgtatcgcgcggaagaccctcatggtgcgctccgcggcctcttcgaagtccgtggactccttgccaaagacttagctgttgttgcattgcgcgaaggtcttgatttacctccgactgatgatccaatgcttcttgcgtacctcttggacccgtcaaacacgacgcccgaaggcgtagcccgtcgttacggcggcgagtggaccgaagatgcagcgaaacgcgcgttattggccgaacgtttgcacgaaaatttattaggacgtttgcaaggcgaggaacgtctcctctggctttacgaagaagtggagaaaccattgagtcgcgtgctcgcgcatatggaagctaccggtgtcaaattagacgtggcgtatttggagaatctcagccttgaagttgctgcccacatgcgccgcttggaggaagaagtattccgtttagcaggccgttcctttcgccttaactctcgcgatcagttagaacgtgtgttgttcgatgaacttggtctccctcctatcggcaagacagagaagaccggtaaacgtagcacttcagcggcggttttagaagctcttcgcgaagtccatcccattgtggacaagatcttgcagtaccgcgaaatggcgaaattgaaaggcacctatattgaccgtcttccggcattagtccacccgaaaacgggacgcctccatacccgcttcaaccaaacagccacggcgaccggtcgtttgtcctcctctgatccaaaccttcagaatattccagtacgtaccccattgggccagaagatccgccgtgcgtttgtagctgaggagggttggcgtttagtggccctcgattatcgtcaaattgaattacgtgtccttgcccatctttctggcgatgagaacctcatccgcgtgtttcaggaaggcaaagacattcacactcaaacggcaagctggatgtttggattatcagctgaagcgatcgatcctttgatgcgtcgtgcagcgaagaccatcaatttcggtgttctctacggtatgagtgcctttcgtttgtcgcaggaattaggcattccctatgaagaagctcaggcgttcattcagaaatactttcaaagctatcccaaagttaaagcatggatcgagaagactctccgtgaaggccgcacacgtggttacgtagagaccttatttggacgtcgccgctatgttcccgatttaaacgctcgcgtgaaaggcaagcgtgaagccgccgaacgcatggcgttcaacatgcctgtacagggcacggcagctgacctcatgaaacttgcaatggtgcgcctttttccacaattgcgtgaagttggtgcccgcatgctcttgcaggtccacgatgaactcttgttagaagcgccaaaagagcgtgcggaagaggtggcagccctcgcgaaagaagttatggaaggcgtgtggcccttagcggtgcctcttgaagtcgaagttggtattggcgaggattggctggctgccaaagga

SEQ ID NO: 5608 - protein, 841 aa, synthetic construct
  REGION 1..841: note = Variant of DNA polymerase I from Thermus sp. strain 2.9
MHHHHHHGGSGVLPVFEPKGRVLLVDGHHLAYRNFFALKGLTTSLGEPVQGVYGFAKSLLKALKEDGDVVIVVFDAKAPSFRHEAYEAYKAGRAPTPEDFPRQLALMKELVDLLGLERLEVPGFEADDVLATLAKKAEREGYEVQILTADRDLFQLLSPRISVLHPEGHRITPEWLWEKYGLRPEQWVDFRALAGDPSDNIPGVKGIGEKTALKLLKEWGSLENLLKNLDQVKPESVREKILAHLEDLKLSRELSRVRTDLPLEVDFGRRREPDWEGLKAFLERLEFGSLLHEFGLLESPLLAEEAPWPPPEGAFLGYRLSRPEPMWAELLTLAASAQGRVYRAEDPHGALRGLFEVRGLLAKDLAVVALREGLDLPPTDDPMLLAYLLDPSNTTPEGVARRYGGEWTEDAAKRALLAERLHENLLGRLQGEERLLWLYEEVEKPLSRVLAHMEATGVKLDVAYLENLSLEVAAHMRRLEEEVFRLAGRSFRLNSRDQLERVLFDELGLPPIGKTEKTGKRSTSAAVLEALREVHPIVDKILQYREMAKLKGTYIDRLPALVHPKTGRLHTRFNQTATATGRLSSSDPNLQNIPVRTPLGQKIRRAFVAEEGWRLVALDYRQIELRVLAHLSGDENLIRVFQEGKDIHTQTASWMFGLSAEAIDPLMRRAAKTINFGVLYGMSAFRLSQELGIPYEEAQAFIQKYFQSYPKVKAWIEKTLREGRTRGYVETLFGRRRYVPDLNARVKGKREAAERMAFNMPVQGTAADLMKLAMVRLFPQLREVGARMLLQVHDELLLEAPKERAEEVAALAKEVMEGVWPLAVPLEVEVGIGEDWLAAKG

SEQ ID NO: 5609 - DNA, 2523 bp, synthetic construct
  misc_feature 1..2523: note = Variant of DNA polymerase I from Thermus sp. strain 2.9
  source 1..2523: mol_type = other DNA
atgcaccatcatcatcatcatggcggtagcggcgtgttaccggtgttcgagcctaaaggtcgcgtgcttctggttgatggccatcatctcgcgtatcgtaacttctttgccctgaaaggattaaccaccagcctgggcgagccggtacagggtgtctacggctttgcaaagtcgctcctgaaagctctgaaagaagacggtgatgtggtgattgttgtctttgatgcgaaagcgccaagttttcgccacgaagcgtacgaagcttacaaagccgggcgtgctccaacgccggaagactttcctcgccaattggcgcttatgaaggaattagtggatttgcttggcctcgaacgcttggaagttcccggtttcgaggcagacgacgtattagcgactctcgcaaagaaagccgaacgtgagggctatgaagtccagatcttgacagcagatcgcgatcttttccagcttttatctccgcgcatctcggtgttacacccggaagggcatcgtatcaccccggaatggctctgggagaaatatggtttgcgtcccgaacaatgggtggattttcgcgccttagcaggcgatccgagcgacaatattccgggagttaaaggtatcggcgagaagacggcgctcaagctccttaaagaatgggggtcgttggagaacttgcttaagaatttagatcaggtcaaaccagagtcagtgcgtgagaagattcttgctcacctcgaagacctcaaattaagccgcgaattgtcccgtgtacgcaccgatttgccgctcgaagttgatttcggtcgccgccgcgaacctgactgggagggtcttaaagcgtttttagagcgtcttgaatttggttcgctcttgcatgaattcggccttttagaaagcccgttactggccgaagaagcaccttggccaccgcccgagggcgcgtttttaggttaccgtttgagtcgcccggaaccgatgtgggccgaattactggctcttgcagcgtctgcccagggacgtgtgtatcgcgcggaagaccctcatggtgcgctccgcggcctcttcgaagtccgtggactccttgccaaagacttagctgttgttgcattgcgcgaaggtcttgatttacctccgactgatgatccaatgcttcttgcgtacctcttggacccgtcaaacacgacgcccgaaggcgtagcccgtcgttacggcggcgagtggaccgaagatgcagcgaaacgcgcgttattggccgaacgtttgcacgaaaatttattaggacgtttgcaaggcgaggaacgtctcctctggctttacgaagaagtggagaaaccattgagtcgcgtgctcgcgcatatggaagctaccggtgtcaaattagacgtggcgtatttggagaatctcagccttgaagttgctgcccacatgcgccgcttggaggaagaagtattccgtttagcaggccgttcctttcgccttaactctcgcgatcagttagaacgtgtgttgttcgatgaacttggtctccctcctatcggcaagacagagaagaccggtaaacgtagcacttcagcggcggttttagaagctcttcgcgaagtccatcccattgtggacaagatcttgcagtaccgcgaaatggcgaaattgaaaggcacctatattgaccgtcttccggcattagtccacccgaaaacgggacgcctccatacccgcttcaaccaaacagccacggcgaccggtcgtttgtcctcctctgatccaaaccttcagaatattccagtacgtaccccattgggccaggctatccgccgtgcgtttgtagctgaggagggttggcgtttagtggccctcgattatcgtcaaattgaattacgtgtccttgcccatctttctggcgatgagaacctcatccgcgtgtttcaggaaggcaaagacattcacactcaaacggcaagctggatgtttggattatcagctgaagcgatcgatcctttgatgcgtcgtgcagcgaagaccatcaatttcggtgttctctacggtatgagtgcctttcgtttgtcgcaggaattaggcattccctatgaagaagctcaggcgttcattcagaaatactttcaaagctatcccaaagttaaagcatggatcgagaagactctccgtgaaggccgcacacgtggttacgtagagaccttatttggacgtcgccgctatgttcccgatttaaacgctcgcgtgaaaggcaagcgtgaagccgccgaacgcatggcgttcaacatgcctgtacagggcacggcagctgacctcatgaaacttgcaatggtgcgcctttttccacaattgcgtgaagttggtgcccgcatgctcttgcaggtccacgatgaactcttgttagaagcgccaaaagagcgtgcggaagaggtggcagccctcgcgaaagaagttatggaaggcgtgtggcccttagcggtgcctcttgaagtcgaagttggtattggcgaggattggctggctgccaaagga

SEQ ID NO: 5610 - protein, 841 aa, synthetic construct
  REGION 1..841: note = Variant of DNA polymerase I from Thermus sp. strain 2.9
MHHHHHHGGSGVLPVFEPKGRVLLVDGHHLAYRNFFALKGLTTSLGEPVQGVYGFAKSLLKALKEDGDVVIVVFDAKAPSFRHEAYEAYKAGRAPTPEDFPRQLALMKELVDLLGLERLEVPGFEADDVLATLAKKAEREGYEVQILTADRDLFQLLSPRISVLHPEGHRITPEWLWEKYGLRPEQWVDFRALAGDPSDNIPGVKGIGEKTALKLLKEWGSLENLLKNLDQVKPESVREKILAHLEDLKLSRELSRVRTDLPLEVDFGRRREPDWEGLKAFLERLEFGSLLHEFGLLESPLLAEEAPWPPPEGAFLGYRLSRPEPMWAELLALAASAQGRVYRAEDPHGALRGLFEVRGLLAKDLAVVALREGLDLPPTDDPMLLAYLLDPSNTTPEGVARRYGGEWTEDAAKRALLAERLHENLLGRLQGEERLLWLYEEVEKPLSRVLAHMEATGVKLDVAYLENLSLEVAAHMRRLEEEVFRLAGRSFRLNSRDQLERVLFDELGLPPIGKTEKTGKRSTSAAVLEALREVHPIVDKILQYREMAKLKGTYIDRLPALVHPKTGRLHTRFNQTATATGRLSSSDPNLQNIPVRTPLGQAIRRAFVAEEGWRLVALDYRQIELRVLAHLSGDENLIRVFQEGKDIHTQTASWMFGLSAEAIDPLMRRAAKTINFGVLYGMSAFRLSQELGIPYEEAQAFIQKYFQSYPKVKAWIEKTLREGRTRGYVETLFGRRRYVPDLNARVKGKREAAERMAFNMPVQGTAADLMKLAMVRLFPQLREVGARMLLQVHDELLLEAPKERAEEVAALAKEVMEGVWPLAVPLEVEVGIGEDWLAAKG

SEQ ID NO: 5611 - DNA, 2523 bp, synthetic construct
  misc_feature 1..2523: note = Variant of DNA polymerase I from Thermus sp. strain 2.9
  source 1..2523: mol_type = other DNA
atgcaccatcatcatcatcatggcggtagcggcgtgttaccggtgttcgagcctaaaggtcgcgtgcttctggttgatggccatcatctcgcgtatcgtaacttctttgccctgaaaggattaaccaccagcctgggcgagccggtacagggtgtctacggctttgcaaagtcgctcctgaaagctctgaaagaagacggtgatgtggtgattgttgtctttgatgcgaaagcgccaagttttcgccacgaagcgtacgaagcttacaaagccgggcgtgctccaacgccggaagactttcctcgccaattggcgcttatgaaggaattagtggatttgcttggcctcgaacgcttggaagttcccggtttcgaggcagacgacgtattagcgactctcgcaaagaaagccgaacgtgagggctatgaagtccagatcttgacagcagatcgcgatcttttccagcttttatctccgcgcatctcggtgttacacccggaagggcatcgtatcaccccggaatggctctgggagaaatatggtttgcgtcccgaacaatgggtggattttcgcgccttagcaggcgatccgagcgacaatattccgggagttaaaggtatcggcgagaagacggcgctcaagctccttaaagaatgggggtcgttggagaacttgcttaagaatttagatcaggtcaaaccagagtcagtgcgtgagaagattcttgctcacctcgaagacctcaaattaagccgcgaattgtcccgtgtacgcaccgatttgccgctcgaagttgatttcggtcgccgccgcgaacctgactgggagggtcttaaagcgtttttagagcgtcttgaatttggttcgctcttgcatgaattcggccttttagaaagcccgttactggccgaagaaactccttggccaccgcccgagggcgcgtttttaggttaccgtttgagtcgcccggaaccgatgtgggccgaattactggctcttgcagcgtctgcccagggacgtgtgtatcgcgcggaagaccctcatggtgcgctccgcggcctcttcgaagtccgtggactccttgccaaagacttagctgttgttgcattgcgcgaaggtcttgatttacctccgactgatgatccaatgcttcttgcgtacctcttggacccgtcaaacacgacgcccgaaggcgtagcccgtcgttacggcggcgagtggaccgaagatgcagcgaaacgcgcgttattggccgaacgtttgcacgaaaatttattaggacgtttgcaaggcgaggaacgtctcctctggctttacgaagaagtggagaaaccattgagtcgcgtgctcgcgcatatggaagctaccggtgtcgaattagacgtggcgtatttggagaatctcagccttgaagttgctgcccacatgcgccgcttggaggaagaagtattccgtttagcaggccgttcctttcgccttaactctcgcgatcagttagaacgtgtgttgttcgatgaacttggtctccctcctatcggcaagacagagaagaccggtaaacgtagcacttcagcggcggttttagaagctcttcgcgaagtccatcccattgtggacaagatcttgcagtaccgcgaaatggcgaaattgaaaggcacctatattgaccgtcttccggcattagtccacccgaaaacgggacgcctccatacccgcttcaaccaaacagccacggcgaccggtcgtttgtcctcctctgatccaaaccttcagaatattccagtacgtaccccattgggccagaagatccgccgtgcgtttgtagctgaggagggttggcgtttagtggccctcgattatcgtcaaattgaattacgtgtccttgcccatctttctggcgatgagaacctcatccgcgtgtttcaggaaggcaaagacattcacactcaaacggcaagctggatgtttggattatcagctgaagcgatcgatcctttgatgcgtcgtgcagcgaagaccatcaatttcggtgttctctacggtatgagtgcctttcgtttgtcgcaggaattaggcattccctatgaagaagctcaggcgttcattcagaaatactttcaaagctatcccaaagttaaagcatggatcgagaagactctccgtgaaggccgcacacgtggttacgtagagaccttatttggacgtcgccgctatgttcccgatttaaacgctcgcgtgaaaggcaagcgtgaagccgccgaacgcatggcgttcaacatgcctgtacagggcacggcagctgacctcatgaaacttgcaatggtgcgcctttttccacaattgcgtgaagttggtgcccgcatgctcttgcaggtccacgatgaactcttgttagaagcgccaaaagagcgtgcggaagaggtggcagccctcgcgaaagaagttatggaaggcgtgtggcccttagcggtgcctcttgaagtcgaagttggtattggcgaggattggctggctgccaaagga

SEQ ID NO: 5612 - protein, 841 aa, synthetic construct
  REGION 1..841: note = Variant of DNA polymerase I from Thermus sp. strain 2.9
MHHHHHHGGSGVLPVFEPKGRVLLVDGHHLAYRNFFALKGLTTSLGEPVQGVYGFAKSLLKALKEDGDVVIVVFDAKAPSFRHEAYEAYKAGRAPTPEDFPRQLALMKELVDLLGLERLEVPGFEADDVLATLAKKAEREGYEVQILTADRDLFQLLSPRISVLHPEGHRITPEWLWEKYGLRPEQWVDFRALAGDPSDNIPGVKGIGEKTALKLLKEWGSLENLLKNLDQVKPESVREKILAHLEDLKLSRELSRVRTDLPLEVDFGRRREPDWEGLKAFLERLEFGSLLHEFGLLESPLLAEETPWPPPEGAFLGYRLSRPEPMWAELLALAASAQGRVYRAEDPHGALRGLFEVRGLLAKDLAVVALREGLDLPPTDDPMLLAYLLDPSNTTPEGVARRYGGEWTEDAAKRALLAERLHENLLGRLQGEERLLWLYEEVEKPLSRVLAHMEATGVELDVAYLENLSLEVAAHMRRLEEEVFRLAGRSFRLNSRDQLERVLFDELGLPPIGKTEKTGKRSTSAAVLEALREVHPIVDKILQYREMAKLKGTYIDRLPALVHPKTGRLHTRFNQTATATGRLSSSDPNLQNIPVRTPLGQKIRRAFVAEEGWRLVALDYRQIELRVLAHLSGDENLIRVFQEGKDIHTQTASWMFGLSAEAIDPLMRRAAKTINFGVLYGMSAFRLSQELGIPYEEAQAFIQKYFQSYPKVKAWIEKTLREGRTRGYVETLFGRRRYVPDLNARVKGKREAAERMAFNMPVQGTAADLMKLAMVRLFPQLREVGARMLLQVHDELLLEAPKERAEEVAALAKEVMEGVWPLAVPLEVEVGIGEDWLAAKG

SEQ ID NO: 5613 - DNA, 2523 bp, synthetic construct
  misc_feature 1..2523: note = Variant of DNA polymerase I from Thermus sp. strain 2.9
  source 1..2523: mol_type = other DNA
atgcaccatcatcatcatcatggcggtagcggcgtgttaccggtgttcgagcctaaaggtcgcgtgcttctggttgatggccatcatctcgcgtatcgtaacttctttgccctgaaaggattaaccaccagcctgggcgagccggtacagggtgtctacggctttgcaaagtcgctcctgaaagctctgaaagaagacggtgatgtggtgattgttgtctttgatgcgaaagcgccaagttttcgccacgaagcgtacgaagcttacaaagccgggcgtgctccaacgccggaagactttcctcgccaattggcgcttatgaaggaattagtggatttgcttggcctcgaacgcttggaagttcccggtttcgaggcagacgacgtattagcgactctcgcaaagaaagccgaacgtgagggctatgaagtccagatcttgacagcagatcgcgatcttttccagcttttatctccgcgcatctcggtgttacacccggaagggcatcgtatcaccccggaatggctctgggagaaatatggtttgcgtcccgaacaatgggtggattttcgcgccttagcaggcgatccgagcgacaatattccgggagttaaaggtatcggcgagaagacggcgctcaagctccttaaagaatgggggtcgttggagaacttgcttaagaatttagatcaggtcaaaccagagtcagtgcgtgagaagattcttgctcacctcgaagacctcaaattaagccgcgaattgtcccgtgtacgcaccgatttgccgctcgaagttgatttcggtcgccgccgcgaacctgactgggagggtcttaaagcgtttttagagcgtcttgaatttggttcgctcttgcatgaattcggccttttagaaagcccgttactggccgaagaagcaccttggccaccgcccgagggcgcgtttttaggttaccgtttgagtcgcccggaaccgatgtgggccgaattactggctcttgcagcgtctgcccagggacgtgtgtatcgcgcggaagaccctcatggtgcgctccgcggcctcttcgaagtccgtggactccttgccaaagacttagctgttgttgcattgcgcgaaggtcttgatttacctccgactgatgatccaatgcttcttgcgtacctcttggacccgtcaaacacgacgcccgaaggcgtagcccgtcgttacggcggcgagtggaccgaagatgcagcgaaacgcgcgttattggccgaacgtttgcacgaaaatttattaggacgtttgcaaggcgaggaacgtctcctctggctttacgaagaagtggagaaaccattgagtcgcgtgctcgcgcatatggaagctaccggtgtcaaattagacgtggcgtatttggagaatctcagccttgaagttgctgcccacatgcgccgcttggaggaagaagtattccgtttagcaggccgttcctttcgccttaactctcgcgatcagttagaacgtgtgttgttcgatgaacttggtctccctcctatcggcaagacagagaagaccggtaaacgtagcacttcagcggcggttttagaagctcttcgcgaagtccatcccattgtggacaagatcttgcagtaccgcgaaatggcgaaattgaaaggcacctatattgaccgtcttccggcattagtccacccgaaaacgggacgcctccatacccgcttcaaccaaacagccacggcgaccggtcgtttgtcctcctctgatccaaaccttcagaatattccagtacgtaccccattgggccagaagatccgccgtgcgtttgtagctgaggagggttggcgtttagtggccctcgattatcgtcaaattgaattacgtgtccttgcccatctttctggcgatgagaacctcatccgcgtgtttcaggaaggcaaagacattcacactcaaacggcaagctggatgtttggattatcagctgaagcgatcgatcctttgatgcgtcgtgcagcgaagaccatcaatttcggtgttctctacggtatgagtgcctttcgtttgtcgcaggaattaggcattccctatgaagaagctcaggcgttcattcagaaatactttcaaagctatcccaaagttaaagcatggatcgagaagactctccgtgaaggccgcacacgtggttacgtagagaccttatttggacgtcgccgctatgttcccgatttaaacgctcgcgtgaaaggcaagcgtgaagccgccgaacgcatggcgttcaacatgcctgtacagggcacggcagctgacctcatgaaacttgcaatggtgcgcctttttccacaattgcgtgaagttggtgcccgcatgcagttgcaggtccacgatgaactcttgttagaagcgccaaaagagcgtgcggaagaggtggcagccctcgcgaaagaagttatggaaggcgtgtggcccttagcggtgcctcttgaagtcgaagttggtattggcgaggattggctggctgccaaagga

SEQ ID NO: 5614 - protein, 841 aa, synthetic construct
  REGION 1..841: note = Variant of DNA polymerase I from Thermus sp. strain 2.9
MHHHHHHGGSGVLPVFEPKGRVLLVDGHHLAYRNFFALKGLTTSLGEPVQGVYGFAKSLLKALKEDGDVVIVVFDAKAPSFRHEAYEAYKAGRAPTPEDFPRQLALMKELVDLLGLERLEVPGFEADDVLATLAKKAEREGYEVQILTADRDLFQLLSPRISVLHPEGHRITPEWLWEKYGLRPEQWVDFRALAGDPSDNIPGVKGIGEKTALKLLKEWGSLENLLKNLDQVKPESVREKILAHLEDLKLSRELSRVRTDLPLEVDFGRRREPDWEGLKAFLERLEFGSLLHEFGLLESPLLAEEAPWPPPEGAFLGYRLSRPEPMWAELLALAASAQGRVYRAEDPHGALRGLFEVRGLLAKDLAVVALREGLDLPPTDDPMLLAYLLDPSNTTPEGVARRYGGEWTEDAAKRALLAERLHENLLGRLQGEERLLWLYEEVEKPLSRVLAHMEATGVKLDVAYLENLSLEVAAHMRRLEEEVFRLAGRSFRLNSRDQLERVLFDELGLPPIGKTEKTGKRSTSAAVLEALREVHPIVDKILQYREMAKLKGTYIDRLPALVHPKTGRLHTRFNQTATATGRLSSSDPNLQNIPVRTPLGQKIRRAFVAEEGWRLVALDYRQIELRVLAHLSGDENLIRVFQEGKDIHTQTASWMFGLSAEAIDPLMRRAAKTINFGVLYGMSAFRLSQELGIPYEEAQAFIQKYFQSYPKVKAWIEKTLREGRTRGYVETLFGRRRYVPDLNARVKGKREAAERMAFNMPVQGTAADLMKLAMVRLFPQLREVGARMQLQVHDELLLEAPKERAEEVAALAKEVMEGVWPLAVPLEVEVGIGEDWLAAKG

SEQ ID NO: 5615 - DNA, 2523 bp, synthetic construct
  misc_feature 1..2523: note = Variant of DNA polymerase I from Thermus sp. strain 2.9
  source 1..2523: mol_type = other DNA
atgcaccatcatcatcatcatggcggtagcggcgtgttaccggtgttcgagcctaaaggtcgcgtgcttctggttgatggccatcatctcgcgtatcgtaacttctttgccctgaaaggattaaccaccagcctgggcgagccggtacagggtgtctacggctttgcaaagtcgctcctgaaagctctgaaagaagacggtgatgtggtgattgttgtctttgatgcgaaagcgccaagttttcgccacgaagcgtacgaagcttacaaagccgggcgtgctccaacgccggaagactttcctcgccaattggcgcttatgaaggaattagtggatttgcttggcctcgaacgcttggaagttcccggtttcgaggcagacgacgtattagcgactctcgcaaagaaagccgaacgtgagggctatgaagtccagatcttgacagcagatcgcgatcttttccagcttttatctccgcgcatctcggtgttacacccggaagggcatcgtatcaccccggaatggctctgggagaaatatggtttgcgtcccgaacaatgggtggattttcgcgccttagcaggcgatccgagcgacaatattccgggagttaaaggtatcggcgagaagacggcgctcaagctccttaaagaatgggggtcgttggagaacttgcttaagaatttagatcaggtcaaaccagagtcagtgcgtgagaagattcttgctcacctcgaagacctcaaattaagccgcgaattgtcccgtgtacgcaccgatttgccgctcgaagttgatttcggtcgccgccgcgaacctgactgggagggtcttaaagcgtttttagagcgtcttgaatttggttcgctcttgcatgaattcggccttttagaaagcccgttactggccgaagaagcaccttggccaccgcccgagggcgcgtttttaggttaccgtttgagtcgcccggaaccgatgtgggccgaattactggctcttgcagcgtctgcccagggacgtgtgtatcgcgcggaagaccctcatggtgcgctccgcggcctcttcgaagtccgtggactccttgccaaagacttagctgttgttgcattgcgcgaaggtcttgatttacctccgactgatgatccaatgcttcttgcgtacctcttggacccgtcaaacacgacgcccgaaggcgtagcccgtcgttacggcggcgagtggaccgaagatgcagcgctgcgcgcgttattggccgaacgtttgcacgaaaatttattaggacgtttgcaaggcgaggaacgtctcctctggctttacgaagaagtggagaaaccattgagtcgcgtgctcgcgcatatggaagctaccggtgtcaaattagacgtggcgtatttggagaatctcagccttgaagttgctgcccacatgcgccgcttggaggaagaagtattccgtttagcaggccgttcctttcgccttaactctcgcgatcagttagaacgtgtgttgttcgatgaacttggtctccctcctatcggcaagacagagaagaccggtaaacgtagcacttcagcggcggttttagaagctcttcgcgaagtccatcccattgtggacaagatcttgcagtaccgcgaaatggcgaaattgaaaggcacctatattgaccgtcttccggcattagtccacccgaaaacgggacgcctccatacccgcttcaaccaaacagccacggcgaccggtcgtttgtcctcctctgatccaaaccttcagaatattccagtacgtaccccattgggccagaagatccgccgtgcgtttgtagctgaggagggttggcgtttagtggccctcgattatcgtcaaattgaattacgtgtccttgcccatctttctggcgatgagaacctcatccgcgtgtttcaggaaggcaaagacattcacactcaaacggcaagctggatgtttggattatcagctgaagcgatcgatcctttgatgcgtcgtgcagcgaagaccatcaatttcggtgttctctacggtatgagtgcctttcgtttgtcgcaggaattaggcattccctatgaagaagctcaggcgttcattcagaaatactttcaaagctatcccaaagttaaagcatggatcgagaagactctccgtgaaggccgcacacgtggttacgtagagaccttatttggacgtcgccgctatgttcccgatttaaacgctcgcgtgaaaggcaagcgtgaagccgccgaacgcatggcgttcaacatgcctgtacagggcacggcagctgacctcatgaaacttgcaatggtgcgcctttttccacaattgcgtgaagttggtgcccgcatgctcttgcaggtccacgatgaactcttgttagaagcgccaaaagagcgtgcggaagaggtggcagccctcgcgaaagaagttatggaaggcgtgtggcccttagcggtgcctcttgaagtcgaagttggtattggcgaggattggctggctgccaaagga

SEQ ID NO: 5616 - protein, 841 aa, synthetic construct
  REGION 1..841: note = Variant of DNA polymerase I from Thermus sp. strain 2.9
MHHHHHHGGSGVLPVFEPKGRVLLVDGHHLAYRNFFALKGLTTSLGEPVQGVYGFAKSLLKALKEDGDVVIVVFDAKAPSFRHEAYEAYKAGRAPTPEDFPRQLALMKELVDLLGLERLEVPGFEADDVLATLAKKAEREGYEVQILTADRDLFQLLSPRISVLHPEGHRITPEWLWEKYGLRPEQWVDFRALAGDPSDNIPGVKGIGEKTALKLLKEWGSLENLLKNLDQVKPESVREKILAHLEDLKLSRELSRVRTDLPLEVDFGRRREPDWEGLKAFLERLEFGSLLHEFGLLESPLLAEEAPWPPPEGAFLGYRLSRPEPMWAELLALAASAQGRVYRAEDPHGALRGLFEVRGLLAKDLAVVALREGLDLPPTDDPMLLAYLLDPSNTTPEGVARRYGGEWTEDAALRALLAERLHENLLGRLQGEERLLWLYEEVEKPLSRVLAHMEATGVKLDVAYLENLSLEVAAHMRRLEEEVFRLAGRSFRLNSRDQLERVLFDELGLPPIGKTEKTGKRSTSAAVLEALREVHPIVDKILQYREMAKLKGTYIDRLPALVHPKTGRLHTRFNQTATATGRLSSSDPNLQNIPVRTPLGQKIRRAFVAEEGWRLVALDYRQIELRVLAHLSGDENLIRVFQEGKDIHTQTASWMFGLSAEAIDPLMRRAAKTINFGVLYGMSAFRLSQELGIPYEEAQAFIQKYFQSYPKVKAWIEKTLREGRTRGYVETLFGRRRYVPDLNARVKGKREAAERMAFNMPVQGTAADLMKLAMVRLFPQLREVGARMLLQVHDELLLEAPKERAEEVAALAKEVMEGVWPLAVPLEVEVGIGEDWLAAKG

SEQ ID NO: 5617 - DNA, 2523 bp, synthetic construct
  misc_feature 1..2523: note = Variant of DNA polymerase I from Thermus sp. strain 2.9
  source 1..2523: mol_type = other DNA
atgcaccatcatcatcatcatggcggtagcggcgtgttaccggtgttcgagcctaaaggtcgcgtgcttctggttgatggccatcatctcgcgtatcgtaacttctttgccctgaaaggattaaccaccagcctgggcgagccggtacagggtgtctacggctttgcaaagtcgctcctgaaagctctgaaagaagacggtgatgtggtgattgttgtctttgatgcgaaagcgccaagttttcgccacgaagcgtacgaagcttacaaagccgggcgtgctccaacgccggaagactttcctcgccaattggcgcttatgaaggaattagtggatttgcttggcctcgaacgcttggaagttcccggtttcgaggcagacgacgtattagcgactctcgcaaagaaagccgaacgtgagggctatgaagtccagatcttgacagcagatcgcgatcttttccagcttttatctccgcgcatctcggtgttacacccggaagggcatcgtatcaccccggaatggctctgggagaaatatggtttgcgtcccgaacaatgggtggattttcgcgccttagcaggcgatccgagcgacaatattccgggagttaaaggtatcggcgagaagacggcgctcaagctccttaaagaatgggggtcgttggagaacttgcttaagaatttagatcaggtcaaaccagagtcagtgcgtgagaagattcttgctcacctcgaagacctcaaattaagccgcgaattgtcccgtgtacgcaccgatttgccgctcgaagttgatttcggtcgccgccgcgaacctgactgggagggtcttaaagcgtttttagagcgtcttgaatttggttcgctcttgcatgaattcggccttttagaaagcccgttactggccgaagaagcaccttggccaccgcccgagggcgcgtttttaggttaccgtttgagtcgcccggaaccgatgtgggccgaattactggctcttgcagcgtctgcccagggacgtgtgtatcgcgcggaagaccctcatggtgcgctccgcggcctcttcgaagtccgtggactccttgccaaagacttagctgttgttgcattgcgcgaaggtcttgatttacctccgactgatgatccaatgcttcttgcgtacctcttggacccgtcaaacacgacgcccgaaggcgtagcccgtcgttacggcggcgagtggaccgaagatgcagcgaaacgcgcgttattggccgaacgtttgcacgaaaatttattaggacgtttgcaaggcgaggaacgtctcctctggctttacgaagaagtggagaaaccattgagtcgcgtgctcgcgcatatggaagctaccggtgtcaaattagacgtggcgtatttggagaatctcagccttgaagttgctgcccacatgcgccgcttggaggaagaagtattccgtttagcaggccgttcctttcgccttaactctcgcgatcagttagaacgtgtgttgttcgatgaacttggtctccctcctatcggcaagacagagaagaccggtaaacgtagcacttcagcggcggttttagaagctcttcgcgaagtccatcccattgtgggtaagatcttgcagtaccgcgaaatggcgaaattgaaaggcacctatattgaccgtcttccggcattagtccacccgaaaacgggacgcctccatgcccgcttcaaccaaacagccacggcgaccggtcgtttgtcctcctctgatccaaaccttcagaatattccagtacgtaccccattgggccagaagatccgccgtgcgtttgtagctgaggagggttggcgtttagtggccctcgattatcgtcaaattgaattacgtgtccttgcccatctttctggcgatgagaacctcatccgcgtgtttcaggaaggcaaagacattcacactcaaacggcaagctggatgtttggattatcagctgaagcgatcgatcctttgatgcgtcgtgcagcgaagaccatcaatttcggtgttctctacggtatgagtgcctttcgtttgtcgcaggaattaggcattccctatgaagaagctcaggcgttcattcagaaatactttcaaagctatcccaaagttaaagcatggatcgagaagactctccgtgaaggccgcacacgtggttacgtagagaccttatttggacgtcgccgctatgttcccgatttaaacgctcgcgtgaaaggcaagcgtgaagccgccgaacgcatggcgttcaacatgcctgtacagggcacggcagctgacctcatgaaacttgcaatggtgcgcctttttccacaattgcgtgaagttggtgcccgcatgctcttgcaggtccacgatgaactcttgttagaagcgccaaaagagcgtgcggaagaggtggcagccctcgcgaaagaagttatggaaggcgtgtggcccttagcggtgcctcttgaagtcgaagttggtattggcgaggattggctggctgccaaagga

SEQ ID NO: 5618 - protein, 841 aa, synthetic construct
  REGION 1..841: note = Variant of DNA polymerase I from Thermus sp. strain 2.9
MHHHHHHGGSGVLPVFEPKGRVLLVDGHHLAYRNFFALKGLTTSLGEPVQGVYGFAKSLLKALKEDGDVVIVVFDAKAPSFRHEAYEAYKAGRAPTPEDFPRQLALMKELVDLLGLERLEVPGFEADDVLATLAKKAEREGYEVQILTADRDLFQLLSPRISVLHPEGHRITPEWLWEKYGLRPEQWVDFRALAGDPSDNIPGVKGIGEKTALKLLKEWGSLENLLKNLDQVKPESVREKILAHLEDLKLSRELSRVRTDLPLEVDFGRRREPDWEGLKAFLERLEFGSLLHEFGLLESPLLAEEAPWPPPEGAFLGYRLSRPEPMWAELLALAASAQGRVYRAEDPHGALRGLFEVRGLLAKDLAVVALREGLDLPPTDDPMLLAYLLDPSNTTPEGVARRYGGEWTEDAAKRALLAERLHENLLGRLQGEERLLWLYEEVEKPLSRVLAHMEATGVKLDVAYLENLSLEVAAHMRRLEEEVFRLAGRSFRLNSRDQLERVLFDELGLPPIGKTEKTGKRSTSAAVLEALREVHPIVGKILQYREMAKLKGTYIDRLPALVHPKTGRLHARFNQTATATGRLSSSDPNLQNIPVRTPLGQKIRRAFVAEEGWRLVALDYRQIELRVLAHLSGDENLIRVFQEGKDIHTQTASWMFGLSAEAIDPLMRRAAKTINFGVLYGMSAFRLSQELGIPYEEAQAFIQKYFQSYPKVKAWIEKTLREGRTRGYVETLFGRRRYVPDLNARVKGKREAAERMAFNMPVQGTAADLMKLAMVRLFPQLREVGARMLLQVHDELLLEAPKERAEEVAALAKEVMEGVWPLAVPLEVEVGIGEDWLAAKG

SEQ ID NO: 5619 - DNA, 2523 bp, synthetic construct
  misc_feature 1..2523: note = Variant of DNA polymerase I from Thermus sp. strain 2.9
  source 1..2523: mol_type = other DNA
atgcaccatcatcatcatcatggcggtagcggcgtgttaccggtgttcgagcctaaaggtcgcgtgcttctggttgatggccatcatctcgcgtatcgtaacttctttgccctgaaaggattaaccaccagcctgggcgagccggtacagggtgtctacggctttgcaaagtcgctcctgaaagctctgaaagaagacggtgatgtggtgattgttgtctttgatgcgaaagcgccaagttttcgccacgaagcgtacgaagcttacaaagccgggcgtgctccaacgccggaagactttcctcgccaattggcgcttatgaaggaattagtggatttgcttggcctcgaacgcttggaagttcccggtttcgaggcagacgacgtattagcgactctcgcaaagaaagccgaacgtgagggctatgaagtccagatcttgacagcagatcgcgatcttttccagcttttatctccgcgcatctcggtgttacacccggaagggcatcgtatcaccccggaatggctctgggagaaatatggtttgcgtcccgaacaatgggtggattttcgcgccttagcaggcgatccgagcgacaatattccgggagttaaaggtatcggcgagaagacggcgctcaagctccttaaagaatgggggtcgttggagaacttgcttaagaatttagatcaggtcaaaccagagtcagtgcgtgagaagattcttgctcacctcgaagacctcaaattaagccgcgaattgtcccgtgtacgcaccgatttgccgctcgaagttgatttcggtcgccgccgcgaacctgactgggagggtcttaaagcgtttttagagcgtcttgaatttggttcgctcttgcatgaattcggccttttagaaagcccgttactggccgaagaagcaccttggccaccgcccgagggcgcgtttttaggttaccgtttgagtcgcccggaaccgatgtgggccgaattactggctcttgcagcgtctgcccagggacgtgtgtatcgcgcggaagaccctcatggtgcgctccgcggcctcttcgaagtccgtggactccttgccaaagacttagctgttgttgcattgcgcgaaggtcttgatttacctccgactgatgatccaatgcttcttgcgtacctcttggacccgtcaaacacgacgcccgaaggcgtagcccgtcgttacggcggcgagtggaccgaagatgcagcggagcgcgcgttattggccgaacgtttgcacgaaaatttattaggacgtttgcaaggcgaggaacgtctcctctggctttacgaagaagtggagaaaccattgagtcgcgtgctcgcgcatatggaagctaccggtgtcaaattagacgtggcgtatttggagaatctcagccttgaagttgctgcccacatgcgccgcttggaggaagaagtattccgtttagcaggccgttcctttcgccttaactctcgcgatcagttagaacgtgtgttgttcgatgaacttggtctccctcctatcggcaagacagagaagaccggtaaacgtagcacttcagcggcggttttagaagctcttcgcgaagtccatcccattgtggacaagatcttgcagtaccgcgaaatggcgaaattgaaaggcacctatattgaccgtcttccggcattagtccacccgaaaacgggacgcctccatacccgcttcaaccaaacagccacggcgaccggtcgtttgtcctcctctgatccaaaccttcagaatattccagtacgtaccccattgggccagaagatccgccgtgcgtttgtagctgaggagggttggcgtttagtggccctcgattatcgtcaaattgaattacgtgtccttgcccatctttctggcgatgagaacctcatccgcgtgtttcaggaaggcaaagacattcacactcaaacggcaagctggatgtttggattatcagctgaagcgatcgatcctttgatgcgtcgtgcagcgaagaccatcaatttcggtgttctctacggtatgagtgcctttcgtttgtcgcaggaattaggcattccctatgaagaagctcaggcgttcattcagaaatactttcaaagctatcccaaagttaaagcatggatcgagaagactctccgtgaaggccgcacacgtggttacgtagagaccttatttggacgtcgccgctatgttcccgatttaaacgctcgcgtgaaaggcaagcgtgaagccgccgaacgcatggcgttcaacatgcctgtacagggcacggcagctgacctcatgaaacttgcaatggtgcgcctttttccacaattgcgtgaagttggtgcccgcatgctcttgcaggtccacgatgaactcttgttagaagcgccaaaagagcgtgcggaagaggtggcagccctcgcgaaagaagttatggaaggcgtgtggcccttagcggtgcctcttgaagtcgaagttggtattggcgaggattggctggctgccaaagga

SEQ ID NO: 5620 - protein, 841 aa, synthetic construct
  REGION 1..841: note = Variant of DNA polymerase I from Thermus sp. strain 2.9
MHHHHHHGGSGVLPVFEPKGRVLLVDGHHLAYRNFFALKGLTTSLGEPVQGVYGFAKSLLKALKEDGDVVIVVFDAKAPSFRHEAYEAYKAGRAPTPEDFPRQLALMKELVDLLGLERLEVPGFEADDVLATLAKKAEREGYEVQILTADRDLFQLLSPRISVLHPEGHRITPEWLWEKYGLRPEQWVDFRALAGDPSDNIPGVKGIGEKTALKLLKEWGSLENLLKNLDQVKPESVREKILAHLEDLKLSRELSRVRTDLPLEVDFGRRREPDWEGLKAFLERLEFGSLLHEFGLLESPLLAEEAPWPPPEGAFLGYRLSRPEPMWAELLALAASAQGRVYRAEDPHGALRGLFEVRGLLAKDLAVVALREGLDLPPTDDPMLLAYLLDPSNTTPEGVARRYGGEWTEDAAERALLAERLHENLLGRLQGEERLLWLYEEVEKPLSRVLAHMEATGVKLDVAYLENLSLEVAAHMRRLEEEVFRLAGRSFRLNSRDQLERVLFDELGLPPIGKTEKTGKRSTSAAVLEALREVHPIVDKILQYREMAKLKGTYIDRLPALVHPKTGRLHTRFNQTATATGRLSSSDPNLQNIPVRTPLGQKIRRAFVAEEGWRLVALDYRQIELRVLAHLSGDENLIRVFQEGKDIHTQTASWMFGLSAEAIDPLMRRAAKTINFGVLYGMSAFRLSQELGIPYEEAQAFIQKYFQSYPKVKAWIEKTLREGRTRGYVETLFGRRRYVPDLNARVKGKREAAERMAFNMPVQGTAADLMKLAMVRLFPQLREVGARMLLQVHDELLLEAPKERAEEVAALAKEVMEGVWPLAVPLEVEVGIGEDWLAAKG

SEQ ID NO: 5621 - DNA, 2523 bp, synthetic construct
  misc_feature 1..2523: note = Variant of DNA polymerase I from Thermus sp. strain 2.9
  source 1..2523: mol_type = other DNA
atgcaccatcatcatcatcatggcggtagcggcgtgttaccggtgttcgagcctaaaggtcgcgtgcttctggttgatggccatcatctcgcgtatcgtaacttctttgccctgaaaggattaaccaccagcctgggcgagccggtacagggtgtctacggctttgcaaagtcgctcctgaaagctctgaaagaagacggtgatgtggtgattgttgtctttgatgcgaaagcgccaagttttcgccacgaagcgtacgaagcttacaaagccgggcgtgctccaacgccggaagactttcctcgccaattggcgcttatgaaggaattagtggatttgcttggcctcgaacgcttggaagttcccggtttcgaggcagacgacgtattagcgactctcgcaaagaaagccgaacgtgagggctatgaagtccagatcttgacagcagatcgcgatcttttccagcttttatctccgcgcatctcggtgttacacccggaagggcatcgtatcaccccggaatggctctgggagaaatatggtttgcgtcccgaacaatgggtggattttcgcgccttagcaggcgatccgagcgacaatattccgggagttaaaggtatcggcgagaagacggcgctcaagctccttaaagaatgggggtcgttggagaacttgcttaagaatttagatcaggtcaaaccagagtcagtgcgtgagaagattcttgctcacctcgaagacctcaaattaagccgcgaattgtcccgtgtacgcaccgatttgccgctcgaagttgatttcggtcgccgccgcgaacctgactgggagggtcttaaagcgtttttagagcgtcttgaatttggttcgctcttgcatgaattcggccttttagaaagcccgttactggccgaagaagcaccttggccaccgcccgagggcgcgtttttaggttaccgtttggcgcgcccggaaccgatgtgggccgaattactggctcttgcagcgtctgcccagggacgtgtgtatcgcgcggaagaccctcatggtgcgctccgcggcctcttcgaagtccgtggactccttgccaaagacttagctgttgttgcattgcgcgaaggtcttgatttacctccgactgatgatccaatgcttcttgcgtacctcttggacccgtcaaacacgacgcccgaaggcgtagcccgtcgttacggcggcgagtggaccgaagatgcagcgaaacgcgcgttattggccgaacgtttgcacgaaaatttattaggacgtttgcaaggcgaggaacgtctcctctggctttacgaagaagtggagaaaccattgagtcgcgtgctcgcgcatatggaagctaccggtgtcaaattagacgtggcgtatttggagaatctcagccttgaagttgctgcccacatgcgccgcttggaggaagaagtattccgtttagcaggccgttcctttcgccttaactctcgcgatcagttagaacgtgtgttgttcgatgaacttggtctccctcctatcggcaagacagagaagaccggtaaacgtagcacttcagcggcggttttagaagctcttcgcgaagtccatcccattgtggacaagatcttgcagtaccgcgaaatggcgaaattgaaaggcacctatattgaccgtcttccggcattagtccacccgaaaacgggacgcctccatacccgcttcaaccaaacagccacggcgaccggtcgtttgtcctcctctgatccaaaccttcagaatattccagtacgtaccccattgggccagaagatccgccgtgcgtttgtagctgaggagggttggcgtttagtggccctcgattatcgtcaaattgaattacgtgtccttgcccatctttctggcgatgagaacctcatccgcgtgtttcaggaaggcaaagacattcacactcaaacggcaagctggatgtttggattatcagctgaagcgatcgatcctttgatgcgtcgtgcagcgaagaccatcaatttcggtgttctctacggtatgagtgcctttcgtttgtcgcaggaattaggcattccctatgaagaagctcaggcgttcattcagaaatactttcaaagctatcccaaagttaaagcatggatcgagaagactctccgtgaaggccgcacacgtggttacgtagagaccttatttggacgtcgccgctatgttcccgatttaaacgctcgcgtgaaaggcaagcgtgaagccgccgaacgcatggcgttcaacatgcctgtacagggcacggcagctgacctcatgaaacttgcaatggtgcgcctttttccacaattgcgtgaagttggtgcccgcatgctcttgcaggtccacgatgaactcttgttagaagcgccaaaagagcgtgcggaagaggtggcagccctcgcgaaagaagttatggaaggcgtgtggcccttagcggtgcctcttgaagtcgaagttggtattggcgaggattggctggctgccaaagga

SEQ ID NO: 5622 - protein, 841 aa, synthetic construct
  REGION 1..841: note = Variant of DNA polymerase I from Thermus sp. strain 2.9
MHHHHHHGGSGVLPVFEPKGRVLLVDGHHLAYRNFFALKGLTTSLGEPVQGVYGFAKSLLKALKEDGDVVIVVFDAKAPSFRHEAYEAYKAGRAPTPEDFPRQLALMKELVDLLGLERLEVPGFEADDVLATLAKKAEREGYEVQILTADRDLFQLLSPRISVLHPEGHRITPEWLWEKYGLRPEQWVDFRALAGDPSDNIPGVKGIGEKTALKLLKEWGSLENLLKNLDQVKPESVREKILAHLEDLKLSRELSRVRTDLPLEVDFGRRREPDWEGLKAFLERLEFGSLLHEFGLLESPLLAEEAPWPPPEGAFLGYRLARPEPMWAELLALAASAQGRVYRAEDPHGALRGLFEVRGLLAKDLAVVALREGLDLPPTDDPMLLAYLLDPSNTTPEGVARRYGGEWTEDAAKRALLAERLHENLLGRLQGEERLLWLYEEVEKPLSRVLAHMEATGVKLDVAYLENLSLEVAAHMRRLEEEVFRLAGRSFRLNSRDQLERVLFDELGLPPIGKTEKTGKRSTSAAVLEALREVHPIVDKILQYREMAKLKGTYIDRLPALVHPKTGRLHTRFNQTATATGRLSSSDPNLQNIPVRTPLGQKIRRAFVAEEGWRLVALDYRQIELRVLAHLSGDENLIRVFQEGKDIHTQTASWMFGLSAEAIDPLMRRAAKTINFGVLYGMSAFRLSQELGIPYEEAQAFIQKYFQSYPKVKAWIEKTLREGRTRGYVETLFGRRRYVPDLNARVKGKREAAERMAFNMPVQGTAADLMKLAMVRLFPQLREVGARMLLQVHDELLLEAPKERAEEVAALAKEVMEGVWPLAVPLEVEVGIGEDWLAAKG

SEQ ID NO: 5623 - DNA, 2523 bp, synthetic construct
  misc_feature 1..2523: note = Variant of DNA polymerase I from Thermus sp. strain 2.9
  source 1..2523: mol_type = other DNA
atgcaccatcatcatcatcatggcggtagcggcgtgttaccggtgttcgagcctaaaggtcgcgtgcttctggttgatggccatcatctcgcgtatcgtaacttctttgccctgaaaggattaaccaccagcctgggcgagccggtacagggtgtctacggctttgcaaagtcgctcctgaaagctctgaaagaagacggtgatgtggtgattgttgtctttgatgcgaaagcgccaagttttcgccacgaagcgtacgaagcttacaaagccgggcgtgctccaacgccggaagactttcctcgccaattggcgcttatgaaggaattagtggatttgcttggcctcgaacgcttggaagttcccggtttcgaggcagacgacgtattagcgactctcgcaaagaaagccgaacgtgagggctatgaagtccagatcttgacagcagatcgcgatcttttccagcttttatctccgcgcatctcggtgttacacccggaagggcatcgtatcaccccggaatggctctgggagaaatatggtttgcgtcccgaacaatgggtggattttcgcgccttagcaggcgatccgagcgacaatattccgggagttaaaggtatcggcgagaagacggcgctcaagctccttaaagaatgggggtcgttggagaacttgcttaagaatttagatcaggtcaaaccagagtcagtgcgtgagaagattcttgctcacctcgaagacctcaaattaagccgcgaattgtcccgtgtacgcaccgatttgccgctcgaagttgatttcggccgccgccgcgaacctgactgggagggtcttaaagcgtttttagagcgtcttgaatttggttcgctcttgcatgaattcggccttttagaaagcccgttactggccgaagaagcaccttggccaccgcccgagggcgcgtttttaggttaccgtttgagtcgcccggaaccgatgtgggccgaattactggctcttgcagcgtctgcccagggacgtgtgtatcgcgcggaagaccctcatggtgcgctccgcggcctcttcgaagtccgtggactccttgccaaagacttagctgttgttgcattgcgcgaaggtcttgatttacctccgactgatgatccaatgcttcttgcgtacctcttggacccgtcaaacacgacgcccgaaggcgtagcccgtcgttacggcggcgagtggaccgaagatgcagcgaaacgcgcgttattggccgaacgtttgcacgaaaatttattaggacgtttgcaaggcgaggaacgtctcctctggctttacgaagaagtggagaaaccattgagtcgcgtgctcgcgcatatggaagctaccggtgtcaaattagacgtggcgtatttggagaatctcagccttgaagttgctgcccatatgcgccgcttggaggaagaagtattccgtttagcaggccgttcctttcgccttaactctcgcgatcagttagaacgtgtgttgttcgatgaacttggtctccctcctatcggcaagacagagaagaccggtaaacgtagcacttcagcggcggttttagaagctcttcgcgaagtccatcccattgtggacaagatcttgcagtaccgcgaaatggcgaaattgaaaggcacctatattgaccctcttccggcattagtccacccgaaaacgggacgcctccatacccgcttcaaccaaacagccacggcgaccggtcgtttgtccagttctgatccaaaccttcagaatattccagtacgtaccccattgggccagaagatccgccgtgcgtttgtagctgaggagggttggcgtttagtggccctcgattatagtcaaattgaattacgtgtccttgcccatctttctggcgatgagaacctcatccgcgtgtttcaggaaggcaaagacattcacactcaaacggcaagctggatgtttggattatcagctgaagcgatcgatcctttgatgcgtcgtgcagcgaagaccatcaatttcggtgttctctacggtatgagtgcctttcgtttgtcgcaggaattaggcattccctatgaagaagctcaggcgttcattcagaaatactttcaaagctatcccaaagttaaagcatggatcgagaagactctccgcgaaggccgcacacgtggttacgtagagaccttatttggacgtcgccgctatgttcccgatttaaacgctcgcgtgaaaggcaaacgtgaagccgccgaacgcatggcgttcaacatgcctgtacagggcacggcagctgacctcatgaaacttgcaatggtgcgcctttttccacaattgcgtgaagttggtgcccgcatgctcttgcaggtccacgatgaactcttgttagaagcgccaaaagagcgtgcggaagaggtggcagccctcgcgaaagaagttatggaaggcgtgtggcccttagcggtgcctcttgaagtcgaagttggtattggcgaggattggctggctgccaaagga

SEQ ID NO: 5624 - protein, 841 aa, synthetic construct
  REGION 1..841: note = Variant of DNA polymerase I from Thermus sp. strain 2.9
MHHHHHHGGSGVLPVFEPKGRVLLVDGHHLAYRNFFALKGLTTSLGEPVQGVYGFAKSLLKALKEDGDVVIVVFDAKAPSFRHEAYEAYKAGRAPTPEDFPRQLALMKELVDLLGLERLEVPGFEADDVLATLAKKAEREGYEVQILTADRDLFQLLSPRISVLHPEGHRITPEWLWEKYGLRPEQWVDFRALAGDPSDNIPGVKGIGEKTALKLLKEWGSLENLLKNLDQVKPESVREKILAHLEDLKLSRELSRVRTDLPLEVDFGRRREPDWEGLKAFLERLEFGSLLHEFGLLESPLLAEEAPWPPPEGAFLGYRLSRPEPMWAELLALAASAQGRVYRAEDPHGALRGLFEVRGLLAKDLAVVALREGLDLPPTDDPMLLAYLLDPSNTTPEGVARRYGGEWTEDAAKRALLAERLHENLLGRLQGEERLLWLYEEVEKPLSRVLAHMEATGVKLDVAYLENLSLEVAAHMRRLEEEVFRLAGRSFRLNSRDQLERVLFDELGLPPIGKTEKTGKRSTSAAVLEALREVHPIVDKILQYREMAKLKGTYIDPLPALVHPKTGRLHTRFNQTATATGRLSSSDPNLQNIPVRTPLGQKIRRAFVAEEGWRLVALDYSQIELRVLAHLSGDENLIRVFQEGKDIHTQTASWMFGLSAEAIDPLMRRAAKTINFGVLYGMSAFRLSQELGIPYEEAQAFIQKYFQSYPKVKAWIEKTLREGRTRGYVETLFGRRRYVPDLNARVKGKREAAERMAFNMPVQGTAADLMKLAMVRLFPQLREVGARMLLQVHDELLLEAPKERAEEVAALAKEVMEGVWPLAVPLEVEVGIGEDWLAAKG

SEQ ID NO: 5625 - DNA, 2523 bp, synthetic construct
  misc_feature 1..2523: note = Variant of DNA polymerase I from Thermus sp. strain 2.9
  source 1..2523: mol_type = other DNA
atgcaccatcatcatcatcatggcggtagcggcgtgttaccggtgttcgagcctaaaggtcgcgtgcttctggttgatggccatcatctcgcgtatcgtaacttctttgccctgaaaggattaaccaccagcctgggcgagccggtacagggtgtctacggctttgcaaagtcgctcctgaaagctctgaaagaagacggtgatgtggtgattgttgtctttgatgcgaaagcgccaagttttcgccacgaagcgtacgaagcttacaaagccgggcgtgctccaacgccggaagactttcctcgccaattggcgcttatgaaggaattagtggatttgcttggcctcgaacgcttggaagttcccggtttcgaggcagacgacgtattagcgactctcgcaaagaaagccgaacgtgagggctatgaagtccagatcttgacagcagatcgcgatcttttccagcttttatctccgcgcatctcggtgttacacccggaagggcatcgtatcaccccggaatggctctgggagaaatatggtttgcgtcccgaacaatgggtggattttcgcgccttagcaggcgatccgagcgacaatattccgggagttaaaggtatcggcgagaagacggcgctcaagctccttaaagaatgggggtcgttggagaacttgcttaagaatttagatcaggtcaaaccagagtcagtgcgtgagaagattcttgctcacctcgaagacctcaaattaagccgcgaattgtcccgtgtacgcaccgatttgccgctcgaagttgatttcggtcgccgccgcgaacctgactgggagggtcttaaagcgtttttagagcgtcttgaatttggttcgctcttgcatgaattcggccttttagaaagcccgttactggccgaagaagcaccttggccaccgcccgagggcgcgtttttaggttaccgtttgagtcgcccggaaccgatgtgggccgaattactggctcttgcagcgtctgcccagggacgtgtgtatcgcgcggaagaccctcatggtgcgctccgcggcctcttcgaagtccgtaccctccttgccaaagacttagctgttgttgcattgcgcgaaggtcttgatttacctccgactgatgatccaatgcttcttgcgtacctcttggacccgtcaaacacgacgcccgaaggcgtagcccgtcgttacggcggcgagtggaccgaagatgcagcgaaacgcgcgttattggccgaacgtttgcacgaaaatttattaggacgtttgcaaggcgaggagcgtctcctgtggctttacgaagaagtggagaaaccattgagtcgcgtgctcgcgcatatggaagctaccggtgtcaaattagacgtggcgtatttggagaatctcagccttgaagttgctgcccacatgcgccgcttggaggaagaagtattccgtttagcaggccgttcctttcgccttaactctcgcgatcagttagaacgtgtgttgttcgatgaacttggtctccctcctatcggcaagacagagaagaccggtaaacgtagcacttcagcggcggttttagaagctcttcgcgaagtccatcccattgtggacaagatcttgcagtaccgcgaaatggcgaaattgaaaggcacctatattgaccgtcttccggcattagtccacccgaaaacgggacgcctccatacccgcttcaaccaaacagccacggcgaccggtcgtttgtcctcctctgatccaaaccttcagaatattccagtacgtaccccattgggccagaagatccgccgtgcgtttgtagctgagaagggttgggcgttagtggccctcgattatcgtcaaattgaattacgtgtccttgcccatctttctggcgatgagaacctcatccgcgtgtttcaggaaggcaaagacattcacactcaaacggcaagctggatgtttggattatcagctgaagcgatcgatcctttgatgcgtcgtgcagcgaagaccatcaatttcggtgttctctacggtatgagtgcctttcgtttgtcgcaggaattaggcattccctatgaagaagctcaggcgttcattcagaaatactttcaaagctatcccaaagttaaagcatggatcgagaagactctccgtgaaggccgcacacgtggttacgtagagaccttatttggacgtcgccgctatgttcccgatttaaacggtcgcgtgaaaggcaagcgtgaagccgccgaacgcatggcgttcaacatgcctgtacagggcacggcagctgacctcatgaaacttgcaatggtgcgcctttttccacaattgcgtgaagttggtgcccgcatgctgttgcaggtccacgatgaactcttgttagaagcgccaaaagagcgtgcggaagaggtggcagccctcgcgaaagaagttatggaaggcgtgtggcccttagcggtgcctcttgaagtcgaagttggtattggcgaggattggctggctgccaaagga

SEQ ID NO: 5626 - protein, 841 aa, synthetic construct
  REGION 1..841: note = Variant of DNA polymerase I from Thermus sp. strain 2.9
MHHHHHHGGSGVLPVFEPKGRVLLVDGHHLAYRNFFALKGLTTSLGEPVQGVYGFAKSLLKALKEDGDVVIVVFDAKAPSFRHEAYEAYKAGRAPTPEDFPRQLALMKELVDLLGLERLEVPGFEADDVLATLAKKAEREGYEVQILTADRDLFQLLSPRISVLHPEGHRITPEWLWEKYGLRPEQWVDFRALAGDPSDNIPGVKGIGEKTALKLLKEWGSLENLLKNLDQVKPESVREKILAHLEDLKLSRELSRVRTDLPLEVDFGRRREPDWEGLKAFLERLEFGSLLHEFGLLESPLLAEEAPWPPPEGAFLGYRLSRPEPMWAELLALAASAQGRVYRAEDPHGALRGLFEVRTLLAKDLAVVALREGLDLPPTDDPMLLAYLLDPSNTTPEGVARRYGGEWTEDAAKRALLAERLHENLLGRLQGEERLLWLYEEVEKPLSRVLAHMEATGVKLDVAYLENLSLEVAAHMRRLEEEVFRLAGRSFRLNSRDQLERVLFDELGLPPIGKTEKTGKRSTSAAVLEALREVHPIVDKILQYREMAKLKGTYIDRLPALVHPKTGRLHTRFNQTATATGRLSSSDPNLQNIPVRTPLGQKIRRAFVAEKGWALVALDYRQIELRVLAHLSGDENLIRVFQEGKDIHTQTASWMFGLSAEAIDPLMRRAAKTINFGVLYGMSAFRLSQELGIPYEEAQAFIQKYFQSYPKVKAWIEKTLREGRTRGYVETLFGRRRYVPDLNGRVKGKREAAERMAFNMPVQGTAADLMKLAMVRLFPQLREVGARMLLQVHDELLLEAPKERAEEVAALAKEVMEGVWPLAVPLEVEVGIGEDWLAAKG

SEQ ID NO: 5627 - DNA, 2523 bp, synthetic construct
  misc_feature 1..2523: note = Variant of DNA polymerase I from Thermus sp. strain 2.9
  source 1..2523: mol_type = other DNA
atgcaccatcatcatcatcatggcggtagcggcgtgttaccggtgttcgagcctaaaggtcgcgtgcttctggttgatggccatcatctcgcgtatcgtaacttctttgccctgaaaggattaaccaccagcctgggcgagccggtacagggtgtctacggctttgcaaagtcgctcctgaaagctctgaaagaagacggtgatgtggtgattgttgtctttgatgcgaaagcgccaagttttcgccacgaagcgtacgaagcttacaaagccgggcgtgctccaacgccggaagactttcctcgccaattggcgcttatgaaggaattagtggatttgcttggcctcgaacgcttggaagttcccggtttcgaggcagacgacgtattagcgactctcgcaaagaaagccgaacgtgagggctatgaagtccagatcttgacagcagatcgcgatcttttccagcttttatctccgcgcatctcggtgttacacccggaagggcatcgtatcaccccggaatggctctgggagaaatatggtttgcgtcccgaacaatgggtggattttcgcgccttagcaggcgatccgagcgacaatattccgggagttaaaggtatcggcgagaagacggcgctcaagctccttaaagaatgggggtcgttggagaacttgcttaagaatttagatcaggtcaaaccagagtcagtgcgtgagaagattcttgctcacctcgaagacctcaaattaagccgcgaattgtcccgtgtacgcaccgatttgccgctcgaagttgatttcggtcgccgccgcgaacctgactgggagggtcttaaagcgtttttagagcgtcttgaatttggttcgctcttgcatgaattcggccttttagaaagcccgttactggccgaagaagcaccttggccaccgcccgagggcgcgtttttaggttaccgtttgagtcgcccggaaccgatgtgggccgaattactggctcttgcagcgtctgcccagggacgtgtgtatcgcgcggaagaccctcatggtgcgctccgcggcctcttcgaagtccgtggactccttgccaaagacttagctgttgttgcattgcgcgaaggtcttgatttacctccgactgatgatccaatgcttcttgcgtacctcttggacccgtcaaacacgacgcccgaaggcgtagcccgtcgttacggcggcgagtggaccgaagatgcaggcaaacgcgcgttattggccgaacgtttgcacgaaaatttattaggacgtttgcaaggcgaggagcgtctcctgtggctttacgaagaagtggagaaaccattgagtcgcgtgctcgcgcatatggaagctaccggtgtcaaattagacgtggcgtatttggagaatctcagccttgaagttgctgcccacatgcgccgcttggaggaagaagtattccgtttagcaggccgttcctttcgccttaactctcgcgatcagttagaacgtgtgttgttcgatgaacttggtctccctcctatcggcaagacagagaagaccggtaaacgtagcacttcagcggcggttttagaagctcttcgcgaagtccatcccattgtggacaagatcttgcagtaccgcgaaatggcgaaattgaaaggcacctatattgaccgtcttccggcattagtccacccgaaaacgggacgcctccatacccgcttcaaccaaacagccacggcgaccggtcgtttgtcctcctctgatccaaaccttcagaatattccagtacgtaccccattgggccagaagatccgccgtgcgtttgtagctgaggagggttggcgtttagtggccctcgattatcgtcaaattgaattacgtgtccttgcccatctttctggcgatgagaacctcatccgcgtgtttcaggaaggcaaagacattcacactcaaacggcaagctggatgtttggattatcagctgaagcgatcgatcctttgatgcgtcgtgcagcgaagaccatcaatttcggtgttctctacggtatgagtgcctttcgtttgtcgcaggaattaggcattcccctggaagaagctcaggctttcattcagaaatactttcaaagctatcccaaagttaaagcatggatcgagaagactctccgtgaaggccgcacacgtggttacgtagagaccttatttggacgtcgccgctatgttcccgatttaaacgctcgcgtgaaaggcaagcgtgaagccgccgaacgcatggcgttcaacatgcctgtacagggcacggcagctgacctcatgaaacttgcaatggtgcgcctttttccacaattgcgtgaagttggtgcccgcatggatttgcaggtccacgatgaactcttgttagaagcgccaaaagagcgtgcggaagaggtggcagccctcgcgaaagaagttatggaaggcgtgtggcccttagcggtgcctcttgaagtcgaagttggtattggcgaggattggctggctgccaaagga

SEQ ID NO: 5628 - protein, 841 aa, synthetic construct
  REGION 1..841: note = Variant of DNA polymerase I from Thermus sp. strain 2.9
MHHHHHHGGSGVLPVFEPKGRVLLVDGHHLAYRNFFALKGLTTSLGEPVQGVYGFAKSLLKALKEDGDVVIVVFDAKAPSFRHEAYEAYKAGRAPTPEDFPRQLALMKELVDLLGLERLEVPGFEADDVLATLAKKAEREGYEVQILTADRDLFQLLSPRISVLHPEGHRITPEWLWEKYGLRPEQWVDFRALAGDPSDNIPGVKGIGEKTALKLLKEWGSLENLLKNLDQVKPESVREKILAHLEDLKLSRELSRVRTDLPLEVDFGRRREPDWEGLKAFLERLEFGSLLHEFGLLESPLLAEEAPWPPPEGAFLGYRLSRPEPMWAELLALAASAQGRVYRAEDPHGALRGLFEVRGLLAKDLAVVALREGLDLPPTDDPMLLAYLLDPSNTTPEGVARRYGGEWTEDAGKRALLAERLHENLLGRLQGEERLLWLYEEVEKPLSRVLAHMEATGVKLDVAYLENLSLEVAAHMRRLEEEVFRLAGRSFRLNSRDQLERVLFDELGLPPIGKTEKTGKRSTSAAVLEALREVHPIVDKILQYREMAKLKGTYIDRLPALVHPKTGRLHTRFNQTATATGRLSSSDPNLQNIPVRTPLGQKIRRAFVAEEGWRLVALDYRQIELRVLAHLSGDENLIRVFQEGKDIHTQTASWMFGLSAEAIDPLMRRAAKTINFGVLYGMSAFRLSQELGIPLEEAQAFIQKYFQSYPKVKAWIEKTLREGRTRGYVETLFGRRRYVPDLNARVKGKREAAERMAFNMPVQGTAADLMKLAMVRLFPQLREVGARMDLQVHDELLLEAPKERAEEVAALAKEVMEGVWPLAVPLEVEVGIGEDWLAAKG

SEQ ID NO: 5629 - DNA, 2523 bp, synthetic construct
  misc_feature 1..2523: note = Variant of DNA polymerase I from Thermus sp. strain 2.9
  source 1..2523: mol_type = other DNA
atgcaccatcatcatcatcatggcggtagcggcgtgttaccggtgttcgagcctaaaggtcgcgtgcttctggttgatggccatcatctcgcgtatcgtaacttctttgccctgaaaggattaaccaccagcctgggcgagccggtacagggtgtctacggctttgcaaagtcgctcctgaaagctctgaaagaagacggtgatgtggtgattgttgtctttgatgcgaaagcgccaagttttcgccacgaagcgtacgaagcttacaaagccgggcgtgctccaacgccggaagactttcctcgccaattggcgcttatgaaggaattagtggatttgcttggcctcgaacgcttggaagttcccggtttcgaggcagacgacgtattagcgactctcgcaaagaaagccgaacgtgagggctatgaagtccagatcttgacagcagatcgcgatcttttccagcttttatctccgcgcatctcggtgttacacccggaagggcatcgtatcaccccggaatggctctgggagaaatatggtttgcgtcccgaacaatgggtggattttcgcgccttagcaggcgatccgagcgacaatattccgggagttaaaggtatcggcgagaagacggcgctcaagctccttaaagaatgggggtcgttggagaacttgcttaagaatttagatcaggtcaaaccagagtcagtgcgtgagaagattcttgctcacctcgaagacctcaaattaagccgcgaattgtcccgtgtacgcaccgatttgccgctcgaagttgatttcggtcgccgccgcgaacctgactgggagggtcttaaagcgtttttagagcgtcttgaatttggttcgctcttgcatgaattcggccttttagaaagcccgttactggccgaagaagcaccttggccaccgcccgagggcgcgtttttaggttaccgtttgagtcgcccggaaccgatgtgggccgaattactggctcttgcagcgtctgcccagggacgtgtgtatcgcgcggaagaccctcatggtgcgctccgcggcctcttcgaagtccgtggactccttgccaaagacttagctgttgttgcattgcgcgaaggtcttgatttacctccgactgatgatccaatgcttcttgcgtacctcttggacccgtcaaacacgacgcccgaaggcgtagcccgtcgttacggcggcgagtggaccgaagatgcagcgaaacgcgcgttattggccgaacgtttgcacgaagggttattaggacgtttgcaaggcgaggaacgtctcctctggctttacgaagaagtggagaaaccattgagtcgcgtgctcgcgcatatggaagctaccggtgtcaaattagacgtggcgtatttggagaatctcagccttgaagttgctgcccacatgcgccgcttggaggaagaagtattccgtttagcaggccgttcctttcgccttaactctcgcgatcagttagaacgtgtgttgttcgatgaacttggtctccctcctatcggcaagacagagaagaccggtaaacgtagcacttcagcggcggttttagaagctcttcgcgaagtccatcccattgtggacaagatcttgcagtaccgcgaaatggcgaaattgaaaggcacctatattgaccgtcttccggcattagtccacccgaaaacgggacgcctccatacccgcttcaaccaaacagccacggcgaccggtcgtttgtcctcctctgatccaaaccttcagaatattccagtacgtaccccattgggccagaagatccgccgtgcgtttgtagctgaggagggttggcgtttagtggccctcgattatcgtcaaattgaattacgtgtccttgcccatctttctggcgatgagaacctcatccgcgtgtttcaggaaggcaaagacattcacactcaaacggcaagctggatgtttggattatcagctgaagcgatcgatcctttgatgcgtcgtgcagcgaagaccatcaatttcggtgttctctacggtatgagtgcctttcgtttgtcgcaggaattaggcattccctatgaagaagctcaggcgttcattcagaaatactttcaaagctatcccaaagttaaagcatggatcgagaagactctccgtgaaggccgcacacgtggttacgtagagaccttatttggacgtcgccgctatgttcccgatttaaacgctcgcgtgaaaggcaagcgtgaagccgccgaacgcatggcgttcaacatgcctgtacagggcacggcagctgacctcatgaaacttgcaatggtgcgcctttttccacaattgcgtgaagttggtgcccgcatgctcttgcaggtccacgatgaactcttgttagaagcgccaaaagagcgtgcggaagaggtggcagccctcgcgaaagaagttatggaaggcgtgtggcccttagcggtgcctcttgaagtcgaagttggtattggcgaggattggctggctgccaaagga

SEQ ID NO: 5630 - protein, 841 aa, synthetic construct
  REGION 1..841: note = Variant of DNA polymerase I from Thermus sp. strain 2.9
MHHHHHHGGSGVLPVFEPKGRVLLVDGHHLAYRNFFALKGLTTSLGEPVQGVYGFAKSLLKALKEDGDVVIVVFDAKAPSFRHEAYEAYKAGRAPTPEDFPRQLALMKELVDLLGLERLEVPGFEADDVLATLAKKAEREGYEVQILTADRDLFQLLSPRISVLHPEGHRITPEWLWEKYGLRPEQWVDFRALAGDPSDNIPGVKGIGEKTALKLLKEWGSLENLLKNLDQVKPESVREKILAHLEDLKLSRELSRVRTDLPLEVDFGRRREPDWEGLKAFLERLEFGSLLHEFGLLESPLLAEEAPWPPPEGAFLGYRLSRPEPMWAELLALAASAQGRVYRAEDPHGALRGLFEVRGLLAKDLAVVALREGLDLPPTDDPMLLAYLLDPSNTTPEGVARRYGGEWTEDAAKRALLAERLHEGLLGRLQGEERLLWLYEEVEKPLSRVLAHMEATGVKLDVAYLENLSLEVAAHMRRLEEEVFRLAGRSFRLNSRDQLERVLFDELGLPPIGKTEKTGKRSTSAAVLEALREVHPIVDKILQYREMAKLKGTYIDRLPALVHPKTGRLHTRFNQTATATGRLSSSDPNLQNIPVRTPLGQKIRRAFVAEEGWRLVALDYRQIELRVLAHLSGDENLIRVFQEGKDIHTQTASWMFGLSAEAIDPLMRRAAKTINFGVLYGMSAFRLSQELGIPYEEAQAFIQKYFQSYPKVKAWIEKTLREGRTRGYVETLFGRRRYVPDLNARVKGKREAAERMAFNMPVQGTAADLMKLAMVRLFPQLREVGARMLLQVHDELLLEAPKERAEEVAALAKEVMEGVWPLAVPLEVEVGIGEDWLAAKG

SEQ ID NO: 5631 - DNA, 2523 bp, synthetic construct
  misc_feature 1..2523: note = Variant of DNA polymerase I from Thermus sp. strain 2.9
  source 1..2523: mol_type = other DNA
atgcaccatcatcatcatcatggcggtagcggcgtgttaccggtgttcgagcctaaaggtcgcgtgcttctggttgatggccatcatctcgcgtatcgtaacttctttgccctgaaaggattaaccaccagcctgggcgagccggtacagggtgtctacggctttgcaaagtcgctcctgaaagctctgaaagaagacggtgatgtggtgattgttgtctttgatgcgaaagcgccaagttttcgccacgaagcgtacgaagcttacaaagccgggcgtgctccaacgccggaagactttcctcgccaattggcgcttatgaaggaattagtggatttgcttggcctcgaacgcttggaagttcccggtttcgaggcagacgacgtattagcgactctcgcaaagaaagccgaacgtgagggctatgaagtccagatcttgacagcagatcgcgatcttttccagcttttatctccgcgcatctcggtgttacacccggaagggcatcgtatcaccccggaatggctctgggagaaatatggtttgcgtcccgaacaatgggtggattttcgcgccttagcaggcgatccgagcgacaatattccgggagttaaaggtatcggcgagaagacggcgctcaagctccttaaagaatgggggtcgttggagaacttgcttaagaatttagatcaggtcaaaccagagtcagtgcgtgagaagattcttgctcacctcgaagacctcaaattaagccgcgaattgtcccgtgtacgcaccgatttgccgctcgaagttgatttcggtcgccgccgcgaacctgactgggagggtcttaaagcgtttttagagcgtcttgaatttggttcgctcttgcatgaattcggccttttagaaagcccgttactggccgaagaagcaccttggccaccgcccgagggcgcgtttttaggttaccgtttgagtcgcccggaaccgatgtgggccgaattactggctcttgcagcgtctgcccagggacgtgtgtatcgcgcggaagaccctcatggtgcgctccgcggcctcttcgaagtccgtggactccttgccaaagacttagctgttgttgcattgcgcgaaggtcttgatttacctccgactgatgatccaatgcttcttgcgtacctcttggacccgtcaaacacgacgcccgaaggcgtagcccgtcgttacggcggcgagtggaccgaagatgcagcgaaacgcgcgttattggccgaacgtttgcacgaaaatttattaggacgtttgcaaggcgaggaacgtctcctctggctttacgaagaagtggagaaaccattgagtcgcgtgctcgcgcatatggaagctaccggtgtcaaattagacgtggcgtatttggagaatctcagccttgaagttgctgcccacatgcgccgcttggaggaagaagtattccgtttagcaggccgttcctttcgccttaactctcgcgatcagttagaacgtgtgttgttcgatgaacttggtctccctcctatcggcaagacagagaagaccggtaaacgtagcacttcagcggcggttttagaagctcttcgcgaagtccatcccattgtggacaagatcttgcagtaccgcgaaatggcgaaattgaaaggcacctatattgaccgtcttccggcattagtccacccgaaaacgggacgcctccatacccgcttcaaccaaacagccacggcgaccggtcgtttgtcctcctctgatccaaaccttcagaatattccagtacgtaccccattgggccagaagatccgccgtgcgtttgtagctgaggagggttggcgtttagtggccctcgattatcgtcaaattgaattacgtgtccttgcccatctttctggcgatgagaacctcatccgcgtgtttcaggaaggcaaagacattcacactcaaacgtctagctggatgtttggattatcagctgaagcgatcgatcctttgatgcgtcgtgcagcgaagaccatcaatttcggtgttctctacggtatgagtgcctttcgtttgtcgcaggaattaggcattccctatgaagaagctcaggcgttcattcagaaatactttcaaagctatcccaaagttaaagcatggatcgagaagactctccgtgaaggccgcacacgtggttacgtagagaccttatttggacgtcgccgctatgttcccgatttaaacgctcgcgtgaaaggcaagcgtgaagccgccgaacgcatggcgttcaacatgcctgtacagggcacggcagctgacctcatgaaacttgcaatggtgcgcctttttccacaattgcgtgaagttggtgcccgcatgctcttgcaggtccacgatgaactcttgttagaagcgccaaaagagcgtgcggaagaggtggcagccctcgcgaaagaagttatggaaggcgtgtggcccttagcggtgcctcttgaagtcgaagttggtattggcgaggattggctggctgccaaagga

SEQ ID NO: 5632 - protein, 841 aa, synthetic construct
  REGION 1..841: note = Variant of DNA polymerase I from Thermus sp. strain 2.9
MHHHHHHGGSGVLPVFEPKGRVLLVDGHHLAYRNFFALKGLTTSLGEPVQGVYGFAKSLLKALKEDGDVVIVVFDAKAPSFRHEAYEAYKAGRAPTPEDFPRQLALMKELVDLLGLERLEVPGFEADDVLATLAKKAEREGYEVQILTADRDLFQLLSPRISVLHPEGHRITPEWLWEKYGLRPEQWVDFRALAGDPSDNIPGVKGIGEKTALKLLKEWGSLENLLKNLDQVKPESVREKILAHLEDLKLSRELSRVRTDLPLEVDFGRRREPDWEGLKAFLERLEFGSLLHEFGLLESPLLAEEAPWPPPEGAFLGYRLSRPEPMWAELLALAASAQGRVYRAEDPHGALRGLFEVRGLLAKDLAVVALREGLDLPPTDDPMLLAYLLDPSNTTPEGVARRYGGEWTEDAAKRALLAERLHENLLGRLQGEERLLWLYEEVEKPLSRVLAHMEATGVKLDVAYLENLSLEVAAHMRRLEEEVFRLAGRSFRLNSRDQLERVLFDELGLPPIGKTEKTGKRSTSAAVLEALREVHPIVDKILQYREMAKLKGTYIDRLPALVHPKTGRLHTRFNQTATATGRLSSSDPNLQNIPVRTPLGQKIRRAFVAEEGWRLVALDYRQIELRVLAHLSGDENLIRVFQEGKDIHTQTSSWMFGLSAEAIDPLMRRAAKTINFGVLYGMSAFRLSQELGIPYEEAQAFIQKYFQSYPKVKAWIEKTLREGRTRGYVETLFGRRRYVPDLNARVKGKREAAERMAFNMPVQGTAADLMKLAMVRLFPQLREVGARMLLQVHDELLLEAPKERAEEVAALAKEVMEGVWPLAVPLEVEVGIGEDWLAAKG

SEQ ID NO: 5633 - DNA, 2523 bp, synthetic construct
  misc_feature 1..2523: note = Variant of DNA polymerase I from Thermus sp. strain 2.9
  source 1..2523: mol_type = other DNA
atgcaccatcatcatcatcatggcggtagcggcgtgttaccggtgttcgagcctaaaggtcgcgtgcttctggttgatggccatcatctcgcgtatcgtaacttctttgccctgaaaggattaaccaccagcctgggcgagccggtacagggtgtctacggctttgcaaagtcgctcctgaaagctctgaaagaagacggtgatgtggtgattgttgtctttgatgcgaaagcgccaagttttcgccacgaagcgtacgaagcttacaaagccgggcgtgctccaacgccggaagactttcctcgccaattggcgcttatgaaggaattagtggatttgcttggcctcgaacgcttggaagttcccggtttcgaggcagacgacgtattagcgactctcgcaaagaaagccgaacgtgagggctatgaagtccagatcttgacagcagatcgcgatcttttccagcttttatctccgcgcatctcggtgttacacccggaagggcatcgtatcaccccggaatggctctgggagaaatatggtttgcgtcccgaacaatgggtggattttcgcgccttagcaggcgatccgagcgacaatattccgggagttaaaggtatcggcgagaagacggcgctcaagctccttaaagaatgggggtcgttggagaacttgcttaagaatttagatcaggtcaaaccagagtcagtgcgtgagaagattcttgctcacctcgaagacctcaaattaagccgcgaattgtcccgtgtacgcaccgatttgccgctcgaagttgatttcggtcgccgccgcgaacctgactgggagggtcttaaagcgtttttagagcgtcttgaatttggttcgctcttgcatgaattcggccttttagaaagcccgttactggccgaagaagcaccttggccaccgcccgagggcgcgtttttaggttaccgtttgagtcgcccggaaccgatgtgggccgaattactggctcttgcagcgtctgcccagggacgtgtgtatcgcgcggaagaccctcatggtgcgctccgcggcctcttcgaagtccgtggactccttgccaaagacttagctgttgttgcattgcgcgaaggtcttgatttacctccgactgatgatccaatgcttcttgcgtacctcttggacccgtcaaacacgacgcccgaaggcgtagcccgtcgttacggcggcgagtggaccgaagatgcagcgaaacgcgcgttattggccgaacgtttgcacgaactgttattaggacgtttgcaaggcgaggaacgtctcctctggctttacgaagaagtggagaaaccattgagtcgcgtgctcgcgcatatggaagctaccggtgtcaaattagacgtggcgtatttggagaatctcagccttgaagttgctgcccacatgcgccgcttggaggaagaagtattccgtttagcaggccgttcctttcgccttaactctcgcgatcagttagaacgtgtgttgttcgatgaacttggtctccctcctatcggcaagacagagaagaccggtaaacgtagcacttcagcggcggttttagaagctcttcgcgaagtccatcccattgtggacaagatcttgcagtaccgcgaaatggcgaaattgaaaggcacctatattgaccgtcttccggcattagtccacccgaaaacgggacgcctccatacccgcttcaaccaaacagccacggcgaccggtcgtttgtcctcctctgatccaaaccttcagaatattccagtacgtaccccattgggccagaagatccgccgtgcgtttgtagctgaggagggttggcgtttagtggccctcgattatcgtcaaattgaattacgtgtccttgcccatctttctggcgatgagaacctcatccgcgtgtttcaggaaggcaaagacattcacactcaaacggcaagctggatgtttggattatcagctgaagcgatcgatcctttgatgcgtcgtgcagcgaagaccatcaatttcggtgttctctacggtatgagtgcctttcgtttgtcgcaggaattaggcattccctatgaagaagctcaggcgttcattcagaaatactttcaaagctatcccaaagttaaagcatggatcgagaagactctccgtgaaggccgcacacgtggttacgtagagaccttatttggacgtcgccgctatgttcccgatttaaacgctcgcgtgaaaggcaagcgtgaagccgccgaacgcatggcgttcaacatgcctgtacagggcacggcagctgacctcatgaaacttgcaatggtgcgcctttttccacaattgcgtgaagttggtgcccgcatgctcttgcaggtccacgatgaactcttgttagaagcgccaaaagagcgtgcggaagaggtggcagccctcgcgaaagaagttatggaaggcgtgtggcccttagcggtgcctcttgaagtcgaagttggtattggcgaggattggctggctgccaaagga

SEQ ID NO: 5634 - protein, 841 aa, synthetic construct
  REGION 1..841: note = Variant of DNA polymerase I from Thermus sp. strain 2.9
MHHHHHHGGSGVLPVFEPKGRVLLVDGHHLAYRNFFALKGLTTSLGEPVQGVYGFAKSLLKALKEDGDVVIVVFDAKAPSFRHEAYEAYKAGRAPTPEDFPRQLALMKELVDLLGLERLEVPGFEADDVLATLAKKAEREGYEVQILTADRDLFQLLSPRISVLHPEGHRITPEWLWEKYGLRPEQWVDFRALAGDPSDNIPGVKGIGEKTALKLLKEWGSLENLLKNLDQVKPESVREKILAHLEDLKLSRELSRVRTDLPLEVDFGRRREPDWEGLKAFLERLEFGSLLHEFGLLESPLLAEEAPWPPPEGAFLGYRLSRPEPMWAELLALAASAQGRVYRAEDPHGALRGLFEVRGLLAKDLAVVALREGLDLPPTDDPMLLAYLLDPSNTTPEGVARRYGGEWTEDAAKRALLAERLHELLLGRLQGEERLLWLYEEVEKPLSRVLAHMEATGVKLDVAYLENLSLEVAAHMRRLEEEVFRLAGRSFRLNSRDQLERVLFDELGLPPIGKTEKTGKRSTSAAVLEALREVHPIVDKILQYREMAKLKGTYIDRLPALVHPKTGRLHTRFNQTATATGRLSSSDPNLQNIPVRTPLGQKIRRAFVAEEGWRLVALDYRQIELRVLAHLSGDENLIRVFQEGKDIHTQTASWMFGLSAEAIDPLMRRAAKTINFGVLYGMSAFRLSQELGIPYEEAQAFIQKYFQSYPKVKAWIEKTLREGRTRGYVETLFGRRRYVPDLNARVKGKREAAERMAFNMPVQGTAADLMKLAMVRLFPQLREVGARMLLQVHDELLLEAPKERAEEVAALAKEVMEGVWPLAVPLEVEVGIGEDWLAAKG

SEQ ID NO: 5635 - DNA, 2523 bp, synthetic construct
  misc_feature 1..2523: note = Variant of DNA polymerase I from Thermus sp. strain 2.9
  source 1..2523: mol_type = other DNA
atgcaccatcatcatcatcatggcggtagcggcgtgttaccggtgttcgagcctaaaggtcgcgtgcttctggttgatggccatcatctcgcgtatcgtaacttctttgccctgaaaggattaaccaccagcctgggcgagccggtacagggtgtctacggctttgcaaagtcgctcctgaaagctctgaaagaagacggtgatgtggtgattgttgtctttgatgcgaaagcgccaagttttcgccacgaagcgtacgaagcttacaaagccgggcgtgctccaacgccggaagactttcctcgccaattggcgcttatgaaggaattagtggatttgcttggcctcgaacgcttggaagttcccggtttcgaggcagacgacgtattagcgactctcgcaaagaaagccgaacgtgagggctatgaagtccagatcttgacagcagatcgcgatcttttccagcttttatctccgcgcatctcggtgttacacccggaagggcatcgtatcaccccggaatggctctgggagaaatatggtttgcgtcccgaacaatgggtggattttcgcgccttagcaggcgatccgagcgacaatattccgggagttaaaggtatcggcgagaagacggcgctcaagctccttaaagaatgggggtcgttggagaacttgcttaagaatttagatcaggtcaaaccagagtcagtgcgtgagaagattcttgctcacctcgaagacctcaaattaagccgcgaattgtcccgtgtacgcaccgatttgccgctcgaagttgatttcggtcgccgccgcgaacctgactgggagggtcttaaagcgtttttagagcgtcttgaatttggttcgctcttgcatgaattcggccttttagaaagcccgttactggccgaagaagcaccttggccaccgcccgagggcgcgtttttaggttaccgtttgagtcgcccggaaccgatgtgggccgaattactggctcttgcagcgtctgcccagggacgtgtgtatcgcgtggaagaccctcatggtgcgctccgcggcctcttcgaagtccgtggactccttgccaaagacttagctgttgttgcattgcgcgaaggtcttgatttacctccgactgatgatccaatgcttcttgcgtacctcttggacccgtcaaacacgacgcccgaaggcgtagcccgtcgttacggcggcgagtggaccgaagatgcagcgaaacgcgcgttattggccgaacgtttgcacgaaaatttattaggacgtttgcaaggcgaggaacgtctcctctggctttacgaagaagtggagaaaccattgagtcgcgtgctcgcgcatatggaagctaccggtgtcaaattagacgtggcgtatttggagaatctcagccttgaagttgctgcccacatgcgccgcttggaggaagaagtattccgtttagcaggccgttcctttcgccttaactctcgcgatcagttagaacgtgtgttgttcgatgaacttggtctccctcctatcggcaagacagagaagaccggtaaacgtagcacttcagcggcggttttagaagctcttcgcgaagtccatcccattgtggacaagatcttgcagtaccgcgaaatggcgaaattgaaaggcacctatattgaccgtcttccggcattagtccacccgaaaacgggacgcctccatacccgcttcaaccaaacagccacggcgaccggtcgtttgtcctcctctgatccaaaccttcagaatattccagtacgtaccccattgggccagaagatccgccgtgcgtttgtagctgaggagggttggcgtttagtggccctcgattatcgtcaaattgaattacgtgtccttgcccatctttctggcgatgagaacctcatccgcgtgtttcaggaaggcaaagacattcacactcaaacggcaagctggatgtttggattatcagctgaagcgatcgatcctttgatgcgtcgtgcagcgaagaccatcaatttcggtgttctctacggtatgagtgcctttcgtttgtcgcaggaattaggcattccctatgaagaagctcaggcgttcattcagaaatactttcaaagctatcccaaagttaaagcatggatcgagaagactctccgtgaaggccgcacacgtggttacgtagagaccttatttggacgtcgccgctatgttcccgatttaaacgctcgcgtgaaaggcaagcgtgaagccgccgaacgcatggcgttcaacatgcctgtacagggcacggcagctgacctcatgaaacttgcaatggtgcgcctttttccacaattgcgtgaagttggtgcccgcatgctcttgcaggtccacgatgaactcttgttagaagcgccaaaagagcgtgcggaagaggtggcagccctcgcgaaagaagttatggaaggcgtgtggcccttagcggtgcctcttgaagtcgaagttggtattggcgaggattggctggctgccaaagga

SEQ ID NO: 5636 - protein, 841 aa, synthetic construct
  REGION 1..841: note = Variant of DNA polymerase I from Thermus sp. strain 2.9
MHHHHHHGGSGVLPVFEPKGRVLLVDGHHLAYRNFFALKGLTTSLGEPVQGVYGFAKSLLKALKEDGDVVIVVFDAKAPSFRHEAYEAYKAGRAPTPEDFPRQLALMKELVDLLGLERLEVPGFEADDVLATLAKKAEREGYEVQILTADRDLFQLLSPRISVLHPEGHRITPEWLWEKYGLRPEQWVDFRALAGDPSDNIPGVKGIGEKTALKLLKEWGSLENLLKNLDQVKPESVREKILAHLEDLKLSRELSRVRTDLPLEVDFGRRREPDWEGLKAFLERLEFGSLLHEFGLLESPLLAEEAPWPPPEGAFLGYRLSRPEPMWAELLALAASAQGRVYRVEDPHGALRGLFEVRGLLAKDLAVVALREGLDLPPTDDPMLLAYLLDPSNTTPEGVARRYGGEWTEDAAKRALLAERLHENLLGRLQGEERLLWLYEEVEKPLSRVLAHMEATGVKLDVAYLENLSLEVAAHMRRLEEEVFRLAGRSFRLNSRDQLERVLFDELGLPPIGKTEKTGKRSTSAAVLEALREVHPIVDKILQYREMAKLKGTYIDRLPALVHPKTGRLHTRFNQTATATGRLSSSDPNLQNIPVRTPLGQKIRRAFVAEEGWRLVALDYRQIELRVLAHLSGDENLIRVFQEGKDIHTQTASWMFGLSAEAIDPLMRRAAKTINFGVLYGMSAFRLSQELGIPYEEAQAFIQKYFQSYPKVKAWIEKTLREGRTRGYVETLFGRRRYVPDLNARVKGKREAAERMAFNMPVQGTAADLMKLAMVRLFPQLREVGARMLLQVHDELLLEAPKERAEEVAALAKEVMEGVWPLAVPLEVEVGIGEDWLAAKG

SEQ ID NO: 5637 - DNA, 2523 bp, synthetic construct
  misc_feature 1..2523: note = Variant of DNA polymerase I from Thermus sp. strain 2.9
  source 1..2523: mol_type = other DNA
atgcaccatcatcatcatcatggcggtagcggcgtgttaccggtgttcgagcctaaaggtcgcgtgcttctggttgatggccatcatctcgcgtatcgtaacttctttgccctgaaaggattaaccaccagcctgggcgagccggtacagggtgtctacggctttgcaaagtcgctcctgaaagctctgaaagaagacggtgatgtggtgattgttgtctttgatgcgaaagcgccaagttttcgccacgaagcgtacgaagcttacaaagccgggcgtgctccaacgccggaagactttcctcgccaattggcgcttatgaaggaattagtggatttgcttggcctcgaacgcttggaagttcccggtttcgaggcagacgacgtattagcgactctcgcaaagaaagccgaacgtgagggctatgaagtccagatcttgacagcagatcgcgatcttttccagcttttatctccgcgcatctcggtgttacacccggaagggcatcgtatcaccccggaatggctctgggagaaatatggtttgcgtcccgaacaatgggtggattttcgcgccttagcaggcgatccgagcgacaatattccgggagttaaaggtatcggcgagaagacggcgctcaagctccttaaagaatgggggtcgttggagaacttgcttaagaatttagatcaggtcaaaccagagtcagtgcgtgagaagattcttgctcacctcgaagacctcaaattaagccgcgaattgtcccgtgtacgcaccgatttgccgctcgaagttgatttcggtcgccgccgcgaacctgactgggagggtcttaaagcgtttttagagcgtcttgaatttggttcgctcttgcatgaattcggccttttagaaagcccgttactggccgaagaagcaccttggccaccgcccgagggcgcgtttttaggttaccgtttgagtcgcccggaaccgatgtgggccgaattactggctcttgcagcgtctgcccagggacgtgtgtatcgcgcggaagaccctcatggtgcgctccgcggcctcttcgaagtccgtggactccttgccaaagacttagctgttgttgcattgcgcgaaggtcttgatttacctccgactgatgatccaatgcttcttgcgtacctcttggacccgtcaaacacgacgcccgaaggcgtagcccgtcgttacggcggcgagtggaccgaagatgcagcgaaacgcgcgttattggccgaacgtttgcacgaaaatttattaggacgtttgcaaggcgaggaacgtctcctctggctttacgaagaagtggagaaaccattgagtcgcgtgctcgcgcatatggaagctaccggtgtcaaattagacgtggcgtatttggagaatctcagccttgaagttgctgcccacatgcgccgcttggaggaagaagtattccgtttagcaggccgttcctttcgccttaactctcgcgatcagttagaacgtgtgttgttcgatgaacttggtctccctcctatcggcaagacagagaagaccggtaaacgtagcacttcagcggcggttttagaagctcttcgcgaagtccatcccattgtggacaagatcttgcagtaccgcgaaatggcgaaattgaaaggcacctatattgaccgtcttccggcattagtccacccgaaaacgggacgcctccatacccgcttcaaccaaacagccacggcgaccggtcgtttgtcctcctctgatccaaaccttcagaatattccagtacgtaccccattgggccagaagatccgccgtgcgtttgtagctgaggagggttggcgtttagtggatctcgattatcgtcaaattgaattacgtgtccttgcccatctttctggcgatgagaacctcatccgcgtgtttcaggaaggcaaagacattcacactcaaacggcaagctggatgtttggattatcagctgaagcgatcgatcctttgatgcgtcgtgcagcgaagaccatcaatttcggtgttctctacggtatgagtgcctttcgtttgtcgcaggaattaggcattccctatgaagaagctcaggcgttcattcagaaatactttcaaagctatcccaaagttaaagcatggatcgagaagactctccgtgaaggccgcacacgtggttacgtagagaccttatttggacgtcgccgctatgttcccgatttaaacgctcgcgtgaaaggcaagcgtgaagccgccgaacgcatggcgttcaacatgcctgtacagggcacggcagctgacctcatgaaacttgcaatggtgcgcctttttccacaattgcgtgaagttggtgcccgcatgctcttgcaggtccacgatgaactcttgttagaagcgccaaaagagcgtgcggaagaggtggcagccctcgcgaaagaagttatggaaggcgtgtggcccttagcggtgcctcttgaagtcgaagttggtattggcgaggattggctggctgccaaagga

SEQ ID NO: 5638 - protein, 841 aa, synthetic construct
  REGION 1..841: note = Variant of DNA polymerase I from Thermus sp. strain 2.9
MHHHHHHGGSGVLPVFEPKGRVLLVDGHHLAYRNFFALKGLTTSLGEPVQGVYGFAKSLLKALKEDGDVVIVVFDAKAPSFRHEAYEAYKAGRAPTPEDFPRQLALMKELVDLLGLERLEVPGFEADDVLATLAKKAEREGYEVQILTADRDLFQLLSPRISVLHPEGHRITPEWLWEKYGLRPEQWVDFRALAGDPSDNIPGVKGIGEKTALKLLKEWGSLENLLKNLDQVKPESVREKILAHLEDLKLSRELSRVRTDLPLEVDFGRRREPDWEGLKAFLERLEFGSLLHEFGLLESPLLAEEAPWPPPEGAFLGYRLSRPEPMWAELLALAASAQGRVYRAEDPHGALRGLFEVRGLLAKDLAVVALREGLDLPPTDDPMLLAYLLDPSNTTPEGVARRYGGEWTEDAAKRALLAERLHENLLGRLQGEERLLWLYEEVEKPLSRVLAHMEATGVKLDVAYLENLSLEVAAHMRRLEEEVFRLAGRSFRLNSRDQLERVLFDELGLPPIGKTEKTGKRSTSAAVLEALREVHPIVDKILQYREMAKLKGTYIDRLPALVHPKTGRLHTRFNQTATATGRLSSSDPNLQNIPVRTPLGQKIRRAFVAEEGWRLVDLDYRQIELRVLAHLSGDENLIRVFQEGKDIHTQTASWMFGLSAEAIDPLMRRAAKTINFGVLYGMSAFRLSQELGIPYEEAQAFIQKYFQSYPKVKAWIEKTLREGRTRGYVETLFGRRRYVPDLNARVKGKREAAERMAFNMPVQGTAADLMKLAMVRLFPQLREVGARMLLQVHDELLLEAPKERAEEVAALAKEVMEGVWPLAVPLEVEVGIGEDWLAAKG

SEQ ID NO: 5639 - DNA, 2523 bp, synthetic construct
  misc_feature 1..2523: note = Variant of DNA polymerase I from Thermus sp. strain 2.9
  source 1..2523: mol_type = other DNA
atgcaccatcatcatcatcatggcggtagcggcgtgttaccggtgttcgagcctaaaggtcgcgtgcttctggttgatggccatcatctcgcgtatcgtaacttctttgccctgaaaggattaaccaccagcctgggcgagccggtacagggtgtctacggctttgcaaagtcgctcctgaaagctctgaaagaagacggtgatgtggtgattgttgtctttgatgcgaaagcgccaagttttcgccacgaagcgtacgaagcttacaaagccgggcgtgctccaacgccggaagactttcctcgccaattggcgcttatgaaggaattagtggatttgcttggcctcgaacgcttggaagttcccggtttcgaggcagacgacgtattagcgactctcgcaaagaaagccgaacgtgagggctatgaagtccagatcttgacagcagatcgcgatcttttccagcttttatctccgcgcatctcggtgttacacccggaagggcatcgtatcaccccggaatggctctgggagaaatatggtttgcgtcccgaacaatgggtggattttcgcgccttagcaggcgatccgagcgacaatattccgggagttaaaggtatcggcgagaagacggcgctcaagctccttaaagaatgggggtcgttggagaacttgcttaagaatttagatcaggtcaaaccagagtcagtgcgtgagaagattcttgctcacctcgaagacctcaaattaagccgcgaattgtcccgtgtacgcaccgatttgccgctcgaagttgatttcggtcgccgccgcgaacctgactgggagggtcttaaagcgtttttagagcgtcttgaatttggttcgctcttgcatgaattcggccttttagaaagcccgttactggccgaagaagcaccttggccaccgcccgagggcgcgtttttaggttaccgtttgagtcgcccggaaccgatgtgggccgaattactggctcttgcagcgtctgcccagggacgtgtgtatcgcgcggaagaccctcatggtgcgctccgcggcctcttcgaagtccgtggcctccttgccaaagacttagctgttgttgcattgcgcgaaggtcttgatttacctccgactgatgatccaatgcttcttgcgtacctcttggacccgtcaaacacgacgcccgaaggcgtagcccgtcgttacggcggcgagtggtgggaagatgcaggcaaacgcgcgttattggccgaacgtttgcacgaaaatttattaggacgtttgcaaggcgaggcgcgtctccgttggctttacgaagaagtggagaaaccattgagtcgcgtgctcgcgcatatggaagctaccggtgtcaaattagacgtggcgtatttggagaatctcagccttgaagttgctgcccacatgcgccgcttggaggaagaagtattccgtttagcaggccgttcctttcgccttaactctcgcgatcagttagaacgtgtgttgttcgatgaacttggtctccctcctatcggcaagacagagaagaccggtaaacgtagcacttcagcggcggttttagaagctcttcgcgaagtccatcccattgtggacaagatcttgcagtaccgcgaaatggcgaaattgaaaggcacctatattgaccgtcttccggcattagtccacccgaaaacgggacgcctccatacccgcttcaaccaaacagccacggcgaccggtcgtttgtcctcctctgatccaaaccttcagaatattccagtacgtaccccattgggccagaagatccgccgtgcgtttgtagctgagccgggttgggcgttagtggccctcgattatcgtcaaattgaattacgtgtccttgcccatctttctggcgatgagaacctcatccgcgtgtttcaggaaggcaaagacattcacactcaaacggcaagctggatgtttggattatcagctgaagcgatcgatcctttgatgcgtcgtgcagcgaagaccatcaatttcggtgttctctacggtatgagtgcctttcgtttgtcgcaggaattaggcattccctatgaagaagctcaggcgttcattcagaaatactttcaaagctatcccaaagttaaagcatggatcgagaagactctccgtgaaggccgcacacgtggttacgtagagaccttatttggacgtcgccgctatgttcccgatttaaacggtcgcgtgaaaggcaagcgtgaagccgccgaacgcatggcgttcaacatgcctgtacagggcacggcagctgacctcatgaaacttgcaatggtgcgcctttttccacaattgcgtgaagttggtgcccgcatgctgttgcaggtccacgatgaactcttgttagaagcgccaaaagagcgtgcggaagaggtggcagccctcgcgaaagaagttatggaaggcgtgtggcccttagcggtgcctcttgaagtcgaagttggtattggcgaggattggctggctgccaaagga

SEQ ID NO: 5640 - protein, 841 aa, synthetic construct
  REGION 1..841: note = Variant of DNA polymerase I from Thermus sp. strain 2.9
MHHHHHHGGSGVLPVFEPKGRVLLVDGHHLAYRNFFALKGLTTSLGEPVQGVYGFAKSLLKALKEDGDVVIVVFDAKAPSFRHEAYEAYKAGRAPTPEDFPRQLALMKELVDLLGLERLEVPGFEADDVLATLAKKAEREGYEVQILTADRDLFQLLSPRISVLHPEGHRITPEWLWEKYGLRPEQWVDFRALAGDPSDNIPGVKGIGEKTALKLLKEWGSLENLLKNLDQVKPESVREKILAHLEDLKLSRELSRVRTDLPLEVDFGRRREPDWEGLKAFLERLEFGSLLHEFGLLESPLLAEEAPWPPPEGAFLGYRLSRPEPMWAELLALAASAQGRVYRAEDPHGALRGLFEVRGLLAKDLAVVALREGLDLPPTDDPMLLAYLLDPSNTTPEGVARRYGGEWWEDAGKRALLAERLHENLLGRLQGEARLRWLYEEVEKPLSRVLAHMEATGVKLDVAYLENLSLEVAAHMRRLEEEVFRLAGRSFRLNSRDQLERVLFDELGLPPIGKTEKTGKRSTSAAVLEALREVHPIVDKILQYREMAKLKGTYIDRLPALVHPKTGRLHTRFNQTATATGRLSSSDPNLQNIPVRTPLGQKIRRAFVAEPGWALVALDYRQIELRVLAHLSGDENLIRVFQEGKDIHTQTASWMFGLSAEAIDPLMRRAAKTINFGVLYGMSAFRLSQELGIPYEEAQAFIQKYFQSYPKVKAWIEKTLREGRTRGYVETLFGRRRYVPDLNGRVKGKREAAERMAFNMPVQGTAADLMKLAMVRLFPQLREVGARMLLQVHDELLLEAPKERAEEVAALAKEVMEGVWPLAVPLEVEVGIGEDWLAAKG

SEQ ID NO: 5641 - DNA, 2523 bp, synthetic construct
  misc_feature 1..2523: note = Variant of DNA polymerase I from Thermus sp. strain 2.9
  source 1..2523: mol_type = other DNA
atgcaccatcatcatcatcatggcggtagcggcgtgttaccggtgttcgagcctaaaggtcgcgtgcttctggttgatggccatcatctcgcgtatcgtaacttctttgccctgaaaggattaaccaccagcctgggcgagccggtacagggtgtctacggctttgcaaagtcgctcctgaaagctctgaaagaagacggtgatgtggtgattgttgtctttgatgcgaaagcgccaagttttcgccacgaagcgtacgaagcttacaaagccgggcgtgctccaacgccggaagactttcctcgccaattggcgcttatgaaggaattagtggatttgcttggcctcgaacgcttggaagttcccggtttcgaggcagacgacgtattagcgactctcgcaaagaaagccgaacgtgagggctatgaagtccagatcttgacagcagatcgcgatcttttccagcttttatctccgcgcatctcggtgttacacccggaagggcatcgtatcaccccggaatggctctgggagaaatatggtttgcgtcccgaacaatgggtggattttcgcgccttagcaggcgatccgagcgacaatattccgggagttaaaggtatcggcgagaagacggcgctcaagctccttaaagaatgggggtcgttggagaacttgcttaagaatttagatcaggtcaaaccagagtcagtgcgtgagaagattcttgctcacctcgaagacctcaaattaagccgcgaattgtcccgtgtacgcaccgatttgccgctcgaagttgatttcggtcgccgccgcgaacctgactgggagggtcttaaagcgtttttagagcgtcttgaatttggttcgctcttgcatgaattcggccttttagaaagcccgttactggccgaagaagcaccttggccaccgcccgagggcgcgtttttaggttaccgtttgagtcgcccggaaccgatgtgggccgaattactggctcttgcagcgtctgcccagggacgtgtgtatcgcgcggaagaccctcatggtgcgctccgcggcctcttcgaagtccgtaccctccttgccaaagacttagctgttgttgcattgcgcgaaggtcttgatttacctccgactgatgatccaatgcttcttgcgtacctcttggacccgtcaaacacgacgcccgaaggcgtagcccgtcgttacggcggcgagtggaccgaagatgcaggcaaacgcgcgttattggccgaacgtttgcacgaaaatttattaggacgtttgcaaggcgaggagcgtctcctgtggctttacgaagaagtggagaaaccattgagtcgcgtgctcgcgcatatggaagctaccggtgtcaaattagacgtggcgtatttggagaatctcagccttgaagttgctgcccacatgcgccgcttggaggaagaagtattccgtttagcaggccgttcctttcgccttaactctcgcgatcagttagaacgtgtgttgttcgatgaacttggtctccctcctatcggcaagacagagaagaccggtaaacgtagcacttcagcggcggttttagaagctcttcgcgaagtccatcccattgtggacaagatcttgcagtaccgcgaaatggcgaaattgaaaggcacctatattgaccgtcttccggcattagtccacccgaaaacgggacgcctccatacccgcttcaaccaaacagccacggcgaccggtcgtttgtcctcctctgatccaaaccttcagaatattccagtacgtaccccattgggccagaagatccgccgtgcgtttgtagctgaggagggttggcgtttagtggccctcgattatcgtcaaattgaattacgtgtccttgcccatctttctggcgatgagaacctcatccgcgtgtttcaggaaggcaaagacattcacactcaaacggcaagctggatgtttggattatcagctgaagcgatcgatcctttgatgcgtcgtgcagcgaagaccatcaatttcggtgttctctacggtatgagtgcctttcgtttgtcgcaggaattaggcattcccctggaagaagctcaggctttcattcagaaatactttcaaggctatcccaaagttaaagcatggatcgagaagactctccgtgaaggccgcacacgtggttacgtagagaccttatttggacgtcgccgctatgttcccgatttaaacggtcgcgtgaaaggcaagcgtgaagccgccgaacgcatggcgttcaacatgcctgtacagggcacggcagctgacctcatgaaacttgcaatggtgcgcctttttccacaattgcgtgaagttggtgcccgcatgctgttgcaggtccacgatgaactcttgttagaagcgccaaaagagcgtgcggaagaggtggcagccctcgcgaaagaagttatggaaggcgtgtggcccttagcggtgcctcttgaagtcgaagttggtattggcgaggattggctggctgccaaagga

SEQ ID NO: 5642 - protein, 841 aa, synthetic construct
  REGION 1..841: note = Variant of DNA polymerase I from Thermus sp. strain 2.9
MHHHHHHGGSGVLPVFEPKGRVLLVDGHHLAYRNFFALKGLTTSLGEPVQGVYGFAKSLLKALKEDGDVVIVVFDAKAPSFRHEAYEAYKAGRAPTPEDFPRQLALMKELVDLLGLERLEVPGFEADDVLATLAKKAEREGYEVQILTADRDLFQLLSPRISVLHPEGHRITPEWLWEKYGLRPEQWVDFRALAGDPSDNIPGVKGIGEKTALKLLKEWGSLENLLKNLDQVKPESVREKILAHLEDLKLSRELSRVRTDLPLEVDFGRRREPDWEGLKAFLERLEFGSLLHEFGLLESPLLAEEAPWPPPEGAFLGYRLSRPEPMWAELLALAASAQGRVYRAEDPHGALRGLFEVRTLLAKDLAVVALREGLDLPPTDDPMLLAYLLDPSNTTPEGVARRYGGEWTEDAGKRALLAERLHENLLGRLQGEERLLWLYEEVEKPLSRVLAHMEATGVKLDVAYLENLSLEVAAHMRRLEEEVFRLAGRSFRLNSRDQLERVLFDELGLPPIGKTEKTGKRSTSAAVLEALREVHPIVDKILQYREMAKLKGTYIDRLPALVHPKTGRLHTRFNQTATATGRLSSSDPNLQNIPVRTPLGQKIRRAFVAEEGWRLVALDYRQIELRVLAHLSGDENLIRVFQEGKDIHTQTASWMFGLSAEAIDPLMRRAAKTINFGVLYGMSAFRLSQELGIPLEEAQAFIQKYFQGYPKVKAWIEKTLREGRTRGYVETLFGRRRYVPDLNGRVKGKREAAERMAFNMPVQGTAADLMKLAMVRLFPQLREVGARMLLQVHDELLLEAPKERAEEVAALAKEVMEGVWPLAVPLEVEVGIGEDWLAAKG

SEQ ID NO: 5643 - DNA, 2523 bp, synthetic construct
  misc_feature 1..2523: note = Variant of DNA polymerase I from Thermus sp. strain 2.9
  source 1..2523: mol_type = other DNA
atgcaccatcatcatcatcatggcggtagcggcgtgttaccggtgttcgagcctaaaggtcgcgtgcttctggttgatggccatcatctcgcgtatcgtaacttctttgccctgaaaggattaaccaccagcctgggcgagccggtacagggtgtctacggctttgcaaagtcgctcctgaaagctctgaaagaagacggtgatgtggtgattgttgtctttgatgcgaaagcgccaagttttcgccacgaagcgtacgaagcttacaaagccgggcgtgctccaacgccggaagactttcctcgccaattggcgcttatgaaggaattagtggatttgcttggcctcgaacgcttggaagttcccggtttcgaggcagacgacgtattagcgactctcgcaaagaaagccgaacgtgagggctatgaagtccagatcttgacagcagatcgcgatcttttccagcttttatctccgcgcatctcggtgttacacccggaagggcatcgtatcaccccggaatggctctgggagaaatatggtttgcgtcccgaacaatgggtggattttcgcgccttagcaggcgatccgagcgacaatattccgggagttaaaggtatcggcgagaagacggcgctcaagctccttaaagaatgggggtcgttggagaacttgcttaagaatttagatcaggtcaaaccagagtcagtgcgtgagaagattcttgctcacctcgaagacctcaaattaagccgcgaattgtcccgtgtacgcaccgatttgccgctcgaagttgatttcggtcgccgccgcgaacctgactgggagggtcttaaagcgtttttagagcgtcttgaatttggttcgctcttgcatgaattcggccttttagaaagcccgttactggccgaagaagcaccttggccaccgcccgagggcgcgtttttaggttaccgtttgagtcgcccggaaccgatgtgggccgaattactggctcttgcagcgtctgcccagggacgtgtgtatcgcgcggaagaccctcatggtgcgctccgcggcctcttcgaagtccgtggactccttgccaaagacttagctgttgttgcattgcgcgaaggtcttgatttacctccgactgatgatccaatgcttcttgcgtacctcttggacccgtcaaacacgacgcccgaaggccaggcccgtcgttacggcggcgagtggaccgaagatgcagcgaaacgcgcgttattggccgaacgtttgcacgaaaatttattaggacgtttgcaaggcgaggaacgtctcctctggctttacgaagaagtggagaaaccattgagtcgcgtgctcgcgcatatggaagctaccggtgtcaaattagacgtggcgtatttggagaatctcagccttgaagttgctgcccacatgcgccgcttggaggaagaagtattccgtttagcaggccgttcctttcgccttaactctcgcgatcagttagaacgtgtgttgttcgatgaacttggtctccctcctatcggcaagacagagaagaccggtaaacgtagcacttcagcggcggttttagaagctcttcgcgaagtccatcccattgtggacaagatcttgcagtaccgcgaaatggcgaaattgaaaggcacctatattgaccgtcttccggcattagtccacccgaaaacgggacgcctccatacccgcttcaaccaaacagccacggcgaccggtcgtttgtcctcctctgatccaaaccttcagaatattccagtacgtaccccattgggccagaagatccgccgtgcgtttgtagctgaggagggttggcgtttagtggccctcgattatcgtcaaattgaattacgtgtccttgcccatctttctggcgatgagaacctcatccgcgtgtttcaggaaggcaaagacattcacactcaaacggcaagctggatgtttggattatcagctgaagcgatcgatcctttgatgcgtcgtgcagcgaagaccatcaatttcggtgttctctacggtatgagtgcctttcgtttgtcgcaggaattaggcattccctatgaagaagctcaggcgttcattcagaaatactttcaaagctatcccaaagttaaagcatggatcgagaagactctccgtgaaggccgcacacgtggttacgtagagaccttatttggacgtcgccgctatgttcccgatttaaacgctcgcgtgaaaggcaagcgtgaagccgccgaacgcatggcgttcaacatgcctgtacagggcacggcagctgacctcatgaaacttgcaatggtgcgcctttttccacaattgcgtgaagttggtgcccgcatgctcttgcaggtccacgatgaactcttgttagaagcgccaaaagagcgtgcggaagaggtggcagccctcgcgaaagaagttatggaaggcgtgtggcccttagcggtgcctcttgaagtcgaagttggtattggcgaggattggctggctgccaaagga

SEQ ID NO: 5644 - protein, 841 aa, synthetic construct
  REGION 1..841: note = Variant of DNA polymerase I from Thermus sp. strain 2.9
MHHHHHHGGSGVLPVFEPKGRVLLVDGHHLAYRNFFALKGLTTSLGEPVQGVYGFAKSLLKALKEDGDVVIVVFDAKAPSFRHEAYEAYKAGRAPTPEDFPRQLALMKELVDLLGLERLEVPGFEADDVLATLAKKAEREGYEVQILTADRDLFQLLSPRISVLHPEGHRITPEWLWEKYGLRPEQWVDFRALAGDPSDNIPGVKGIGEKTALKLLKEWGSLENLLKNLDQVKPESVREKILAHLEDLKLSRELSRVRTDLPLEVDFGRRREPDWEGLKAFLERLEFGSLLHEFGLLESPLLAEEAPWPPPEGAFLGYRLSRPEPMWAELLALAASAQGRVYRAEDPHGALRGLFEVRGLLAKDLAVVALREGLDLPPTDDPMLLAYLLDPSNTTPEGQARRYGGEWTEDAAKRALLAERLHENLLGRLQGEERLLWLYEEVEKPLSRVLAHMEATGVKLDVAYLENLSLEVAAHMRRLEEEVFRLAGRSFRLNSRDQLERVLFDELGLPPIGKTEKTGKRSTSAAVLEALREVHPIVDKILQYREMAKLKGTYIDRLPALVHPKTGRLHTRFNQTATATGRLSSSDPNLQNIPVRTPLGQKIRRAFVAEEGWRLVALDYRQIELRVLAHLSGDENLIRVFQEGKDIHTQTASWMFGLSAEAIDPLMRRAAKTINFGVLYGMSAFRLSQELGIPYEEAQAFIQKYFQSYPKVKAWIEKTLREGRTRGYVETLFGRRRYVPDLNARVKGKREAAERMAFNMPVQGTAADLMKLAMVRLFPQLREVGARMLLQVHDELLLEAPKERAEEVAALAKEVMEGVWPLAVPLEVEVGIGEDWLAAKG

SEQ ID NO: 5645 - DNA, 2523 bp, synthetic construct
  misc_feature 1..2523: note = Variant of DNA polymerase I from Thermus sp. strain 2.9
  source 1..2523: mol_type = other DNA
atgcaccatcatcatcatcatggcggtagcggcgtgttaccggtgttcgagcctaaaggtcgcgtgcttctggttgatggccatcatctcgcgtatcgtaacttctttgccctgaaaggattaaccaccagcctgggcgagccggtacagggtgtctacggctttgcaaagtcgctcctgaaagctctgaaagaagacggtgatgtggtgattgttgtctttgatgcgaaagcgccaagttttcgccacgaagcgtacgaagcttacaaagccgggcgtgctccaacgccggaagactttcctcgccaattggcgcttatgaaggaattagtggatttgcttggcctcgaacgcttggaagttcccggtttcgaggcagacgacgtattagcgactctcgcaaagaaagccgaacgtgagggctatgaagtccagatcttgacagcagatcgcgatcttttccagcttttatctccgcgcatctcggtgttacacccggaagggcatcgtatcaccccggaatggctctgggagaaatatggtttgcgtcccgaacaatgggtggattttcgcgccttagcaggcgatccgagcgacaatattccgggagttaaaggtatcggcgagaagacggcgctcaagctccttaaagaatgggggtcgttggagaacttgcttaagaatttagatcaggtcaaaccagagtcagtgcgtgagaagattcttgctcacctcgaagacctcaaattaagccgcgaattgtcccgtgtacgcaccgatttgccgctcgaagttgatttcggtcgccgccgcgaacctgactgggagggtcttaaagcgtttttagagcgtcttgaatttggttcgctcttgcatgaattcggccttttagaaagcccgttactggccgaagaagcaccttggccaccgcccgagggcgcgtttttaggttaccgtttgagtcgcccggaaccgatgtgggccgaattactggctcttgcagcgtctgcccagggacgtgtgtatcgcgcggaagaccctcatggtgcgctccgcggcctcttcgaagtccgtggactccttgccaaagacttagctgttgttgcattgcgcgaaggtcttgatttacctccgactgatgatccaatgcttcttgcgtacctcttggacccgtcaaacacgacgcccgaaggcgtagcccgtcgttacggcggcgagtggaccgaagatgcagcgaaacgcgcgttattggccgaacgtttgcacgaaaatttattaggacgtttgcaaggcgaggaacgtctcctctggctttacgaagaagtggagaaaccattgagtcgcgtgctcgcgcatatggaagctaccggtgtcaaattagacgtggcgtatttggagaatctcagccttgaagttgctgcccacatgcgccgcttggaggaagaagtattccgtttagcaggccgttcctttcgccttaactctcgcgatcagttagaacgtgtgttgttcgatgaacttggtctccctcctatcggcaagacagagaagaccggtaaacgtagcacttcagcggcggttttagaagctctttatgaagtccatcccattgtggacaagatcttgcagtaccgcgaaatggcgaaattgaaaggcacctatattgaccgtcttccggcattagtccacccgaaaacgggacgcctccatacccgcttcaaccaaacagccacggcgaccggtcgtttgtcctcctctgatccaaaccttcagaatattccagtacgtaccccattgggccagaagatccgccgtgcgtttgtagctgaggagggttggcgtttagtggccctcgattatcgtcaaattgaattacgtgtccttgcccatctttctggcgatgagaacctcatccgcgtgtttcaggaaggcaaagacattcacactcaaacggcaagctggatgtttggattatcagctgaagcgatcgatcctttgatgcgtcgtgcagcgaagaccatcaatttcggtgttctctacggtatgagtgcctttcgtttgtcgcaggaattaggcattccctatgaagaagctcaggcgttcattcagaaatactttcaaagctatcccaaagttaaagcatggatcgagaagactctccgtgaaggccgcacacgtggttacgtagagaccttatttggacgtcgccgctatgttcccgatttaaacgctcgcgtgaaaggcaagcgtgaagccgccgaacgcatggcgttcaacatgcctgtacagggcacggcagctgacctcatgaaacttgcaatggtgcgcctttttccacaattgcgtgaagttggtgcccgcatgctcttgcaggtccacgatgaactcttgttagaagcgccaaaagagcgtgcggaagaggtggcagccctcgcgaaagaagttatggaaggcgtgtggcccttagcggtgcctcttgaagtcgaagttggtattggcgaggattggctggctgccaaagga

SEQ ID NO: 5646 - protein, 841 aa, synthetic construct
  REGION 1..841: note = Variant of DNA polymerase I from Thermus sp. strain 2.9
MHHHHHHGGSGVLPVFEPKGRVLLVDGHHLAYRNFFALKGLTTSLGEPVQGVYGFAKSLLKALKEDGDVVIVVFDAKAPSFRHEAYEAYKAGRAPTPEDFPRQLALMKELVDLLGLERLEVPGFEADDVLATLAKKAEREGYEVQILTADRDLFQLLSPRISVLHPEGHRITPEWLWEKYGLRPEQWVDFRALAGDPSDNIPGVKGIGEKTALKLLKEWGSLENLLKNLDQVKPESVREKILAHLEDLKLSRELSRVRTDLPLEVDFGRRREPDWEGLKAFLERLEFGSLLHEFGLLESPLLAEEAPWPPPEGAFLGYRLSRPEPMWAELLALAASAQGRVYRAEDPHGALRGLFEVRGLLAKDLAVVALREGLDLPPTDDPMLLAYLLDPSNTTPEGVARRYGGEWTEDAAKRALLAERLHENLLGRLQGEERLLWLYEEVEKPLSRVLAHMEATGVKLDVAYLENLSLEVAAHMRRLEEEVFRLAGRSFRLNSRDQLERVLFDELGLPPIGKTEKTGKRSTSAAVLEALYEVHPIVDKILQYREMAKLKGTYIDRLPALVHPKTGRLHTRFNQTATATGRLSSSDPNLQNIPVRTPLGQKIRRAFVAEEGWRLVALDYRQIELRVLAHLSGDENLIRVFQEGKDIHTQTASWMFGLSAEAIDPLMRRAAKTINFGVLYGMSAFRLSQELGIPYEEAQAFIQKYFQSYPKVKAWIEKTLREGRTRGYVETLFGRRRYVPDLNARVKGKREAAERMAFNMPVQGTAADLMKLAMVRLFPQLREVGARMLLQVHDELLLEAPKERAEEVAALAKEVMEGVWPLAVPLEVEVGIGEDWLAAKG

SEQ ID NO: 5647 - DNA, 2523 bp, synthetic construct
  misc_feature 1..2523: note = Variant of DNA polymerase I from Thermus sp. strain 2.9
  source 1..2523: mol_type = other DNA
atgcaccatcatcatcatcatggcggtagcggcgtgttaccggtgttcgagcctaaaggtcgcgtgcttctggttgatggccatcatctcgcgtatcgtaacttctttgccctgaaaggattaaccaccagccgcggcgagccggtacagggtgtctacggctttgcaaagtcgctcctgaaagctctgaaagaagacggtgatgtggtgattgttgtctttgatgcgaaagcgccaagttttcgccacgaagcgtacgaagcttacaaagccgggcgtgctccaacgccggaagactttcctcgccaattggcgcttatgaaggaattagtggatttgcttggcctcgaacgcttggaagttcccggtttcgaggcagacgacgtattagcgactctcgcaaagaaagccgaacgtgagggctatgaagtccagatcttgacagcagatcgcgatcttttccagcttttatctccgcgcatctcggtgttacacccggaagggcatcgtatcaccccggaatggctctgggagaaatatggtttgcgtcccgaacaatgggtggattttcgcgccttagcaggcgatccgagcgacaatattccgggagttaaaggtatcggcgagaagacggcgctcaagctccttaaagaatgggggtcgttggagaacttgcttaagaatttagatcaggtcaaaccagagtcagtgcgtgagaagattcttgctcacctcgaagacctcaaattaagccgcgaattgtcccgtgtacgcaccgatttgccgctcgaagttgatttcggccgccgccgcgaacctgactgggagggtcttaaagcgtttttagagcgtcttgaatttggttcgctcttgcatgaattcggccttttagaaagcccgttactggccgaagaagcaccttggccaccgcccgagggcgcgtttttaggttaccgtttgagtcgcccggaaccgatgtgggccgaattactggctcttgcagcgtctgcccagggacgtgtgtatcgcgcggaagaccctcatggtgcgctccgcggcctcttcgaagtccgtggactccttgccaaagacttagctgttgttgcattgcgcgaaggtcttgatttacctccgactgatgatccaatgcttcttgcgtacctcttggacccgtcaaacacgacgcccgaaggcgtagcccgtcgttacggcggcgagtggaccgaagatgcagcgaaacgcgcgttattggccgaacgtttgcacgcaaatttattaggacgtttgcaaggcgaggaacgtctcctctggctttacgaagaagtggagaaaccattgagtcgcgtgctcgcgcatatggaagctaccggtgtcaaattagacgtggcgtatttggaggcccttagccttgaagttgctgccgaaatgcgccgcttggaggaagaagtattccgtttagcaggccgctcctttcgccttaactctcgcgatcagttagaacgtgtgttgttcgatgaacttggtctccctcctatcggcaagacagagaagaccggtaaacgtagcacttcagcggcggttttagaagctcttcgcgaagtccatcccattgtggacaagatcttgcagtaccgcgaactggcgaaattgaaaggcacctatattgaccgtcttccggcattagtccacccgaaaacgggacgcctccatacccgcttcaaccaaacagccacggcgaccggtcgtttgtccagttctgatccaaaccttcagaatattccagtacgtaccccattgggccagaagatccgccgtgcgtttgtagctgaggagggttggcgtttagtggccctcgattatagtcaaattgaattacgtgtccttgcccatctttctggcgatgagaacctcatccgcgtgtttcaggaaggcaaagacattcacactcaaacggcaagctggatgtttggattatcagctgaagcgatcgatcctttgatgcgtcgtgcagcgaagaccatcaatttcggtgttctctacggtatgagtgcctttcgtttgtcgcaggaattaggcattccctatgaagaagctcaggcgttcattcagaaatactttcaaagctatcccaaagttaaagcatggatcgagaagactctcgaggaaggccgcacacgtggttacgtagagaccttatttggacgtcgccgctatgttcccgatttaaacgctcgcgtgaaaggcgtacgtgaagccgccgaacgcatggcgttcaacatgcctgtacagggcacggcagctgacctcatgaaacttgcaatggtgcgcctttttccacaattgcgtgaagttggtgcccgcatgctcttgcaggtccacgatgaactcttgttagaagcgccaaaagagcgtgcggaagaggtggcagccctcgcgaaagaagttatggaaggcgtgtggcccttagcggtgcctcttgaagtcgaagttggtattggcgaggattggctggctgccaaagga

SEQ ID NO: 5648 - protein, 841 aa, synthetic construct
  REGION 1..841: note = Variant of DNA polymerase I from Thermus sp. strain 2.9
MHHHHHHGGSGVLPVFEPKGRVLLVDGHHLAYRNFFALKGLTTSRGEPVQGVYGFAKSLLKALKEDGDVVIVVFDAKAPSFRHEAYEAYKAGRAPTPEDFPRQLALMKELVDLLGLERLEVPGFEADDVLATLAKKAEREGYEVQILTADRDLFQLLSPRISVLHPEGHRITPEWLWEKYGLRPEQWVDFRALAGDPSDNIPGVKGIGEKTALKLLKEWGSLENLLKNLDQVKPESVREKILAHLEDLKLSRELSRVRTDLPLEVDFGRRREPDWEGLKAFLERLEFGSLLHEFGLLESPLLAEEAPWPPPEGAFLGYRLSRPEPMWAELLALAASAQGRVYRAEDPHGALRGLFEVRGLLAKDLAVVALREGLDLPPTDDPMLLAYLLDPSNTTPEGVARRYGGEWTEDAAKRALLAERLHANLLGRLQGEERLLWLYEEVEKPLSRVLAHMEATGVKLDVAYLEALSLEVAAEMRRLEEEVFRLAGRSFRLNSRDQLERVLFDELGLPPIGKTEKTGKRSTSAAVLEALREVHPIVDKILQYRELAKLKGTYIDRLPALVHPKTGRLHTRFNQTATATGRLSSSDPNLQNIPVRTPLGQKIRRAFVAEEGWRLVALDYSQIELRVLAHLSGDENLIRVFQEGKDIHTQTASWMFGLSAEAIDPLMRRAAKTINFGVLYGMSAFRLSQELGIPYEEAQAFIQKYFQSYPKVKAWIEKTLEEGRTRGYVETLFGRRRYVPDLNARVKGVREAAERMAFNMPVQGTAADLMKLAMVRLFPQLREVGARMLLQVHDELLLEAPKERAEEVAALAKEVMEGVWPLAVPLEVEVGIGEDWLAAKG

SEQ ID NO: 5649 - DNA, 2523 bp, synthetic construct
  misc_feature 1..2523: note = Variant of DNA polymerase I from Thermus sp. strain 2.9
  source 1..2523: mol_type = other DNA
atgcaccatcatcatcatcatggcggtagcggcgtgttaccggtgttcgagcctaaaggtcgcgtgcttctggttgatggccatcatctcgcgtatcgtaacttctttgccctgaaaggattaaccaccagccgcggcgagccggtacagggtgtctacggctttgcaaagtcgctcctgaaagctctgaaagaagacggtgatgtggtgattgttgtctttgatgcgaaagcgccaagttttcgccacgaagcgtacgaagcttacaaagccgggcgtgctccaacgccggaagactttcctcgccaattggcgcttatgaaggaattagtggatttgcttggcctcgaacgcttggaagttcccggtttcgaggcagacgacgtattagcgactctcgcaaagaaagccgaacgtgagggctatgaagtccagatcttgacagcagatcgcgatcttttccagcttttatctccgcgcatctcggtgttacacccggaagggcatcgtatcaccccggaatggctctgggagaaatatggtttgcgtcccgaacaatgggtggattttcgcgccttagcaggcgatccgagcgacaatattccgggagttaaaggtatcggcgagaagacggcgctcaagctccttaaagaatgggggtcgttggagaacttgcttaagaatttagatcaggtcaaaccagagtcagtgcgtgagaagattcttgctcacctcgaagacctcaaattaagccgcgaattgtcccgtgtacgcaccgatttgccgctcgaagttgatttccgccgccgccgcgaacctgactgggagggtcttaaagcgtttttagagcgtcttgaatttggttcgctcttgcatgaattcggccttttagaaagcccgttactggccgaagaagcaccttggccaccgcccgagggcgcgtttttaggttaccgtttgagtcgcccggaaccgatgtgggccgaattactggctcttgcagcgtctgcccagggacgtgtgtatcgcgcggaagaccctcatggtgcgctccgcggcctcttcgaagtccgtggactccttgccaaagacttagctgttgttgcattgcgcgaaggtcttgatttacctccgactgatgatccaatgcttcttgcgtacctcttggacccgtcaaacacgacgcccgaaggcgtagcccgtcgttacggcggcgagtggaccgaagatgcagcgaaacgcgcgttattggccgaacgtttgcacgcaaatttattaggacgtttgcaaggcgaggaacgtctcctctggctttacgaagaagtggagaaaccattgagtcgcgtgctcgcgcatatggaagctaccggtgtcaaattagacgtggcgtatttggagaatcttcaccttgaagttgctgcccatatgcgccgcttggaggaagaagtattccgtttagcaggccgctcctttcgccttaactctcgcgatcagttagaacgtgtgttgttcgatgaacttggtctccctcctatcggcaagacagagaagaccggtaaacgtagcacttcagcggcggttttagaagctcttcgcgaagtccatcccattgtggacaagatcttgcagtaccgcgaaatggcgaaattgaaaggcacctatattgaccgtcttccggcattagtccacccgaaaacgggacgcctccatacccgcttcaaccaaacagccacggcgaccggtcgtttgtcctcctctgatccaaaccttcagaatattccagtacgtaccccattgggccagaagatccgccgtgcgtttgtagctgaggagggttggcgtttagtggccctcgattatcgtcaaattgaattacgtgtccttgcccatctttctggcgatgagaacctcatccgcgtgtttcaggaaggcaaagacattcacactcaaacggcaagctggatgtttggattatcagctgaagcgatcgatcctttgatgcgtcgtgcagcgaagaccatcaatttcggtgttctctacggtatgagtgcctttcgtttgtcgcaggaattaggcattccctatgaagaagctcaggcgttcattcagaaatactttcaaagctatcccaaagttaaagcatggatcgagaagactctcgaggaaggccgcacacgtggttacgtagagaccttatttggacgtcgccgctatgttcccgatttaaacgctcgcgtgaaaggcaaacgtgaagccgccgaacgcatggcgttcaacatgcctgtacagggcacggcagctgacctcatgaaacttgcaatggtgcgcctttttccacaattgcgtgaagttggtgcccgcatgctcttgcaggtccacgatgaactcttgttagaagcgccaaaagagcgtgcggaagaggtggcagccctcgcgaaagaagttatggaaggcgtgtggcccttagcggtgcctcttgaagtcgaagttggtattggcgaggattggctggctgccaaagga

SEQ ID NO: 5650 - protein, 841 aa, synthetic construct
  REGION 1..841: note = Variant of DNA polymerase I from Thermus sp. strain 2.9
MHHHHHHGGSGVLPVFEPKGRVLLVDGHHLAYRNFFALKGLTTSRGEPVQGVYGFAKSLLKALKEDGDVVIVVFDAKAPSFRHEAYEAYKAGRAPTPEDFPRQLALMKELVDLLGLERLEVPGFEADDVLATLAKKAEREGYEVQILTADRDLFQLLSPRISVLHPEGHRITPEWLWEKYGLRPEQWVDFRALAGDPSDNIPGVKGIGEKTALKLLKEWGSLENLLKNLDQVKPESVREKILAHLEDLKLSRELSRVRTDLPLEVDFRRRREPDWEGLKAFLERLEFGSLLHEFGLLESPLLAEEAPWPPPEGAFLGYRLSRPEPMWAELLALAASAQGRVYRAEDPHGALRGLFEVRGLLAKDLAVVALREGLDLPPTDDPMLLAYLLDPSNTTPEGVARRYGGEWTEDAAKRALLAERLHANLLGRLQGEERLLWLYEEVEKPLSRVLAHMEATGVKLDVAYLENLHLEVAAHMRRLEEEVFRLAGRSFRLNSRDQLERVLFDELGLPPIGKTEKTGKRSTSAAVLEALREVHPIVDKILQYREMAKLKGTYIDRLPALVHPKTGRLHTRFNQTATATGRLSSSDPNLQNIPVRTPLGQKIRRAFVAEEGWRLVALDYRQIELRVLAHLSGDENLIRVFQEGKDIHTQTASWMFGLSAEAIDPLMRRAAKTINFGVLYGMSAFRLSQELGIPYEEAQAFIQKYFQSYPKVKAWIEKTLEEGRTRGYVETLFGRRRYVPDLNARVKGKREAAERMAFNMPVQGTAADLMKLAMVRLFPQLREVGARMLLQVHDELLLEAPKERAEEVAALAKEVMEGVWPLAVPLEVEVGIGEDWLAAKG

SEQ ID NO: 5651 - DNA, 2523 bp, synthetic construct
  misc_feature 1..2523: note = Variant of DNA polymerase I from Thermus sp. strain 2.9
  source 1..2523: mol_type = other DNA
atgcaccatcatcatcatcatggcggtagcggcgtgttaccggtgttcgagcctaaaggtcgcgtgcttctggttgatggccatcatctcgcgtatcgtaacttctttgccctgaaaggattaaccaccagccgcggcgagccggtacagggtgtctacggctttgcaaagtcgctcctgaaagctctgaaagaagacggtgatgtggtgattgttgtctttgatgcgaaagcgccaagttttcgccacgaagcgtacgaagcttacaaagccgggcgtgctccaacgccggaagactttcctcgccaattggcgcttatgaaggaattagtggatttgcttggcctcgaacgcttggaagttcccggtttcgaggcagacgacgtattagcgactctcgcaaagaaagccgaacgtgagggctatgaagtccagatcttgacagcagatcgcgatcttttccagcttttatctccgcgcatctcggtgttacacccggaagggcatcgtatcaccccggaatggctctgggagaaatatggtttgcgtcccgaacaatgggtggattttcgcgccttagcaggcgatccgagcgacaatattccgggagttaaaggtatcggcgagaagacggcgctcaagctccttaaagaatgggggtcgttggagaacttgcttaagaatttagatcaggtcaaaccagagtcagtgcgtgagaagattcttgctcacctcgaagacctcaaattaagccgcgaattgtcccgtgtacgcaccgatttgccgctcgaagttgatttccgccgccgccgcgaacctgactgggagggtcttaaagcgtttttagagcgtcttgaatttggttcgctcttgcatgaattcggccttttagaaagcccgttactggccgaagaagcaccttggccaccgcccgagggcgcgtttttaggttaccgtttgagtcgcccggaaccgatgtgggccgaattactggctcttgcagcgtctgcccagggacgtgtgtatcgcgcggaagaccctcatggtgcgctccgcggcctcttcgaagtccgtggactccttgccaaagacttagctgttgttgcattgcgcgaaggtcttgatttacctccgactgatgatccaatgcttcttgcgtacctcttggacccgtcaaacacgacgcccgaaggcgtagcccgtcgttacggcggcgagtggaccgaagatgcagcgaaacgcgcgttattggccgaacgtttgcacgaaaatttattaggacgtttgcaaggcgaggaacgtctcctctggctttacgaagaagtggagaaaccattgagtcgcgtgctcgcgcatatggaagctaccggtgtcaaattagacgtggcgtatttggagaatctcagccttgaagttgctgccgaaatgcgccgcttggaggaagaagtattccgtttagcaggccgttcctttcgccttaactctcgcgatcagttagaacgtgtgttgttcgatgaacttggtctccctcctatcggcaagacagagaagaccggtaaacgtagcacttcagcggcggttttagaagctcttcgcgaagtccatcccattgtggacaagatcttgcagtaccgcgaaatggcgaaattgaaaggcacctatattgaccgtcttccggcattagtccacccgaaaacgggacgcctccatacccgcttcaaccaaacagccacggcgaccggtcgtttgtccagttctgatccaaaccttcagaatattccagtacgtaccccattgggccagaagatccgccgtgcgtttgtagctgaggagggttggcgtttagtggccctcgattatagtcaaattgaattacgtgtccttgcccatctttctggcgatgagaacctcatccgcgtgtttcaggaaggcaaagacattcacactcaaacggcaagctggatgtttggattatcagctgaagcgatcgatcctttgatgcgtcgtgcagcgaagaccatcaatttcggtgttctctacggtatgagtgcctttcgtttgtcgcaggaattaggcattccctatgaagaagctcaggcgttcattcagaaatactttcaaagctatcccaaagttaaagcatggatcgagaagactctccgcgaaggccgcacacgtggttacgtagagaccttatttggacgtcgccgctatgttcccgatttaaacgctcgcgtgaaaggcaaacgtgaagccgccgaacgcatggcgttcaacatgcctgtacagggcacggcagctgacctcatgaaacttgcaatggtgcgcctttttccacaattgcgtgaagttggtgcccgcatgctcttgcaggtccacgatgaactcttgttagaagcgccaaaagagcgtgcggaagaggtggcagccctcgcgaaagaagttatggaaggcgtgtggcccttagcggtgcctcttgaagtcgaagttggtattggcgaggattggctggctgccaaagga

SEQ ID NO: 5652 - protein, 841 aa, synthetic construct
  REGION 1..841: note = Variant of DNA polymerase I from Thermus sp. strain 2.9
MHHHHHHGGSGVLPVFEPKGRVLLVDGHHLAYRNFFALKGLTTSRGEPVQGVYGFAKSLLKALKEDGDVVIVVFDAKAPSFRHEAYEAYKAGRAPTPEDFPRQLALMKELVDLLGLERLEVPGFEADDVLATLAKKAEREGYEVQILTADRDLFQLLSPRISVLHPEGHRITPEWLWEKYGLRPEQWVDFRALAGDPSDNIPGVKGIGEKTALKLLKEWGSLENLLKNLDQVKPESVREKILAHLEDLKLSRELSRVRTDLPLEVDFRRRREPDWEGLKAFLERLEFGSLLHEFGLLESPLLAEEAPWPPPEGAFLGYRLSRPEPMWAELLALAASAQGRVYRAEDPHGALRGLFEVRGLLAKDLAVVALREGLDLPPTDDPMLLAYLLDPSNTTPEGVARRYGGEWTEDAAKRALLAERLHENLLGRLQGEERLLWLYEEVEKPLSRVLAHMEATGVKLDVAYLENLSLEVAAEMRRLEEEVFRLAGRSFRLNSRDQLERVLFDELGLPPIGKTEKTGKRSTSAAVLEALREVHPIVDKILQYREMAKLKGTYIDRLPALVHPKTGRLHTRFNQTATATGRLSSSDPNLQNIPVRTPLGQKIRRAFVAEEGWRLVALDYSQIELRVLAHLSGDENLIRVFQEGKDIHTQTASWMFGLSAEAIDPLMRRAAKTINFGVLYGMSAFRLSQELGIPYEEAQAFIQKYFQSYPKVKAWIEKTLREGRTRGYVETLFGRRRYVPDLNARVKGKREAAERMAFNMPVQGTAADLMKLAMVRLFPQLREVGARMLLQVHDELLLEAPKERAEEVAALAKEVMEGVWPLAVPLEVEVGIGEDWLAAKG

SEQ ID NO: 5653 - DNA, 2523 bp, synthetic construct
  misc_feature 1..2523: note = Variant of DNA polymerase I from Thermus sp. strain 2.9
  source 1..2523: mol_type = other DNA
atgcaccatcatcatcatcatggcggtagcggcgtgttaccggtgttcgagcctaaaggtcgcgtgcttctggttgatggccatcatctcgcgtatcgtaacttctttgccctgaaaggattaaccaccagcctgggcgagccggtacagggtgtctacggctttgcaaagtcgctcctgaaagctctgaaagaagacggtgatgtggtgattgttgtctttgatgcgaaagcgccaagttttcgccacgaagcgtacgaagcttacaaagccgggcgtgctccaacgccggaagactttcctcgccaattggcgcttatgaaggaattagtggatttgcttggcctcgaacgcttggaagttcccggtttcgaggcagacgacgtattagcgactctcgcaaagaaagccgaacgtgagggctatgaagtccagatcttgacagcagatcgcgatcttttccagcttttatctccgcgcatctcggtgttacacccggaagggcatcgtatcaccccggaatggctctgggagaaatatggtttgcgtcccgaacaatgggtggattttcgcgccttagcaggcgatccgagcgacaatattccgggagttaaaggtatcggcgagaagacggcgctcaagctccttaaagaatgggggtcgttggagaacttgcttaagaatttagatcaggtcaaaccagagtcagtgcgtgagaagattcttgctcacctcgaagacctcaaattaagccgcgaattgtcccgtgtacgcaccgatttgccgctcgaagttgatttcggtcgccgccgcgaacctgactgggagggtcttaaagcgtttttagagcgtcttgaatttggttcgctcttgcatgaattcggccttttagaaagcccgttactggccgaagaagcaccttggccaccgcccgagggcgcgtttttaggttaccgtttgagtcgcccggaaccgatgtgggccgaattactggctcttgcagcgtctgcccagggacgtgtgtatcgcgcggaagaccctcatggtgcgctccgcggcctcttcgaagtccgtggactccttgccaaagacttagctgttgttgcattgcgcgaaggtcttgatttacctccgactgatgatccaatgcttcttgcgtacctcttggacccgtcaaacacgacgcccgaaggcgtagcccgtcgttacggcggcgagtggaccgaagatgcagcgaaacgcgcgttattggccgaacgtttgcacgaaaatttattaggacgtttgcaaggcgaggaacgtctcctctggctttacgaagaagtggagaaaccattgagtcgcgtgctcgcgcatatggaagctaccggtgtcaaattagacgtggcgtatttggagaatctcagccttgaagttgctgcccacatgcgccgcttggaggaagaagtattccgtttagcaggccgttcctttcgccttaactctcgcgatcagttagaacgtgtgttgttcgatgaacttggtctccctcctatcggcaagacagagaagaccggtaaacgtagcacttcagcggcggttttagaagctcttcgcgaagtccatcccattgtggacaagatcttgcagtaccgcgaaatggcgaaattgaaaggcacctatattgaccgtcttccggcattagtccacccgaaaacgggacgcctccatacccgcttcaaccaaacagccacggcgaccggtcgtttgtcctcctctgatccaaaccttcagaatattccagtacgtaccccattgggccagaagatccgccgtgcgtttgtagctgaggagggttggcgtttagtggccctcgattatcgtcaaattgaattacgtgtccttgcccatctttctggcgatgagaacctcatccgcgtgtttcaggaaggcaaagacattcacactcaaacggcaagctggatgtttggattatcagctgaagcgatcgatcctttgatgcgtcgtgcagcgaagaccatcaatttcggtgttctctacggtatgagtgcctttcgtttgtcgcaggaattaggcattccctatgaagaagctcaggcgttcattcagaaatactttcaaagctatcccaaagttaaagcatggatcgagaagactctccgtgaaggccgcacacgtggttacgtagagaccttatttggacgtcgccgctatgttcccgatttaaacgctcgcgtgaaaggcaagcgtgaagccgccgaacgcatggcgttcaacatgcctgtacagggcacggcagctgacctcatgaaacttgcaatggtgcgcctttttccacaattgcgtgaagttggtgcccgcatgctcttggttgtccacgatgaactcttgttagaagcgccaaaagagcgtgcggaagaggtggcagccctcgcgaaagaagttatggaaggcgtgtggcccttagcggtgcctcttgaagtcgaagttggtattggcgaggattggctggctgccaaagga

SEQ ID NO: 5654 - protein, 841 aa, synthetic construct
  REGION 1..841: note = Variant of DNA polymerase I from Thermus sp. strain 2.9
MHHHHHHGGSGVLPVFEPKGRVLLVDGHHLAYRNFFALKGLTTSLGEPVQGVYGFAKSLLKALKEDGDVVIVVFDAKAPSFRHEAYEAYKAGRAPTPEDFPRQLALMKELVDLLGLERLEVPGFEADDVLATLAKKAEREGYEVQILTADRDLFQLLSPRISVLHPEGHRITPEWLWEKYGLRPEQWVDFRALAGDPSDNIPGVKGIGEKTALKLLKEWGSLENLLKNLDQVKPESVREKILAHLEDLKLSRELSRVRTDLPLEVDFGRRREPDWEGLKAFLERLEFGSLLHEFGLLESPLLAEEAPWPPPEGAFLGYRLSRPEPMWAELLALAASAQGRVYRAEDPHGALRGLFEVRGLLAKDLAVVALREGLDLPPTDDPMLLAYLLDPSNTTPEGVARRYGGEWTEDAAKRALLAERLHENLLGRLQGEERLLWLYEEVEKPLSRVLAHMEATGVKLDVAYLENLSLEVAAHMRRLEEEVFRLAGRSFRLNSRDQLERVLFDELGLPPIGKTEKTGKRSTSAAVLEALREVHPIVDKILQYREMAKLKGTYIDRLPALVHPKTGRLHTRFNQTATATGRLSSSDPNLQNIPVRTPLGQKIRRAFVAEEGWRLVALDYRQIELRVLAHLSGDENLIRVFQEGKDIHTQTASWMFGLSAEAIDPLMRRAAKTINFGVLYGMSAFRLSQELGIPYEEAQAFIQKYFQSYPKVKAWIEKTLREGRTRGYVETLFGRRRYVPDLNARVKGKREAAERMAFNMPVQGTAADLMKLAMVRLFPQLREVGARMLLVVHDELLLEAPKERAEEVAALAKEVMEGVWPLAVPLEVEVGIGEDWLAAKG

SEQ ID NO: 5655 - DNA, 2523 bp, synthetic construct
  misc_feature 1..2523: note = Variant of DNA polymerase I from Thermus sp. strain 2.9
  source 1..2523: mol_type = other DNA
atgcaccatcatcatcatcatggcggtagcggcgtgttaccggtgttcgagcctaaaggtcgcgtgcttctggttgatggccatcatctcgcgtatcgtaacttctttgccctgaaaggattaaccaccagcctgggcgagccggtacagggtgtctacggctttgcaaagtcgctcctgaaagctctgaaagaagacggtgatgtggtgattgttgtctttgatgcgaaagcgccaagttttcgccacgaagcgtacgaagcttacaaagccgggcgtgctccaacgccggaagactttcctcgccaattggcgcttatgaaggaattagtggatttgcttggcctcgaacgcttggaagttcccggtttcgaggcagacgacgtattagcgactctcgcaaagaaagccgaacgtgagggctatgaagtccagatcttgacagcagatcgcgatcttttccagcttttatctccgcgcatctcggtgttacacccggaagggcatcgtatcaccccggaatggctctgggagaaatatggtttgcgtcccgaacaatgggtggattttcgcgccttagcaggcgatccgagcgacaatattccgggagttaaaggtatcggcgagaagacggcgctcaagctccttaaagaatgggggtcgttggagaacttgcttaagaatttagatcaggtcaaaccagagtcagtgcgtgagaagattcttgctcacctcgaagacctcaaattaagccgcgaattgtcccgtgtacgcaccgatttgccgctcgaagttgatttcggtcgccgccgcgaacctgactgggagggtcttaaagcgtttttagagcgtcttgaatttggttcgctcttgcatgaattcggccttttagaaagcccgttactggccgaagaagcaccttggccaccgcccgagggcgcgtttttaggttaccgtttgagtcgcccggaaccgatgtgggccgaattactggctcttgcagcgtctgcccagggacgtgtgtatcgcgcggaagaccctcatggtgcgctccgcggcctcttcgaagtccgtggactccttgccaaagacttagctgttgttgcattgcgcgaaggtcttgatttacctccgactgatgatccaatgcttcttgcgtacctcttggacccgtcaaacacgacgcccgaaggcgtagcccgtcgttacggcggcgagtggaccgaagatgcagcgaaacgcgcgttattggccgaacgtttgcacgaaaatttattaggacgtttgcaaggcgaggaacgtctcctctggctttctgaagaagtggagaaaccattgagtcgcgtgctcgcgcatatggaagctaccggtgtcaaattagacgtggcgtatttggagaatctcagccttgaagttgctgcccacatgcgccgcttggaggaagaagtattccgtttagcaggccgttcctttcgccttaactctcgcgatcagttagaacgtgtgttgttcgatgaacttggtctccctcctatcggcaagacagagaagaccggtaaacgtagcacttcagcggcggttttagaagctcttcgcgaagtccatcccattgtggacaagatcttgcagtaccgcgaaatggcgaaattgaaaggcacctatattgaccgtcttccggcattagtccacccgaaaacgggacgcctccatacccgcttcaaccaaacagccacggcgaccggtcgtttgtcctcctctgatccaaaccttcagaatattccagtacgtaccccattgggccagaagatccgccgtgcgtttgtagctgaggagggttggcgtttagtggccctcgattatcgtcaaattgaattacgtgtccttgcccatctttctggcgatgagaacctcatccgcgtgtttcaggaaggcaaagacattcacactcaaacggcaagctggatgtttggattatcagctgaagcgatcgatcctttgatgcgtcgtgcagcgaagaccatcaatttcggtgttctctacggtatgagtgcctttcgtttgtcgcaggaattaggcattccctatgaagaagctcaggcgttcattcagaaatactttcaaagctatcccaaagttaaagcatggatcgagaagactctccgtgaaggccgcacacgtggttacgtagagaccttatttggacgtcgccgctatgttcccgatttaaacgctcgcgtgaaaggcaagcgtgaagccgccgaacgcatggcgttcaacatgcctgtacagggcacggcagctgacctcatgaaacttgcaatggtgcgcctttttccacaattgcgtgaagttggtgcccgcatgctcttgcaggtccacgatgaactcttgttagaagcgccaaaagagcgtgcggaagaggtggcagccctcgcgaaagaagttatggaaggcgtgtggcccttagcggtgcctcttgaagtcgaagttggtattggcgaggattggctggctgccaaagga

SEQ ID NO: 5656 - protein, 841 aa, synthetic construct
  REGION 1..841: note = Variant of DNA polymerase I from Thermus sp. strain 2.9
MHHHHHHGGSGVLPVFEPKGRVLLVDGHHLAYRNFFALKGLTTSLGEPVQGVYGFAKSLLKALKEDGDVVIVVFDAKAPSFRHEAYEAYKAGRAPTPEDFPRQLALMKELVDLLGLERLEVPGFEADDVLATLAKKAEREGYEVQILTADRDLFQLLSPRISVLHPEGHRITPEWLWEKYGLRPEQWVDFRALAGDPSDNIPGVKGIGEKTALKLLKEWGSLENLLKNLDQVKPESVREKILAHLEDLKLSRELSRVRTDLPLEVDFGRRREPDWEGLKAFLERLEFGSLLHEFGLLESPLLAEEAPWPPPEGAFLGYRLSRPEPMWAELLALAASAQGRVYRAEDPHGALRGLFEVRGLLAKDLAVVALREGLDLPPTDDPMLLAYLLDPSNTTPEGVARRYGGEWTEDAAKRALLAERLHENLLGRLQGEERLLWLSEEVEKPLSRVLAHMEATGVKLDVAYLENLSLEVAAHMRRLEEEVFRLAGRSFRLNSRDQLERVLFDELGLPPIGKTEKTGKRSTSAAVLEALREVHPIVDKILQYREMAKLKGTYIDRLPALVHPKTGRLHTRFNQTATATGRLSSSDPNLQNIPVRTPLGQKIRRAFVAEEGWRLVALDYRQIELRVLAHLSGDENLIRVFQEGKDIHTQTASWMFGLSAEAIDPLMRRAAKTINFGVLYGMSAFRLSQELGIPYEEAQAFIQKYFQSYPKVKAWIEKTLREGRTRGYVETLFGRRRYVPDLNARVKGKREAAERMAFNMPVQGTAADLMKLAMVRLFPQLREVGARMLLQVHDELLLEAPKERAEEVAALAKEVMEGVWPLAVPLEVEVGIGEDWLAAKG

SEQ ID NO: 5657 - DNA, 2523 bp, synthetic construct
  misc_feature 1..2523: note = Variant of DNA polymerase I from Thermus sp. strain 2.9
  source 1..2523: mol_type = other DNA
atgcaccatcatcatcatcatggcggtagcggcgtgttaccggtgttcgagcctaaaggtcgcgtgcttctggttgatggccatcatctcgcgtatcgtaacttctttgccctgaaaggattaaccaccagcctgggcgagccggtacagggtgtctacggctttgcaaagtcgctcctgaaagctctgaaagaagacggtgatgtggtgattgttgtctttgatgcgaaagcgccaagttttcgccacgaagcgtacgaagcttacaaagccgggcgtgctccaacgccggaagactttcctcgccaattggcgcttatgaaggaattagtggatttgcttggcctcgaacgcttggaagttcccggtttcgaggcagacgacgtattagcgactctcgcaaagaaagccgaacgtgagggctatgaagtccagatcttgacagcagatcgcgatcttttccagcttttatctccgcgcatctcggtgttacacccggaagggcatcgtatcaccccggaatggctctgggagaaatatggtttgcgtcccgaacaatgggtggattttcgcgccttagcaggcgatccgagcgacaatattccgggagttaaaggtatcggcgagaagacggcgctcaagctccttaaagaatgggggtcgttggagaacttgcttaagaatttagatcaggtcaaaccagagtcagtgcgtgagaagattcttgctcacctcgaagacctcaaattaagccgcgaattgtcccgtgtacgcaccgatttgccgctcgaagttgatttcggccgccgccgcgaacctgactgggagggtcttaaagcgtttttagagcgtcttgaatttggttcgctcttgcatgaattcggccttttagaaagcccgttactggccgaagaagcaccttggccaccgcccgagggcgcgtttttaggttaccgtttgagtcgcccggaaccgatgtgggccgaattactggctcttgcagcgtctgcccagggacgtgtgtatcgcgcggaagaccctcatggtgcgctccgcggcctcttcgaagtccgtggactccttgccaaagacttagctgttgttgcattgcgcgaaggtcttgatttacctccgactgatgatccaatgcttcttgcgtacctcttggacccgtcaaacacgacgcccgaaggcgtagcccgtcgttacggcggcgagtggaccgaagatgcagcgaaacgcgcgttattggccgaacgtttgcacgaaaatttattaggacgtttgcaaggcgaggaacgtctcctctggctttacgaagaagtggagaaaccattgagtcgcgtgctcgcgcatatggaagctaccggtgtcaaattagacgtggcgtatttggaggcccttagccttgaagttgctgcccatatgcgccgcttggaggaagaagtattccgtttagcaggccgctcctttcgccttaactctcgcgatcagttagaacgtgtgttgttcgatgaacttggtctccctcctatcggcaagacagagaagaccggtaaacgtagcacttcagcggcggttttagaagctcttcgcgaagtccatcccattgtggacaagatcttgcagtaccgcgaactggcgaaattgaaaggcacctatattgaccgtcttccggcattagtccacccgaaaacgggacgcctccatacccgcttcaaccaaacagccacggcgaccggtcgtttgtccagttctgatccaaaccttcagaatattccagtacgtaccccattgggccagaagatccgccgtgcgtttgtagctgaggagggttggcgtttagtggccctcgattatcgtcaaattgaattacgtgtccttgcccatctttctggcgatgagaacctcatccgcgtgtttcaggaaggcaaagacattcacactcaaacggcaagctggatgtttggattatcagctgaagcgatcgatcctttgatgcgtcgtgcagcgaagaccatcaatttcggtgttctctacggtatgagtgcctttcgtttgtcgcaggaattaggcattccctatgaagaagctcaggcgttcattcagaaatactttcaaagctatcccaaagttaaagcatggatcgagaagactctcgaggaaggccgcacacgtggttacgtagagaccttatttggacgtcgccgctatgttcccgatttaaacgctcgcgtgaaaggcaagcgtgaagccgccgaacgcatggcgttcaacatgcctgtacagggcacggcagctgacctcatgaaacttgcaatggtgcgcctttttccacaattgcgtgaagttggtgcccgcatgctcttgcaggtccacgatgaactcttgttagaagcgccaaaagagcgtgcggaagaggtggcagccctcgcgaaagaagttatggaaggcgtgtggcccttagcggtgcctcttgaagtcgaagttggtattggcgaggattggctggctgccaaagga

SEQ ID NO: 5658 - protein, 841 aa, synthetic construct
  REGION 1..841: note = Variant of DNA polymerase I from Thermus sp. strain 2.9
MHHHHHHGGSGVLPVFEPKGRVLLVDGHHLAYRNFFALKGLTTSLGEPVQGVYGFAKSLLKALKEDGDVVIVVFDAKAPSFRHEAYEAYKAGRAPTPEDFPRQLALMKELVDLLGLERLEVPGFEADDVLATLAKKAEREGYEVQILTADRDLFQLLSPRISVLHPEGHRITPEWLWEKYGLRPEQWVDFRALAGDPSDNIPGVKGIGEKTALKLLKEWGSLENLLKNLDQVKPESVREKILAHLEDLKLSRELSRVRTDLPLEVDFGRRREPDWEGLKAFLERLEFGSLLHEFGLLESPLLAEEAPWPPPEGAFLGYRLSRPEPMWAELLALAASAQGRVYRAEDPHGALRGLFEVRGLLAKDLAVVALREGLDLPPTDDPMLLAYLLDPSNTTPEGVARRYGGEWTEDAAKRALLAERLHENLLGRLQGEERLLWLYEEVEKPLSRVLAHMEATGVKLDVAYLEALSLEVAAHMRRLEEEVFRLAGRSFRLNSRDQLERVLFDELGLPPIGKTEKTGKRSTSAAVLEALREVHPIVDKILQYRELAKLKGTYIDRLPALVHPKTGRLHTRFNQTATATGRLSSSDPNLQNIPVRTPLGQKIRRAFVAEEGWRLVALDYRQIELRVLAHLSGDENLIRVFQEGKDIHTQTASWMFGLSAEAIDPLMRRAAKTINFGVLYGMSAFRLSQELGIPYEEAQAFIQKYFQSYPKVKAWIEKTLEEGRTRGYVETLFGRRRYVPDLNARVKGKREAAERMAFNMPVQGTAADLMKLAMVRLFPQLREVGARMLLQVHDELLLEAPKERAEEVAALAKEVMEGVWPLAVPLEVEVGIGEDWLAAKG

SEQ ID NO: 5659 - DNA, 2523 bp, synthetic construct
  misc_feature 1..2523: note = Variant of DNA polymerase I from Thermus sp. strain 2.9
  source 1..2523: mol_type = other DNA
atgcaccatcatcatcatcatggcggtagcggcgtgttaccggtgttcgagcctaaaggtcgcgtgcttctggttgatggccatcatctcgcgtatcgtaacttctttgccctgaaaggattaaccaccagccgcggcgagccggtacagggtgtctacggctttgcaaagtcgctcctgaaagctctgaaagaagacggtgatgtggtgattgttgtctttgatgcgaaagcgccaagttttcgccacgaagcgtacgaagcttacaaagccgggcgtgctccaacgccggaagactttcctcgccaattggcgcttatgaaggaattagtggatttgcttggcctcgaacgcttggaagttcccggtttcgaggcagacgacgtattagcgactctcgcaaagaaagccgaacgtgagggctatgaagtccagatcttgacagcagatcgcgatcttttccagcttttatctccgcgcatctcggtgttacacccggaagggcatcgtatcaccccggaatggctctgggagaaatatggtttgcgtcccgaacaatgggtggattttcgcgccttagcaggcgatccgagcgacaatattccgggagttaaaggtatcggcgagaagacggcgctcaagctccttaaagaatgggggtcgttggagaacttgcttaagaatttagatcaggtcaaaccagagtcagtgcgtgagaagattcttgctcacctcgaagacctcaaattaagccgcgaattgtcccgtgtacgcaccgatttgccgctcgaagttgatttccgccgccgccgcgaacctgactgggagggtcttaaagcgtttttagagcgtcttgaatttggttcgctcttgcatgaattcggccttttagaaagcccgttaccggccgaagaagcaccttggccaccgcccgagggcgcgtttttaggttaccgtttgagtcgcccggaaccgatgtgggccgaattactggctcttgcagcgtctgcccagggacgtgtgtatcgcgcggaagaccctcatggtgcgctccgcggcctcttcgaagtccgtggactccttgccaaagacttagctgttgttgcattgcgcgaaggtcttgatttacctccgactgatgatccaatgcttcttgcgtacctcttggacccgtcaaacacgacgcccgaaggcgtagcccgtcgttacggcggcgagtggaccgaagatgcagcgaaacgcgcgttattggccgaacgtttgcacgaaaatttattaggacgtttgcaaggcgaggaacgtctcctctggctttacgaagaagtggagaaaccattgagtcgcgtgctcgcgcatatggaagctaccggtgtcaaattagacgtggcgtatttggagaatcttcaccttgaagttgctgcccatatgcgccgcttggaggaagaagtattccgtttagcaggccgttcctttcgccttaactctcgcgatcagttagaacgtgtgttgttcgatgaacttggtctccctcctatcggcaagacagagaagaccggtaaacgtagcacttcagcggcggttttagaagctcttcgcgaagtccatcccattgtggacaagatcttgcagtaccgcgaactggcgaaattgaaaggcacctatattgaccctcttccggcattagtccacccgaaaacgggacgcctccatacccgcttcaaccaaacagccacggcgaccggtcgtttgtccagttctgatccaaaccttcagaatattccagtacgtaccccattgggccagaagatccgccgtgcgtttgtagctgaggagggttggcgtttagtggccctcgattatcgtcaaattgaattacgtgtccttgcccatctttctggcgatgagaacctcatccgcgtgtttcaggaaggcaaagacattcacactcaaacggcaagctggatgtttggattatcagctgaagcgatcgatcctttgatgcgtcgtgcagcgaagaccatcaatttcggtgttctctacggtatgagtgcctttcgtttgtcgcaggaattaggcattccctatgaagaagctcaggcgttcattcagaaatactttcaaagctatcccaaagttaaagcatggatcgagaagactctcgaggaaggccgcacacgtggttacgtagagaccttatttggacgtcgccgctatgttcccgatttaaacgctcgcgtgaaaggcgtacgtgaagccgccgaacgcatggcgttcaacatgcctgtacagggcacggcagctgacctcatgaaacttgcaatggtgcgcctttttccacaattgcgtgaagttggtgcccgcatgctcttgcaggtccacgatgaactcttgttagaagcgccaaaagagcgtgcggaagaggtggcagccctcgcgaaagaagttatggaaggcgtgtggcccttagcggtgcctcttgaagtcgaagttggtattggcgaggattggctggctgccaaagga

SEQ ID NO: 5660 - protein, 841 aa, synthetic construct
  REGION 1..841: note = Variant of DNA polymerase I from Thermus sp. strain 2.9
MHHHHHHGGSGVLPVFEPKGRVLLVDGHHLAYRNFFALKGLTTSRGEPVQGVYGFAKSLLKALKEDGDVVIVVFDAKAPSFRHEAYEAYKAGRAPTPEDFPRQLALMKELVDLLGLERLEVPGFEADDVLATLAKKAEREGYEVQILTADRDLFQLLSPRISVLHPEGHRITPEWLWEKYGLRPEQWVDFRALAGDPSDNIPGVKGIGEKTALKLLKEWGSLENLLKNLDQVKPESVREKILAHLEDLKLSRELSRVRTDLPLEVDFRRRREPDWEGLKAFLERLEFGSLLHEFGLLESPLPAEEAPWPPPEGAFLGYRLSRPEPMWAELLALAASAQGRVYRAEDPHGALRGLFEVRGLLAKDLAVVALREGLDLPPTDDPMLLAYLLDPSNTTPEGVARRYGGEWTEDAAKRALLAERLHENLLGRLQGEERLLWLYEEVEKPLSRVLAHMEATGVKLDVAYLENLHLEVAAHMRRLEEEVFRLAGRSFRLNSRDQLERVLFDELGLPPIGKTEKTGKRSTSAAVLEALREVHPIVDKILQYRELAKLKGTYIDPLPALVHPKTGRLHTRFNQTATATGRLSSSDPNLQNIPVRTPLGQKIRRAFVAEEGWRLVALDYRQIELRVLAHLSGDENLIRVFQEGKDIHTQTASWMFGLSAEAIDPLMRRAAKTINFGVLYGMSAFRLSQELGIPYEEAQAFIQKYFQSYPKVKAWIEKTLEEGRTRGYVETLFGRRRYVPDLNARVKGVREAAERMAFNMPVQGTAADLMKLAMVRLFPQLREVGARMLLQVHDELLLEAPKERAEEVAALAKEVMEGVWPLAVPLEVEVGIGEDWLAAKG

SEQ ID NO: 5661 - DNA, 2523 bp, synthetic construct
  misc_feature 1..2523: note = Variant of DNA polymerase I from Thermus sp. strain 2.9
  source 1..2523: mol_type = other DNA
atgcaccatcatcatcatcatggcggtagcggcgtgttaccggtgttcgagcctaaaggtcgcgtgcttctggttgatggccatcatctcgcgtatcgtaacttctttgccctgaaaggattaaccaccagccgcggcgagccggtacagggtgtctacggctttgcaaagtcgctcctgaaagctctgaaagaagacggtgatgtggtgattgttgtctttgatgcgaaagcgccaagttttcgccacgaagcgtacgaagcttacaaagccgggcgtgctccaacgccggaagactttcctcgccaattggcgcttatgaaggaattagtggatttgcttggcctcgaacgcttggaagttcccggtttcgaggcagacgacgtattagcgactctcgcaaagaaagccgaacgtgagggctatgaagtccagatcttgacagcagatcgcgatcttttccagcttttatctccgcgcatctcggtgttacacccggaagggcatcgtatcaccccggaatggctctgggagaaatatggtttgcgtcccgaacaatgggtggattttcgcgccttagcaggcgatccgagcgacaatattccgggagttaaaggtatcggcgagaagacggcgctcaagctccttaaagaatgggggtcgttggagaacttgcttaagaatttagatcaggtcaaaccagagtcagtgcgtgagaagattcttgctcacctcgaagacctcaaattaagccgcgaattgtcccgtgtacgcaccgatttgccgctcgaagttgatttccgccgccgccgcgaacctgactgggagggtcttaaagcgtttttagagcgtcttgaatttggttcgctcttgcatgaattcggccttttagaaagcccgttactggccgaagaagcaccttggccaccgcccgagggcgcgtttttaggttaccgtttgagtcgcccggaaccgatgtgggccgaattactggctcttgcagcgtctgcccagggacgtgtgtatcgcgcggaagaccctcatggtgcgctccgcggcctcttcgaagtccgtggactccttgccaaagacttagctgttgttgcattgcgcgaaggtcttgatttacctccgactgatgatccaatgcttcttgcgtacctcttggacccgtcaaacacgacgcccgaaggcgtagcccgtcgttacggcggcgagtggaccgaagatgcagcgaaacgcgcgttattggccgaacgtttgcacgaaaatttattaggacgtttgcaaggcgaggaacgtctcctctggctttacgaagaagtggagaaaccattgagtcgcgtgctcgcgcatatggaagctaccggtgtcaaattagacgtggcgtatttggagaatctcagccttgaagttgctgcccacatgcgccgcttggaggaagaagtattccgtttagcaggccgttcctttcgccttaactctcgcgatcagttagaacgtgtgttgttcgatgaacttggtctccctcctatcggcaagacagagaagaccggtaaacgtagcacttcagcggcggttttagaagctcttcgcgaagtccatcccattgtggacaagatcttgcagtaccgcgaaatggcgaaattgaaaggcacctatattgaccgtcttccggcattagtccacccgaaaacgggacgcctccatacccgcttcaaccaaacagccacggcgaccggtcgtttgtcctcctctgatccaaaccttcagaatattccagtacgtaccccattgggccagaagatccgccgtgcgtttgtagctgaggagggttggcgtttagtggccctcgattatcgtcaaattgaattacgtgtccttgcccatctttctggcgatgagaacctcatccgcgtgtttcaggaaggcaaagacattcacactcaaacggcaagctggatgtttggattatcagctgaagcgatcgatcctttgatgcgtcgtgcagcgaagaccatcaatttcggtgttctctacggtatgagtgcctttcgtttgtcgcaggaattaggcattccctatgaagaagctcaggcgttcattcagaaatactttcaaagctatcccaaagttaaagcatggatcgagaagactctccgcgaaggccgcacacgtggttacgtagagaccttatttggacgtcgccgctatgttcccgatttaaacgctcgcgtgaaaggcaagcgtgaagccgccgaacgcatggcgttcaacatgcctgtacagggcacggcagctgacctcatgaaacttgcaatggtgcgcctttttccacaattgcgtgaagttggtgcccgcatgctcttgcaggtccacgatgaactcttgttagaagcgccaaaagagcgtgcggaagaggtggcagccctcgcgaaagaagttatggaaggcgtgtggcccttagcggtgcctcttgaagtcgaagttggtattggcgaggattggctggctgccaaagga

SEQ ID NO: 5662 - protein, 841 aa, synthetic construct
  REGION 1..841: note = Variant of DNA polymerase I from Thermus sp. strain 2.9
MHHHHHHGGSGVLPVFEPKGRVLLVDGHHLAYRNFFALKGLTTSRGEPVQGVYGFAKSLLKALKEDGDVVIVVFDAKAPSFRHEAYEAYKAGRAPTPEDFPRQLALMKELVDLLGLERLEVPGFEADDVLATLAKKAEREGYEVQILTADRDLFQLLSPRISVLHPEGHRITPEWLWEKYGLRPEQWVDFRALAGDPSDNIPGVKGIGEKTALKLLKEWGSLENLLKNLDQVKPESVREKILAHLEDLKLSRELSRVRTDLPLEVDFRRRREPDWEGLKAFLERLEFGSLLHEFGLLESPLLAEEAPWPPPEGAFLGYRLSRPEPMWAELLALAASAQGRVYRAEDPHGALRGLFEVRGLLAKDLAVVALREGLDLPPTDDPMLLAYLLDPSNTTPEGVARRYGGEWTEDAAKRALLAERLHENLLGRLQGEERLLWLYEEVEKPLSRVLAHMEATGVKLDVAYLENLSLEVAAHMRRLEEEVFRLAGRSFRLNSRDQLERVLFDELGLPPIGKTEKTGKRSTSAAVLEALREVHPIVDKILQYREMAKLKGTYIDRLPALVHPKTGRLHTRFNQTATATGRLSSSDPNLQNIPVRTPLGQKIRRAFVAEEGWRLVALDYRQIELRVLAHLSGDENLIRVFQEGKDIHTQTASWMFGLSAEAIDPLMRRAAKTINFGVLYGMSAFRLSQELGIPYEEAQAFIQKYFQSYPKVKAWIEKTLREGRTRGYVETLFGRRRYVPDLNARVKGKREAAERMAFNMPVQGTAADLMKLAMVRLFPQLREVGARMLLQVHDELLLEAPKERAEEVAALAKEVMEGVWPLAVPLEVEVGIGEDWLAAKG

SEQ ID NO: 5663 - DNA, 2523 bp, synthetic construct
  misc_feature 1..2523: note = Variant of DNA polymerase I from Thermus sp. strain 2.9
  source 1..2523: mol_type = other DNA
atgcaccatcatcatcatcatggcggtagcggcgtgttaccggtgttcgagcctaaaggtcgcgtgcttctggttgatggccatcatctcgcgtatcgtaacttctttgccctgaaaggattaaccaccagcctgggcgagccggtacagggtgtctacggctttgcaaagtcgctcctgaaagctctgaaagaagacggtgatgtggtgattgttgtctttgatgcgaaagcgccaagttttcgccacgaagcgtacgaagcttacaaagccgggcgtgctccaacgccggaagactttcctcgccaattggcgcttatgaaggaattagtggatttgcttggcctcgaacgcttggaagttcccggtttcgaggcagacgacgtattagcgactctcgcaaagaaagccgaacgtgagggctatgaagtccagatcttgacagcagatcgcgatcttttccagcttttatctccgcgcatctcggtgttacacccggaagggcatcgtatcaccccggaatggctctgggagaaatatggtttgcgtcccgaacaatgggtggattttcgcgccttagcaggcgatccgagcgacaatattccgggagttaaaggtatcggcgagaagacggcgctcaagctccttaaagaatgggggtcgttggagaacttgcttaagaatttagatcaggtcaaaccagagtcagtgcgtgagaagattcttgctcacctcgaagacctcaaattaagccgcgaattgtcccgtgtacgcaccgatttgccgctcgaagttgatttcggtcgccgccgcgaacctgactgggagggtcttaaagcgtttttagagcgtcttgaatttggttcgctcttgcatgaattcggccttttagaaagcccgttactggccgaagaagcaccttggccaccgcccgagggcgcgtttttaggttaccgtttgagtcgcccggaaccgatgtgggccgaattactggctcttgcagcgtctgcccagggacgtgtgtatcgcgcggaagaccctcatggtgcgctccgcggcctcttcgaagtccgtggcctccttgccaaagacttagctgttgttgcattgcgcgaaggtcttgatttacctccgactgatgatccaatgcttcttgcgtacctcttggacccgtcaaacacgacgcccgaaggcgtagcccgtcgttacggcggcgagtggaccgaagatgcagccaaacgcgcgttattggccgaacgtttgcacgaaaatttattaggacgtttgcaaggcgaggaacgtctcctctggctttacgaagaagtggagaaaccattgagtcgcgtgctcgcgcatatggaagctaccggtgtcaaattagacgtggcgtatttggagaatctcagccttgaagttgctgcccacatgcgccgcttggaggaagaagtattccgtttagcaggccgttcctttcgccttaactctcgcgatcagttagaacgtgtgttgttcgatgaacttggtctccctcctatcggcaagacagagaagaccggtaaacgtagcacttcagcggcggttttagaagctcttcgcgaagtccatcccattgtggacaagatcttgcagtaccgcgaaatggcgaaattgaaaggcacctatattgaccgtcttccggcattagtccacccgaaaacgggacgcctccatacccgcttcaaccaaacagccacggcgaccggtcgtttgtcctcctctgatccaaaccttcagaatattccagtacgtaccccattgggccagaagatccgccgtgcgtttgtagctgaggagggttgggcgttagtggccctcgattatcgtcaaattgaattacgtgtccttgcccatctttctggcgatgagaacctcatccgcgtgtttcaggaaggcaaagacattcacactcaaacggcaagctggatgtttggattatcagctgaagcgatcgatcctttgatgcgtcgtgcagcgaagaccatcaatttcggtgttctctacggtatgagtgcctttcgtttgtcgcaggaattaggcattccctatgaagaagctcagggtttcattcagaaatactttcaaggctatcccaaagttaaagcatggatcgagaagactctccgtgaaggccgcacacgtggttacgtagagaccttatttggacgtcgccgctatgttcccgatttaaactcgcgcgtgaaaggcaagcgtgaagccgccgaacgcatggcgttcaacatgcctgtacagggcacggcagctgacctcatgaaacttgcaatggtgcgcctttttccacaattgcgtgaagttggtgcccgcatggatttgcaggtccacgatgaactcttgttagaagcgccaaaagagcgtgcggaagaggtggcagccctcgcgaaagaagttatggaaggcgtgtggcccttagcggtgcctcttgaagtcgaagttggtattggcgaggattggctggctgccaaagga

SEQ ID NO: 5664 - protein, 841 aa, synthetic construct
  REGION 1..841: note = Variant of DNA polymerase I from Thermus sp. strain 2.9
MHHHHHHGGSGVLPVFEPKGRVLLVDGHHLAYRNFFALKGLTTSLGEPVQGVYGFAKSLLKALKEDGDVVIVVFDAKAPSFRHEAYEAYKAGRAPTPEDFPRQLALMKELVDLLGLERLEVPGFEADDVLATLAKKAEREGYEVQILTADRDLFQLLSPRISVLHPEGHRITPEWLWEKYGLRPEQWVDFRALAGDPSDNIPGVKGIGEKTALKLLKEWGSLENLLKNLDQVKPESVREKILAHLEDLKLSRELSRVRTDLPLEVDFGRRREPDWEGLKAFLERLEFGSLLHEFGLLESPLLAEEAPWPPPEGAFLGYRLSRPEPMWAELLALAASAQGRVYRAEDPHGALRGLFEVRGLLAKDLAVVALREGLDLPPTDDPMLLAYLLDPSNTTPEGVARRYGGEWTEDAAKRALLAERLHENLLGRLQGEERLLWLYEEVEKPLSRVLAHMEATGVKLDVAYLENLSLEVAAHMRRLEEEVFRLAGRSFRLNSRDQLERVLFDELGLPPIGKTEKTGKRSTSAAVLEALREVHPIVDKILQYREMAKLKGTYIDRLPALVHPKTGRLHTRFNQTATATGRLSSSDPNLQNIPVRTPLGQKIRRAFVAEEGWALVALDYRQIELRVLAHLSGDENLIRVFQEGKDIHTQTASWMFGLSAEAIDPLMRRAAKTINFGVLYGMSAFRLSQELGIPYEEAQGFIQKYFQGYPKVKAWIEKTLREGRTRGYVETLFGRRRYVPDLNSRVKGKREAAERMAFNMPVQGTAADLMKLAMVRLFPQLREVGARMDLQVHDELLLEAPKERAEEVAALAKEVMEGVWPLAVPLEVEVGIGEDWLAAKG

SEQ ID NO: 5665 - DNA, 2523 bp, synthetic construct
  misc_feature 1..2523: note = Variant of DNA polymerase I from Thermus sp. strain 2.9
  source 1..2523: mol_type = other DNA
atgcaccatcatcatcatcatggcggtagcggcgtgttaccggtgttcgagcctaaaggtcgcgtgcttctggttgatggccatcatctcgcgtatcgtaacttctttgccctgaaaggattaaccaccagcctgggcgagccggtacagggtgtctacggctttgcaaagtcgctcctgaaagctctgaaagaagacggtgatgtggtgattgttgtctttgatgcgaaagcgccaagttttcgccacgaagcgtacgaagcttacaaagccgggcgtgctccaacgccggaagactttcctcgccaattggcgcttatgaaggaattagtggatttgcttggcctcgaacgcttggaagttcccggtttcgaggcagacgacgtattagcgactctcgcaaagaaagccgaacgtgagggctatgaagtccagatcttgacagcagatcgcgatcttttccagcttttatctccgcgcatctcggtgttacacccggaagggcatcgtatcaccccggaatggctctgggagaaatatggtttgcgtcccgaacaatgggtggattttcgcgccttagcaggcgatccgagcgacaatattccgggagttaaaggtatcggcgagaagacggcgctcaagctccttaaagaatgggggtcgttggagaacttgcttaagaatttagatcaggtcaaaccagagtcagtgcgtgagaagattcttgctcacctcgaagacctcaaattaagccgcgaattgtcccgtgtacgcaccgatttgccgctcgaagttgatttcggtcgccgccgcgaacctgactgggagggtcttaaagcgtttttagagcgtcttgaatttggttcgctcttgcatgaattcggccttttagaaagcccgttactggccgaagaagcaccttggccaccgcccgagggcgcgtttttaggttaccgtttgagtcgcccggaaccgatgtgggccgaattactggctcttgcagcgtctgcccagggacgtgtgtatcgcgcggaagaccctcatggtgcgctccgcggcctcttcgaagtccgtggactccttgccaaagacttagctgttgttgcattgcgcgaaggtcttgatttacctccgactgatgatccaatgcttcttgcgtacctcttggacccgtcaaacacgacgcccgaaggcgtagcccgtcgttacggcggcgagtggaccgaagatgcagcgaaacgcgcgttattggccgaacgtttgcacgaaaatttattaggacgtttgcaaggcgaggaacgtctcctctggctttacgaagaagtggagaaaccattgagtcgcgtgctcgcgcatatggaagctaccggtgtcaaattagacgtggcgtatttggagaatctcagccttgaagttgctgcccacatgcgccgcttggaggaagaagtattccgtttagcaggccgttcctttcgccttaactctcgcgatcagttagaacgtgtgttgttcgatgaacttggtctccctcctatcggcaagacagagaagaccggtaaacgtagcacttcagcggcggttttagaagctcttcgcgaagtccatcccattgtggacaagatcttgcagtaccgcgaaatggcgaaattgaaaggcacctatattgaccgtcttccggcattagtccacccgaaaacgggacgcctccatacccgcttcaaccaaacagccacggcgaccggtcgtttgtcctcctctgatccaaaccttcagaatattccagtacgtaccccattgggccagaagatccgccgtgcgtttgtagctgaggagggttggcgtttagtggccctcgattatcgtcaaattgaattacgtgtccttgcccatctttctggcgatgagaacctcatccgcgtgtttcaggaaggcaaagacattcacactcaaacggcaagctggatgtttggattatcagctgaagcgatcgatcctttgatgcgtcgtgcagcgaagaccatcaatttcggtgttctctacggtatgagtgcctttcgtttgtcgcaggaattaggcattccctatgaagaagctcaggcgttcattcagaaatactttcaaagctatcccaaagttaaaaggtggatcgagaagactctccgtgaaggccgcacacgtggttacgtagagaccttatttggacgtcgccgctatgttcccgatttaaacgctcgcgtgaaaggcaagcgtgaagccgccgaacgcatggcgttcaacatgcctgtacagggcacggcagctgacctcatgaaacttgcaatggtgcgcctttttccacaattgcgtgaagttggtgcccgcatgctcttgcaggtccacgatgaactcttgttagaagcgccaaaagagcgtgcggaagaggtggcagccctcgcgaaagaagttatggaaggcgtgtggcccttagcggtgcctcttgaagtcgaagttggtattggcgaggattggctggctgccaaagga

SEQ ID NO: 5666 - protein, 841 aa, synthetic construct
  REGION 1..841: note = Variant of DNA polymerase I from Thermus sp. strain 2.9
MHHHHHHGGSGVLPVFEPKGRVLLVDGHHLAYRNFFALKGLTTSLGEPVQGVYGFAKSLLKALKEDGDVVIVVFDAKAPSFRHEAYEAYKAGRAPTPEDFPRQLALMKELVDLLGLERLEVPGFEADDVLATLAKKAEREGYEVQILTADRDLFQLLSPRISVLHPEGHRITPEWLWEKYGLRPEQWVDFRALAGDPSDNIPGVKGIGEKTALKLLKEWGSLENLLKNLDQVKPESVREKILAHLEDLKLSRELSRVRTDLPLEVDFGRRREPDWEGLKAFLERLEFGSLLHEFGLLESPLLAEEAPWPPPEGAFLGYRLSRPEPMWAELLALAASAQGRVYRAEDPHGALRGLFEVRGLLAKDLAVVALREGLDLPPTDDPMLLAYLLDPSNTTPEGVARRYGGEWTEDAAKRALLAERLHENLLGRLQGEERLLWLYEEVEKPLSRVLAHMEATGVKLDVAYLENLSLEVAAHMRRLEEEVFRLAGRSFRLNSRDQLERVLFDELGLPPIGKTEKTGKRSTSAAVLEALREVHPIVDKILQYREMAKLKGTYIDRLPALVHPKTGRLHTRFNQTATATGRLSSSDPNLQNIPVRTPLGQKIRRAFVAEEGWRLVALDYRQIELRVLAHLSGDENLIRVFQEGKDIHTQTASWMFGLSAEAIDPLMRRAAKTINFGVLYGMSAFRLSQELGIPYEEAQAFIQKYFQSYPKVKRWIEKTLREGRTRGYVETLFGRRRYVPDLNARVKGKREAAERMAFNMPVQGTAADLMKLAMVRLFPQLREVGARMLLQVHDELLLEAPKERAEEVAALAKEVMEGVWPLAVPLEVEVGIGEDWLAAKG

SEQ ID NO: 5667 - DNA, 2523 bp, synthetic construct
  misc_feature 1..2523: note = Variant of DNA polymerase I from Thermus sp. strain 2.9
  source 1..2523: mol_type = other DNA
atgcaccatcatcatcatcatggcggtagcggcgtgttaccggtgttcgagcctaaaggtcgcgtgcttctggttgatggccatcatctcgcgtatcgtaacttctttgccctgaaaggattaaccaccagcctgggcgagccggtacagggtgtctacggctttgcaaagtcgctcctgaaagctctgaaagaagacggtgatgtggtgattgttgtctttgatgcgaaagcgccaagttttcgccacgaagcgtacgaagcttacaaagccgggcgtgctccaacgccggaagactttcctcgccaattggcgcttatgaaggaattagtggatttgcttggcctcgaacgcttggaagttcccggtttcgaggcagacgacgtattagcgactctcgcaaagaaagccgaacgtgagggctatgaagtccagatcttgacagcagatcgcgatcttttccagcttttatctccgcgcatctcggtgttacacccggaagggcatcgtatcaccccggaatggctctgggagaaatatggtttgcgtcccgaacaatgggtggattttcgcgccttagcaggcgatccgagcgacaatattccgggagttaaaggtatcggcgagaagacggcgctcaagctccttaaagaatgggggtcgttggagaacttgcttaagaatttagatcaggtcaaaccagagtcagtgcgtgagaagattcttgctcacctcgaagacctcaaattaagccgcgaattgtcccgtgtacgcaccgatttgccgctcgaagttgatttcggtcgccgccgcgaacctgactgggagggtcttaaagcgtttttagagcgtcttgaatttggttcgctcttgcatgaattcggccttttagaaagcccgttactggccgaagaagcaccttggccaccgcccgagggcgcgtttttaggttaccgtttgagtcgcccggaaccgatgtgggccgaattactggctcttgcagcgtctgcccagggacgtgtgtatcgcgcggaagaccctcatggtgcgctccgcggcctcttcgaagtccgtggactccttgccaaagacttagctgttgttgcattgcgcgaaggtcttgatttacctccgactgatgatccaatgcttcttgcgtacctcttggacccgtcaaacacgacgcccgaaggcgtagcccgtcgttacggcggcgagtggaccgaagatgcagcgaaacgcgcgttattggccgaacgtttgcacgaaaatttattaggacgtttgcaaggcgaggaacgtctcctctggctttacgaagaagtggagaaaccattgagtcgcgtgctcgcgcatatggaagctaccggtgtcaaattagacgtggcgtatttggagaatctcagccttgaagttgctgcccacatgcgccgcttggaggaagaagtattccgtttagcaggccgttcctttcgccttaactctcgcgatcagttagaacgtgtgttgttcgatgaacttggtctccctcctatcggcaagacagagaagaccggtaaacgtagcacttcagcggcggttttagaagctcttcgcgaagtccatcccattgtggacaagatcttgcagtaccgcgaaatggcgaaattgaaaggcacctatattgaccgtcttccggcattagtccacccgaaaacgggacgcctccatacccgcttcaaccaaacagccacggcgaccggtcgtttgtcctcctctgatccaaaccttcagaatattccagtacgtaccccattgggccagaagatccgccgtgcgtttgtagctgaggagggttggcgtttagtggccctcgattatcgtcaaattgaattacgtgtccttgcccatctttctggcgatgagaacctcatccgcgtgtttcaggaaggcaaagacattcacactcaaacggcaagctggatgtttggattatcagctgaagcgatcgatcctttgatgcgtcgtgcagcgaagaccatcaatttcggtgttctctacggtatgagtgcctttcgtttgtcgcaggaattaggcattccctatgaagaagctcaggcgttcattcagaaatactttcaaagctatcccaaagttaaagcatggatcgagaagactctccgtgaaggccgctctcgtggttacgtagagaccttatttggacgtcgccgctatgttcccgatttaaacgctcgcgtgaaaggcaagcgtgaagccgccgaacgcatggcgttcaacatgcctgtacagggcacggcagctgacctcatgaaacttgcaatggtgcgcctttttccacaattgcgtgaagttggtgcccgcatgctcttgcaggtccacgatgaactcttgttagaagcgccaaaagagcgtgcggaagaggtggcagccctcgcgaaagaagttatggaaggcgtgtggcccttagcggtgcctcttgaagtcgaagttggtattggcgaggattggctggctgccaaagga

SEQ ID NO: 5668 - protein, 841 aa, synthetic construct
  REGION 1..841: note = Variant of DNA polymerase I from Thermus sp. strain 2.9
MHHHHHHGGSGVLPVFEPKGRVLLVDGHHLAYRNFFALKGLTTSLGEPVQGVYGFAKSLLKALKEDGDVVIVVFDAKAPSFRHEAYEAYKAGRAPTPEDFPRQLALMKELVDLLGLERLEVPGFEADDVLATLAKKAEREGYEVQILTADRDLFQLLSPRISVLHPEGHRITPEWLWEKYGLRPEQWVDFRALAGDPSDNIPGVKGIGEKTALKLLKEWGSLENLLKNLDQVKPESVREKILAHLEDLKLSRELSRVRTDLPLEVDFGRRREPDWEGLKAFLERLEFGSLLHEFGLLESPLLAEEAPWPPPEGAFLGYRLSRPEPMWAELLALAASAQGRVYRAEDPHGALRGLFEVRGLLAKDLAVVALREGLDLPPTDDPMLLAYLLDPSNTTPEGVARRYGGEWTEDAAKRALLAERLHENLLGRLQGEERLLWLYEEVEKPLSRVLAHMEATGVKLDVAYLENLSLEVAAHMRRLEEEVFRLAGRSFRLNSRDQLERVLFDELGLPPIGKTEKTGKRSTSAAVLEALREVHPIVDKILQYREMAKLKGTYIDRLPALVHPKTGRLHTRFNQTATATGRLSSSDPNLQNIPVRTPLGQKIRRAFVAEEGWRLVALDYRQIELRVLAHLSGDENLIRVFQEGKDIHTQTASWMFGLSAEAIDPLMRRAAKTINFGVLYGMSAFRLSQELGIPYEEAQAFIQKYFQSYPKVKAWIEKTLREGRSRGYVETLFGRRRYVPDLNARVKGKREAAERMAFNMPVQGTAADLMKLAMVRLFPQLREVGARMLLQVHDELLLEAPKERAEEVAALAKEVMEGVWPLAVPLEVEVGIGEDWLAAKG

SEQ ID NO: 5669 - DNA, 2523 bp, synthetic construct
  misc_feature 1..2523: note = Variant of DNA polymerase I from Thermus sp. strain 2.9
  source 1..2523: mol_type = other DNA
atgcaccatcatcatcatcatggcggtagcggcgtgttaccggtgttcgagcctaaaggtcgcgtgcttctggttgatggccatcatctcgcgtatcgtaacttctttgccctgaaaggattaaccaccagcctgggcgagccggtacagggtgtctacggctttgcaaagtcgctcctgaaagctctgaaagaagacggtgatgtggtgattgttgtctttgatgcgaaagcgccaagttttcgccacgaagcgtacgaagcttacaaagccgggcgtgctccaacgccggaagactttcctcgccaattggcgcttatgaaggaattagtggatttgcttggcctcgaacgcttggaagttcccggtttcgaggcagacgacgtattagcgactctcgcaaagaaagccgaacgtgagggctatgaagtccagatcttgacagcagatcgcgatcttttccagcttttatctccgcgcatctcggtgttacacccggaagggcatcgtatcaccccggaatggctctgggagaaatatggtttgcgtcccgaacaatgggtggattttcgcgccttagcaggcgatccgagcgacaatattccgggagttaaaggtatcggcgagaagacggcgctcaagctccttaaagaatgggggtcgttggagaacttgcttaagaatttagatcaggtcaaaccagagtcagtgcgtgagaagattcttgctcacctcgaagacctcaaattaagccgcgaattgtcccgtgtacgcaccgatttgccgctcgaagttgatttcggtcgccgccgcgaacctgactgggagggtcttaaagcgtttttagagcgtcttgaatttggttcgctcttgcatgaattcggccttttagaaagcccgttactggccgaagaagcaccttggccaccgcccgagggcgcgtttttaggttaccgtttgagtgctccggaaccgatgtgggccgaattactggctcttgcagcgtctgcccagggacgtgtgtatcgcgcggaagaccctcatggtgcgctccgcggcctcttcgaagtccgtggactccttgccaaagacttagctgttgttgcattgcgcgaaggtcttgatttacctccgactgatgatccaatgcttcttgcgtacctcttggacccgtcaaacacgacgcccgaaggcgtagcccgtcgttacggcggcgagtggaccgaagatgcagcgaaacgcgcgttattggccgaacgtttgcacgagaatttattaggacgtttgcaaggcgaggaacgtctcctctggctttacgaagaagtggagaaaccattgagtcgcgtgctcgcgcatatggaagctaccggtgtcaaattagacgtggcgtatttggagaatctcagccttgaagttgctgcccacatgcgccgcttggaggaagaagtattccgtttagcaggccgttcctttcgccttaactctcgcgatcagttagaacgtgtgttgttcgatgaacttggtctccctcctatcggcaagacagagaagaccggtaaacgtagcacttcagcggcggttttagaagctcttcgcgaagtccatcccattgtggacaagatcttgcagtaccgcgaaatggcgaaattgaaaggcacctatattgaccgtcttccggcattagtccacccgaaaacgggacgcctccatacccgcttcaaccaaacagccacggcgaccggtcgtttgtcctcctctgatccaaaccttcagaatattccagtacgtaccccattgggccagaagatccgccgtgcgtttgtagctgaggagggttggcgtttagtggccctcgattatcgtcaaattgaattacgtgtccttgcccatctttctggcgatgagaacctcatccgcgtgtttcaggaaggcaaagacattcacactcaaacggcaagctggatgtttggattatcagctgaagcgatcgatcctttgatgcgtcgtgcagcgaagaccatcaatttcggtgttctctacggtatgagtgcctttcgtttgtcgcaggaattaggcattccctatgaagaagctcaggcgttcattcagaaatactttcaaagctatcccaaagttaaagcatggatcgagaagactctccgtgaaggccgcacacgtggttacgtagagaccttatttggacgtcgccgctatgttcccgatttaaacgctcgcgtgaaaggcaagcgtgaagccgccgaacgcatggcgttcaacatgcctgtacagggcacggcagctgacctcatgaaacttgcaatggtgcgcctttttccacaattgcgtgaagttggtgcccgcatgctcttgcaggtccacgatgaactcttgttagaagcgccaaaagagcgtgcggaagaggtggcagccctcgcgaaagaagttatggaaggcgtgtggcccttagcggtgcctcttgaagtcgaagttggtattggcgaggattggctggctgccaaagga

SEQ ID NO: 5670 - protein, 841 aa, synthetic construct
  REGION 1..841: note = Variant of DNA polymerase I from Thermus sp. strain 2.9
MHHHHHHGGSGVLPVFEPKGRVLLVDGHHLAYRNFFALKGLTTSLGEPVQGVYGFAKSLLKALKEDGDVVIVVFDAKAPSFRHEAYEAYKAGRAPTPEDFPRQLALMKELVDLLGLERLEVPGFEADDVLATLAKKAEREGYEVQILTADRDLFQLLSPRISVLHPEGHRITPEWLWEKYGLRPEQWVDFRALAGDPSDNIPGVKGIGEKTALKLLKEWGSLENLLKNLDQVKPESVREKILAHLEDLKLSRELSRVRTDLPLEVDFGRRREPDWEGLKAFLERLEFGSLLHEFGLLESPLLAEEAPWPPPEGAFLGYRLSAPEPMWAELLALAASAQGRVYRAEDPHGALRGLFEVRGLLAKDLAVVALREGLDLPPTDDPMLLAYLLDPSNTTPEGVARRYGGEWTEDAAKRALLAERLHENLLGRLQGEERLLWLYEEVEKPLSRVLAHMEATGVKLDVAYLENLSLEVAAHMRRLEEEVFRLAGRSFRLNSRDQLERVLFDELGLPPIGKTEKTGKRSTSAAVLEALREVHPIVDKILQYREMAKLKGTYIDRLPALVHPKTGRLHTRFNQTATATGRLSSSDPNLQNIPVRTPLGQKIRRAFVAEEGWRLVALDYRQIELRVLAHLSGDENLIRVFQEGKDIHTQTASWMFGLSAEAIDPLMRRAAKTINFGVLYGMSAFRLSQELGIPYEEAQAFIQKYFQSYPKVKAWIEKTLREGRTRGYVETLFGRRRYVPDLNARVKGKREAAERMAFNMPVQGTAADLMKLAMVRLFPQLREVGARMLLQVHDELLLEAPKERAEEVAALAKEVMEGVWPLAVPLEVEVGIGEDWLAAKG

SEQ ID NO: 5671 - DNA, 2523 bp, synthetic construct
  misc_feature 1..2523: note = Variant of DNA polymerase I from Thermus sp. strain 2.9
  source 1..2523: mol_type = other DNA
atgcaccatcatcatcatcatggcggtagcggcgtgttaccggtgttcgagcctaaaggtcgcgtgcttctggttgatggccatcatctcgcgtatcgtaacttctttgccctgaaaggattaaccaccagcctgggcgagccggtacagggtgtctacggctttgcaaagtcgctcctgaaagctctgaaagaagacggtgatgtggtgattgttgtctttgatgcgaaagcgccaagttttcgccacgaagcgtacgaagcttacaaagccgggcgtgctccaacgccggaagactttcctcgccaattggcgcttatgaaggaattagtggatttgcttggcctcgaacgcttggaagttcccggtttcgaggcagacgacgtattagcgactctcgcaaagaaagccgaacgtgagggctatgaagtccagatcttgacagcagatcgcgatcttttccagcttttatctccgcgcatctcggtgttacacccggaagggcatcgtatcaccccggaatggctctgggagaaatatggtttgcgtcccgaacaatgggtggattttcgcgccttagcaggcgatccgagcgacaatattccgggagttaaaggtatcggcgagaagacggcgctcaagctccttaaagaatgggggtcgttggagaacttgcttaagaatttagatcaggtcaaaccagagtcagtgcgtgagaagattcttgctcacctcgaagacctcaaattaagccgcgaattgtcccgtgtacgcaccgatttgccgctcgaagttgatttcggtcgccgccgcgaacctgactgggagggtcttaaagcgtttttagagcgtcttgaatttggttcgctcttgcatgaattcggccttttagaaagcccgttactggccgaagaagcaccttggccaccgcccgagggcgcgtttttaggttaccgtttgagtcgcccggaaccgatgtgggccgaattactggctcttgcagcgtctgcccagggacgtgtgtatcgcgcggaagaccctcatggtgcgctccgcggcctcttcgaagtccgtggactccttgccaaagacttagctgttgttgcattgcgcgaaggtcttgatttacctccgactgatgatccaatgcttcttgcgtacctcttggacccgtcaaacacgacgcccgaaggcgtagcccgtcgttacggcggcgagtggaccgaagatgcagcgaaacgcgcgttattggccgaacgtttgcacgaaaatttattaggacgtttgcaaggcgaggaacgtctcctctggctttacgaagaagtggagaaaccattgagtcgcgtgctcgcgcatatggaagctaccggtgtcaaattagacgtggcgtatttggagaatctcagccttgaagttgctgcccacatgcgccgcttggaggaagaagtattccgtttagcaggccgttcctttcgccttaactctcgcgatcagttagaacgtgtgttgttcgatgtgcttggtctccctcctatcggcaagacagagaagaccggtaaacgtagcacttcagcggcggttttagaagctcttcgcgaagtccatcccattgtggacaagatcttgcagtaccgcgaaatggcgaaattgaaaggcacctatattgaccgtcttccggcattagtccacccgaaaacgggacgcctccatacccgcttcaaccaaacagccacggcgaccggtcgtttgtcctcctctgatccaaaccttcagaatattccagtacgtaccccattgggccagaagatccgccgtgcgtttgtagctgaggagggttggcgtttagtggccctcgattatcgtcaaattgaattacgtgtccttgcccatctttctggcgatgagaacctcatccgcgtgtttcaggaaggcaaagacattcacactcaaacggcaagctggatgtttggattatcagctgaagcgatcgatcctttgatgcgtcgtgcagcgaagaccatcaatttcggtgttctctacggtatgagtgcctttcgtttgtcgcaggaattaggcattccctatgaagaagctcaggcgttcattcagaaatactttcaaagctatcccaaagttaaagcatggatcgagaagactctccgtgaaggccgcacacgtggttacgtagagaccttatttggacgtcgccgctatgttcccgatttaaacgctcgcgtgaaaggcaagcgtgaagccgccgaacgcatggcgttcaacatgcctgtacagggcacggcagctgacctcatgaaacttgcaatggtgcgcctttttccacaattgcgtgaagttggtgcccgcatgctcttgcaggtccacgatgaactcttgttagaagcgccaaaagagcgtgcggaagaggtggcagccctcgcgaaagaagttatggaaggcgtgtggcccttagcggtgcctcttgaagtcgaagttggtattggcgaggattggctggctgccaaagga

SEQ ID NO: 5672 - protein, 841 aa, synthetic construct
  REGION 1..841: note = Variant of DNA polymerase I from Thermus sp. strain 2.9
MHHHHHHGGSGVLPVFEPKGRVLLVDGHHLAYRNFFALKGLTTSLGEPVQGVYGFAKSLLKALKEDGDVVIVVFDAKAPSFRHEAYEAYKAGRAPTPEDFPRQLALMKELVDLLGLERLEVPGFEADDVLATLAKKAEREGYEVQILTADRDLFQLLSPRISVLHPEGHRITPEWLWEKYGLRPEQWVDFRALAGDPSDNIPGVKGIGEKTALKLLKEWGSLENLLKNLDQVKPESVREKILAHLEDLKLSRELSRVRTDLPLEVDFGRRREPDWEGLKAFLERLEFGSLLHEFGLLESPLLAEEAPWPPPEGAFLGYRLSRPEPMWAELLALAASAQGRVYRAEDPHGALRGLFEVRGLLAKDLAVVALREGLDLPPTDDPMLLAYLLDPSNTTPEGVARRYGGEWTEDAAKRALLAERLHENLLGRLQGEERLLWLYEEVEKPLSRVLAHMEATGVKLDVAYLENLSLEVAAHMRRLEEEVFRLAGRSFRLNSRDQLERVLFDVLGLPPIGKTEKTGKRSTSAAVLEALREVHPIVDKILQYREMAKLKGTYIDRLPALVHPKTGRLHTRFNQTATATGRLSSSDPNLQNIPVRTPLGQKIRRAFVAEEGWRLVALDYRQIELRVLAHLSGDENLIRVFQEGKDIHTQTASWMFGLSAEAIDPLMRRAAKTINFGVLYGMSAFRLSQELGIPYEEAQAFIQKYFQSYPKVKAWIEKTLREGRTRGYVETLFGRRRYVPDLNARVKGKREAAERMAFNMPVQGTAADLMKLAMVRLFPQLREVGARMLLQVHDELLLEAPKERAEEVAALAKEVMEGVWPLAVPLEVEVGIGEDWLAAKG

SEQ ID NO: 5673 - DNA, 2523 bp, synthetic construct
  misc_feature 1..2523: note = Variant of DNA polymerase I from Thermus sp. strain 2.9
  source 1..2523: mol_type = other DNA
atgcaccatcatcatcatcatggcggtagcggcgtgttaccggtgttcgagcctaaaggtcgcgtgcttctggttgatggccatcatctcgcgtatcgtaacttctttgccctgaaaggattaaccaccagcctgggcgagccggtacagggtgtctacggctttgcaaagtcgctcctgaaagctctgaaagaagacggtgatgtggtgattgttgtctttgatgcgaaagcgccaagttttcgccacgaagcgtacgaagcttacaaagccgggcgtgctccaacgccggaagactttcctcgccaattggcgcttatgaaggaattagtggatttgcttggcctcgaacgcttggaagttcccggtttcgaggcagacgacgtattagcgactctcgcaaagaaagccgaacgtgagggctatgaagtccagatcttgacagcagatcgcgatcttttccagcttttatctccgcgcatctcggtgttacacccggaagggcatcgtatcaccccggaatggctctgggagaaatatggtttgcgtcccgaacaatgggtggattttcgcgccttagcaggcgatccgagcgacaatattccgggagttaaaggtatcggcgagaagacggcgctcaagctccttaaagaatgggggtcgttggagaacttgcttaagaatttagatcaggtcaaaccagagtcagtgcgtgagaagattcttgctcacctcgaagacctcaaattaagccgcgaattgtcccgtgtacgcaccgatttgccgctcgaagttgatttcggtcgccgccgcgaacctgactgggagggtcttaaagcgtttttagagcgtcttgaatttggttcgctcttgcatgaattcggccttttagaaagcccgttactggccgaagaagcaccttggccaccgcccgagggcgcgtttttaggttaccgtttgagtcgcccggaaccgatgtgggccgaattactggctcttgcagcgtctgcccagggacgtgtgtatcgcgcggaagaccctcatggtgcgctccgcggcctcttcgaagtccgtggactccttgccaaagacttagctgttgttgcattgcgcgaaggtcttgatttacctccgactgatgatccaatgcttcttgcgtacctcttggacccgtcaaacacgacgcccgaaggcgtagcccgtcgttacggcggcgagtggaccgaagatgcagcgaaacgcgcgttattggccgaacgtttgcacgaaaatttattaggacgtttgcaaggcgaggaacgtctcctctggctttacgaagaagtggagaaaccattgagtcgcgtgctcgcgcatatggaagctaccggtgtcaaattagacgtggcgtatttggagaatctcagccttgaagttgctgcccacatgcgccgcttggaggaagaagtattccgtttagcaggccgttcctttcgccttaactctcgcgatcagttagaacgtgtgttgttcgatgaacttggtctccctcctatcggcaagacagagaagaccggtaaacgtagcacttcagcggcggttttagaagctcttcgcgaagtccatcccattgtggacaagatcttgcagtaccgcgaaatggcgaaattgaaaggcacctatattgaccgtcttccggcattagtccacccgaaaacgggacgcctccatacccgcttcaaccaaacagccacggcgaccggtcgtttgtcctcctctgatccaaaccttcagaatattccagtacgtaccccattgggccagaagatccgccgtgcgtttgtagctgaggagggttggcgtttagtggccctcgattatcgtcaaattgaattacgtgtccttgcccatctttctggcgatgagaacctcatccgcgtgtttcaggaaggcaaagacattcacactcaaacggcaagctggatgtttggattatcagctgaagcgatcgatcctttgatgcgtcgtgcagcgaagaccatcaatttcggtgttctctacggtatgagtgcctttcgtttgtcgcaggaattaggcattccctatgaagaagctcaggcgttcattcagaaatactttcaaagctatcccaaagttaaagcatggatcgagaagactctccgtgaaggccgcacacgtggttacgtagagaccttatttggacgtcgccgctatgttcccgatttaaacgctcgcgtgaaaggcaagcgtgaagccgccgaacgcatggcgttcaacatgcctgtacagggcacggcagctgacctcatgaaacttgcaatggtgcgcctttttccacaattgcgtgaagttggtgcccgcatgctcttgcaggtccacgatgaactcttgttagaagcgccaaaagagcgtgcggaagaggtggcagccctcgcgaaagaagttatggaaggcgtgtggaagttagcggtgcctcttgaagtcgaagttggtattggcgaggattggctggctgccaaagga

SEQ ID NO: 5674 - protein, 841 aa, synthetic construct
  REGION 1..841: note = Variant of DNA polymerase I from Thermus sp. strain 2.9
MHHHHHHGGSGVLPVFEPKGRVLLVDGHHLAYRNFFALKGLTTSLGEPVQGVYGFAKSLLKALKEDGDVVIVVFDAKAPSFRHEAYEAYKAGRAPTPEDFPRQLALMKELVDLLGLERLEVPGFEADDVLATLAKKAEREGYEVQILTADRDLFQLLSPRISVLHPEGHRITPEWLWEKYGLRPEQWVDFRALAGDPSDNIPGVKGIGEKTALKLLKEWGSLENLLKNLDQVKPESVREKILAHLEDLKLSRELSRVRTDLPLEVDFGRRREPDWEGLKAFLERLEFGSLLHEFGLLESPLLAEEAPWPPPEGAFLGYRLSRPEPMWAELLALAASAQGRVYRAEDPHGALRGLFEVRGLLAKDLAVVALREGLDLPPTDDPMLLAYLLDPSNTTPEGVARRYGGEWTEDAAKRALLAERLHENLLGRLQGEERLLWLYEEVEKPLSRVLAHMEATGVKLDVAYLENLSLEVAAHMRRLEEEVFRLAGRSFRLNSRDQLERVLFDELGLPPIGKTEKTGKRSTSAAVLEALREVHPIVDKILQYREMAKLKGTYIDRLPALVHPKTGRLHTRFNQTATATGRLSSSDPNLQNIPVRTPLGQKIRRAFVAEEGWRLVALDYRQIELRVLAHLSGDENLIRVFQEGKDIHTQTASWMFGLSAEAIDPLMRRAAKTINFGVLYGMSAFRLSQELGIPYEEAQAFIQKYFQSYPKVKAWIEKTLREGRTRGYVETLFGRRRYVPDLNARVKGKREAAERMAFNMPVQGTAADLMKLAMVRLFPQLREVGARMLLQVHDELLLEAPKERAEEVAALAKEVMEGVWKLAVPLEVEVGIGEDWLAAKG

SEQ ID NO: 5675 - DNA, 2523 bp, synthetic construct
  misc_feature 1..2523: note = Variant of DNA polymerase I from Thermus sp. strain 2.9
  source 1..2523: mol_type = other DNA
atgcaccatcatcatcatcatggcggtagcggcgtgttaccggtgttcgagcctaaaggtcgcgtgcttctggttgatggccatcatctcgcgtatcgtaacttctttgccctgaaaggattaaccaccagcctgggcgagccggtacagggtgtctacggctttgcaaagtcgctcctgaaagctctgaaagaagacggtgatgtggtgattgttgtctttgatgcgaaagcgccaagttttcgccacgaagcgtacgaagcttacaaagccgggcgtgctccaacgccggaagactttcctcgccaattggcgcttatgaaggaattagtggatttgcttggcctcgaacgcttggaagttcccggtttcgaggcagacgacgtattagcgactctcgcaaagaaagccgaacgtgagggctatgaagtccagatcttgacagcagatcgcgatcttttccagcttttatctccgcgcatctcggtgttacacccggaagggcatcgtatcaccccggaatggctctgggagaaatatggtttgcgtcccgaacaatgggtggattttcgcgccttagcaggcgatccgagcgacaatattccgggagttaaaggtatcggcgagaagacggcgctcaagctccttaaagaatgggggtcgttggagaacttgcttaagaatttagatcaggtcaaaccagagtcagtgcgtgagaagattcttgctcacctcgaagacctcaaattaagccgcgaattgtcccgtgtacgcaccgatttgccgctcgaagttgatttcggtcgccgccgcgaacctgactgggagggtcttaaagcgtttttagagcgtcttgaatttggttcgctcttgcatgaattcggccttttagaaagcccgttactggccgaagaagcaccttggccaccgcccgagggcgcgtttttaggttaccgtttgagtcgcccggaaccgatgtgggccgaattactggctcttgcagcgtctgcccagggacgtgtgtatcgcgcggaagaccctcatggtgcgctccgcggcctcttcgaagtccgtggactccttgccaaagacttagctgttgttgcattgcgcgaaggtcttgatttacctccgactgatgatccaatgcttcttgcgtacctcttggacccgtcaaacacgacgcccgaaggcgtagcccgtcgttacggcggcgagtggaccgaagatgcagcgaaacgcgcgttattggccgaacgtttgcacgaaaatttattaggacgtttgcaaggcgaggaacgtctcctctggctttacgaagaagtggagaaaccattgagtcgcgtgctcgcgcatatggaagctaccggtgtcaaattagacgtggcgtatttggagaatctcagccttgaagttgctgcccacatgcgccgcttggaggaagaagtattccgtttagcaggccgttcctttcgccttaactctcgcgatcagttagaacgtgtgttgttcgatgaacttggtctccctcctatcggcaagacagagaagaccggtaaacgtagcacttcagcggcggttttagaagctcttcgcgaagtccatcccattgtggacaagatcttgcagtaccgcgaaatggcgaaattgaaaggcacctatattgaccgtcttccggcattagtccacccgaaaacgggacgcctccatacccgcttcaaccaaacagccacggcgaccggtcgtttgtcctcctctgatccaaaccttcagaatattccagtacgtaccccattgggccagaagatccgccgtgcgtttgtagctgaggagggttggcgtttagtggccctcgattatcgtcaaattgaattacgtgtccttgcccatctttctggcgatgagaacctcatccgcgtgtttcaggaaggcaaagacattcacactcaaacggcaagctggatgtttggattatcagctgaagcgatcgatcctttgatgcgtcgtgcagcgaagaccatcaatttcggtgttctctacggtatgagtgcctttcgtttgtcgcaggaattaggcattccctatgaagaagctcaggcgttcattcagaaatactttcaaagctatcccaaagttaaagcatggatcgagaagactctccgtgaaggccgcacacgtggttacgtagagaccttatttggacgtcgccgctatgttcccgatttaaacaggcgcgtgaaaggcaagcgtgaagccgccgaacgcatggcgttcaacatgcctgtacagggcacggcagctgacctcatgaaacttgcaatggtgcgcctttttccacaattgcgtgaagttggtgcccgcatgctcttgcaggtccacgatgaactcttgttagaagcgccaaaagagcgtgcggaagaggtggcagccctcgcgaaagaagttatggaaggcgtgtggcccttagcggtgcctcttgaagtcgaagttggtattggcgaggattggctggctgccaaagga

SEQ ID NO: 5676 - protein, 841 aa, synthetic construct
  REGION 1..841: note = Variant of DNA polymerase I from Thermus sp. strain 2.9
MHHHHHHGGSGVLPVFEPKGRVLLVDGHHLAYRNFFALKGLTTSLGEPVQGVYGFAKSLLKALKEDGDVVIVVFDAKAPSFRHEAYEAYKAGRAPTPEDFPRQLALMKELVDLLGLERLEVPGFEADDVLATLAKKAEREGYEVQILTADRDLFQLLSPRISVLHPEGHRITPEWLWEKYGLRPEQWVDFRALAGDPSDNIPGVKGIGEKTALKLLKEWGSLENLLKNLDQVKPESVREKILAHLEDLKLSRELSRVRTDLPLEVDFGRRREPDWEGLKAFLERLEFGSLLHEFGLLESPLLAEEAPWPPPEGAFLGYRLSRPEPMWAELLALAASAQGRVYRAEDPHGALRGLFEVRGLLAKDLAVVALREGLDLPPTDDPMLLAYLLDPSNTTPEGVARRYGGEWTEDAAKRALLAERLHENLLGRLQGEERLLWLYEEVEKPLSRVLAHMEATGVKLDVAYLENLSLEVAAHMRRLEEEVFRLAGRSFRLNSRDQLERVLFDELGLPPIGKTEKTGKRSTSAAVLEALREVHPIVDKILQYREMAKLKGTYIDRLPALVHPKTGRLHTRFNQTATATGRLSSSDPNLQNIPVRTPLGQKIRRAFVAEEGWRLVALDYRQIELRVLAHLSGDENLIRVFQEGKDIHTQTASWMFGLSAEAIDPLMRRAAKTINFGVLYGMSAFRLSQELGIPYEEAQAFIQKYFQSYPKVKAWIEKTLREGRTRGYVETLFGRRRYVPDLNRRVKGKREAAERMAFNMPVQGTAADLMKLAMVRLFPQLREVGARMLLQVHDELLLEAPKERAEEVAALAKEVMEGVWPLAVPLEVEVGIGEDWLAAKG

SEQ ID NO: 5677 - DNA, 2523 bp, synthetic construct
  misc_feature 1..2523: note = Variant of DNA polymerase I from Thermus sp. strain 2.9
  source 1..2523: mol_type = other DNA
atgcaccatcatcatcatcatggcggtagcggcgtgttaccggtgttcgagcctaaaggtcgcgtgcttctggttgatggccatcatctcgcgtatcgtaacttctttgccctgaaaggattaaccaccagcctgggcgagccggtacagggtgtctacggctttgcaaagtcgctcctgaaagctctgaaagaagacggtgatgtggtgattgttgtctttgatgcgaaagcgccaagttttcgccacgaagcgtacgaagcttacaaagccgggcgtgctccaacgccggaagactttcctcgccaattggcgcttatgaaggaattagtggatttgcttggcctcgaacgcttggaagttcccggtttcgaggcagacgacgtattagcgactctcgcaaagaaagccgaacgtgagggctatgaagtccagatcttgacagcagatcgcgatcttttccagcttttatctccgcgcatctcggtgttacacccggaagggcatcgtatcaccccggaatggctctgggagaaatatggtttgcgtcccgaacaatgggtggattttcgcgccttagcaggcgatccgagcgacaatattccgggagttaaaggtatcggcgagaagacggcgctcaagctccttaaagaatgggggtcgttggagaacttgcttaagaatttagatcaggtcaaaccagagtcagtgcgtgagaagattcttgctcacctcgaagacctcaaattaagccgcgaattgtcccgtgtacgcaccgatttgccgctcgaagttgatttcggtcgccgccgcgaacctgactgggagggtcttaaagcgtttttagagcgtcttgaatttggttcgctcttgcatgaattcggccttttagaaagcccgttactggccgaagaagcaccttggccaccgcccgagggcgcgtttttaggttaccgtttgagtcgcccggaaccgatgtgggccgaattactggctcttgcagcgtctgcccagggacgtgtgtatcgcgcggaagaccctcatggtgcgctccgcggcctcttcgaagtccgtggactccttgccaaagacttagctgttgttgcattgcgcgaaggtcttgatttacctccgactgatgatccaatgcttcttgcgtacctcttggacccgtcaaacacgacgcccgaaggcgtagcccgtcgttacggcggcgagtggaccgaagatgcagcgaaacgcgcgttattggccgaacgtttgcacgaaaatttaacgggacgtttgcaaggcgaggaacgtctcctctggctttacgaagaagtggagaaaccattgagtcgcgtgctcgcgcatatggaagctaccggtgtcaaattagacgtggcgtatttggagaatctcagccttgaagttgctgcccacatgcgccgcttggaggaagaagtattccgtttagcaggccgttcctttcgccttaactctcgcgatcagttagaacgtgtgttgttcgatgaacttggtctccctcctatcggcaagacagagaagaccggtaaacgtagcacttcagcggcggttttagaagctcttcgcgaagtccatcccattgtggacaagatcttgcagtaccgcgaaatggcgaaattgaaaggcacctatattgaccgtcttccggcattagtccacccgaaaacgggacgcctccatacccgcttcaaccaaacagccacggcgaccggtcgtttgtcctcctctgatccaaaccttcagaatattccagtacgtaccccattgggccagaagatccgccgtgcgtttgtagctgaggagggttggcgtttagtggccctcgattatcgtcaaattgaattacgtgtccttgcccatctttctggcgatgagaacctcatccgcgtgtttcaggaaggcaaagacattcacactcaaacggcaagctggatgtttggattatcagctgaagcgatcgatcctttgatgcgtcgtgcagcgaagaccatcaatttcggtgttctctacggtatgagtgcctttcgtttgtcgcaggaattaggcattccctatgaagaagctcaggcgttcattcagaaatactttcaaagctatcccaaagttaaagcatggatcgagaagactctccgtgaaggccgcacacgtggttacgtagagaccttatttggacgtcgccgctatgttcccgatttaaacgctcgcgtgaaaggcaagcgtgaagccgccgaacgcatggcgttcaacatgcctgtacagggcacggcagctgacctcatgaaacttgcaatggtgcgcctttttccacaattgcgtgaagttggtgcccgcatgctcttgcaggtccacgatgaactcttgttagaagcgccaaaagagcgtgcggaagaggtggcagccctcgcgaaagaagttatggaaggcgtgtggcccttagcggtgcctcttgaagtcgaagttggtattggcgaggattggctggctgccaaagga

SEQ ID NO: 5678 - protein, 841 aa, synthetic construct
  REGION 1..841: note = Variant of DNA polymerase I from Thermus sp. strain 2.9
MHHHHHHGGSGVLPVFEPKGRVLLVDGHHLAYRNFFALKGLTTSLGEPVQGVYGFAKSLLKALKEDGDVVIVVFDAKAPSFRHEAYEAYKAGRAPTPEDFPRQLALMKELVDLLGLERLEVPGFEADDVLATLAKKAEREGYEVQILTADRDLFQLLSPRISVLHPEGHRITPEWLWEKYGLRPEQWVDFRALAGDPSDNIPGVKGIGEKTALKLLKEWGSLENLLKNLDQVKPESVREKILAHLEDLKLSRELSRVRTDLPLEVDFGRRREPDWEGLKAFLERLEFGSLLHEFGLLESPLLAEEAPWPPPEGAFLGYRLSRPEPMWAELLALAASAQGRVYRAEDPHGALRGLFEVRGLLAKDLAVVALREGLDLPPTDDPMLLAYLLDPSNTTPEGVARRYGGEWTEDAAKRALLAERLHENLTGRLQGEERLLWLYEEVEKPLSRVLAHMEATGVKLDVAYLENLSLEVAAHMRRLEEEVFRLAGRSFRLNSRDQLERVLFDELGLPPIGKTEKTGKRSTSAAVLEALREVHPIVDKILQYREMAKLKGTYIDRLPALVHPKTGRLHTRFNQTATATGRLSSSDPNLQNIPVRTPLGQKIRRAFVAEEGWRLVALDYRQIELRVLAHLSGDENLIRVFQEGKDIHTQTASWMFGLSAEAIDPLMRRAAKTINFGVLYGMSAFRLSQELGIPYEEAQAFIQKYFQSYPKVKAWIEKTLREGRTRGYVETLFGRRRYVPDLNARVKGKREAAERMAFNMPVQGTAADLMKLAMVRLFPQLREVGARMLLQVHDELLLEAPKERAEEVAALAKEVMEGVWPLAVPLEVEVGIGEDWLAAKG

SEQ ID NO: 5679 - DNA, 2523 bp, synthetic construct
  misc_feature 1..2523: note = Variant of DNA polymerase I from Thermus sp. strain 2.9
  source 1..2523: mol_type = other DNA
atgcaccatcatcatcatcatggcggtagcggcgtgttaccggtgttcgagcctaaaggtcgcgtgcttctggttgatggccatcatctcgcgtatcgtaacttctttgccctgaaaggattaaccaccagcctgggcgagccggtacagggtgtctacggctttgcaaagtcgctcctgaaagctctgaaagaagacggtgatgtggtgattgttgtctttgatgcgaaagcgccaagttttcgccacgaagcgtacgaagcttacaaagccgggcgtgctccaacgccggaagactttcctcgccaattggcgcttatgaaggaattagtggatttgcttggcctcgaacgcttggaagttcccggtttcgaggcagacgacgtattagcgactctcgcaaagaaagccgaacgtgagggctatgaagtccagatcttgacagcagatcgcgatcttttccagcttttatctccgcgcatctcggtgttacacccggaagggcatcgtatcaccccggaatggctctgggagaaatatggtttgcgtcccgaacaatgggtggattttcgcgccttagcaggcgatccgagcgacaatattccgggagttaaaggtatcggcgagaagacggcgctcaagctccttaaagaatgggggtcgttggagaacttgcttaagaatttagatcaggtcaaaccagagtcagtgcgtgagaagattcttgctcacctcgaagacctcaaattaagccgcgaattgtcccgtgtacgcaccgatttgccgctcgaagttgatttccgccgccgccgcgaacctgactgggagggtcttaaagcgtttttagagcgtcttgaatttggttcgctcttgcatgaattcggccttttagaaagcccgttactggccgaagaagcaccttggccaccgcccgagggcgcgtttttaggttaccgtttgagtcgcccggaaccgatgtgggccgaattactggctcttgcagcgtctgcccagggacgtgtgtatcgcgcggaagaccctcatggtgcgctccgcggcctcttcgaagtccgtggactccttgccaaagacttagctgttgttgcattgcgcgaaggtcttgatttacctccgactgatgatccaatgcttcttgcgtacctcttggacccgtcaaacacgacgcccgaaggcgtagcccgtcgttacggcggcgagtggaccgaagatgcagcgaaacgcgcgttattggccgaacgtttgcacgcaaatttattaggacgtttgcaaggcgaggaacgtctcctctggctttacgaagaagtggagaaaccattgagtcgcgtgctcgcgcatatggaagctaccggtgtcaaattagacgtggcgtatttggagaatcttcaccttgaagttgctgcccacatgcgccgcttggaggaagaagtattccgtttagcaggccgttcctttcgccttaactctcgcgatcagttagaacgtgtgttgttcgatgaacttggtctccctcctatcggcaagacagagaagaccggtaaacgtagcacttcagcggcggttttagaagctcttcgcgaagtccatcccattgtggacaagatcttgcagtaccgcgaaatggcgaaattgaaaggcacctatattgaccgtcttccggcattagtccacccgaaaacgggacgcctccatacccgcttcaaccaaacagccacggcgaccggtcgtttgtcctcctctgatccaaaccttcagaatattccagtacgtaccccattgggccagaagatccgccgtgcgtttgtagctgaggagggttggcgtttagtggccctcgattatcgtcaaattgaattacgtgtccttgcccatctttctggcgatgagaacctcatccgcgtgtttcaggaaggcaaagacattcacactcaaacggcaagctggatgtttggattatcagctgaagcgatcgatcctttgatgcgtcgtgcagcgaagaccatcaatttcggtgttctctacggtatgagtgcctttcgtttgtcgcaggaattaggcattccctatgaagaagctcaggcgttcattcagaaatactttcaaagctatcccaaagttaaagcatggatcgagaagactctccgcgaaggccgcacacgtggttacgtagagaccttatttggacgtcgccgctatgttcccgatttaaacgctcgcgtgaaaggcaagcgtgaagccgccgaacgcatggcgttcaacatgcctgtacagggcacggcagctgacctcatgaaacttgcaatggtgcgcctttttccacaattgcgtgaagttggtgcccgcatgctcttgcaggtccacgatgaactcttgttagaagcgccaaaagagcgtgcggaagaggtggcagccctcgcgaaagaagttatggaaggcgtgtggcccttagcggtgcctcttgaagtcgaagttggtattggcgaggattggctggctgccaaagga

SEQ ID NO: 5680 - protein, 841 aa, synthetic construct
  REGION 1..841: note = Variant of DNA polymerase I from Thermus sp. strain 2.9
MHHHHHHGGSGVLPVFEPKGRVLLVDGHHLAYRNFFALKGLTTSLGEPVQGVYGFAKSLLKALKEDGDVVIVVFDAKAPSFRHEAYEAYKAGRAPTPEDFPRQLALMKELVDLLGLERLEVPGFEADDVLATLAKKAEREGYEVQILTADRDLFQLLSPRISVLHPEGHRITPEWLWEKYGLRPEQWVDFRALAGDPSDNIPGVKGIGEKTALKLLKEWGSLENLLKNLDQVKPESVREKILAHLEDLKLSRELSRVRTDLPLEVDFRRRREPDWEGLKAFLERLEFGSLLHEFGLLESPLLAEEAPWPPPEGAFLGYRLSRPEPMWAELLALAASAQGRVYRAEDPHGALRGLFEVRGLLAKDLAVVALREGLDLPPTDDPMLLAYLLDPSNTTPEGVARRYGGEWTEDAAKRALLAERLHANLLGRLQGEERLLWLYEEVEKPLSRVLAHMEATGVKLDVAYLENLHLEVAAHMRRLEEEVFRLAGRSFRLNSRDQLERVLFDELGLPPIGKTEKTGKRSTSAAVLEALREVHPIVDKILQYREMAKLKGTYIDRLPALVHPKTGRLHTRFNQTATATGRLSSSDPNLQNIPVRTPLGQKIRRAFVAEEGWRLVALDYRQIELRVLAHLSGDENLIRVFQEGKDIHTQTASWMFGLSAEAIDPLMRRAAKTINFGVLYGMSAFRLSQELGIPYEEAQAFIQKYFQSYPKVKAWIEKTLREGRTRGYVETLFGRRRYVPDLNARVKGKREAAERMAFNMPVQGTAADLMKLAMVRLFPQLREVGARMLLQVHDELLLEAPKERAEEVAALAKEVMEGVWPLAVPLEVEVGIGEDWLAAKG

SEQ ID NO: 5681 - DNA, 2523 bp, synthetic construct
  misc_feature 1..2523: note = Variant of DNA polymerase I from Thermus sp. strain 2.9
  source 1..2523: mol_type = other DNA
atgcaccatcatcatcatcatggcggtagcggcgtgttaccggtgttcgagcctaaaggtcgcgtgcttctggttgatggccatcatctcgcgtatcgtaacttctttgccctgaaaggattaaccaccagcctgggcgagccggtacagggtgtctacggctttgcaaagtcgctcctgaaagctctgaaagaagacggtgatgtggtgattgttgtctttgatgcgaaagcgccaagttttcgccacgaagcgtacgaagcttacaaagccgggcgtgctccaacgccggaagactttcctcgccaattggcgcttatgaaggaattagtggatttgcttggcctcgaacgcttggaagttcccggtttcgaggcagacgacgtattagcgactctcgcaaagaaagccgaacgtgagggctatgaagtccagatcttgacagcagatcgcgatcttttccagcttttatctccgcgcatctcggtgttacacccggaagggcatcgtatcaccccggaatggctctgggagaaatatggtttgcgtcccgaacaatgggtggattttcgcgccttagcaggcgatccgagcgacaatattccgggagttaaaggtatcggcgagaagacggcgctcaagctccttaaagaatgggggtcgttggagaacttgcttaagaatttagatcaggtcaaaccagagtcagtgcgtgagaagattcttgctcacctcgaagacctcaaattaagccgcgaattgtcccgtgtacgcaccgatttgccgctcgaagttgatttcggtcgccgccgcgaacctgactgggagggtcttaaagcgtttttagagcgtcttgaatttggttcgctcttgcatgaattcggccttttagaaagcccgttactggccgaagaagcaccttggccaccgcccgagggcgcgtttttaggttaccgtttgagtcgcccggaaccgatgtgggccgaattactggctcttgcagcgtctgcccagggacgtgtgtatcgcgcggaagaccctcatggtgcgctccgcggcctcttcgaagtccgtaccctccttgccaaagacttagctgttgttgcattgcgcgaaggtcttgatttacctccgactgatgatccaatgcttcttgcgtacctcttggacccgtcaaacacgacgcccgaaggcgtagcccgtcgttacggcggcgagtggaccgaagatgcagcgaaacgcgcgttattggccgaacgtttgcacgaaaatttattaggacgtttgcaaggcgaggaacgtctcctctggctttacgaagaagtggagaaaccattgagtcgcgtgctcgcgcatatggaagctaccggtgtcaaattagacgtggcgtatttggagaatctcctgcttgaagttgctgcccacatgcgccgcttggaggaagaagtattccgtttagcaggccgttcctttcgccttaactctcgcgatcagttagaacgtgtgttgttcgatgaacttggtctccctcctatcggcaagacagagaagaccggtaaacgtagcacttcagcggcggttttagaagctcttcgcgaagtccatcccattgtggacaagatcttgcagtaccgcgaaatggcgaaattgaaaggcacctatattgaccgtcttccggcattagtccacccgaaaacgggacgcctccatacccgcttcaaccaaacagccacggcgaccggtcgtttgtcctcctctgatccaaaccttcagaatattccagtacgtaccccattgggccagaagatccgccgtgcgtttgtagctgagaagggttggcgtttagtggccctcgattatcgtcaaattgaattacgtgtccttgcccatctttctggcgatgagaacctcatccgcgtgtttcaggaaggcaaagacattcacactcaaacggcaagctggatgtttggattatcagctgaagcgatcgatcctttgatgcgtcgtgcagcgaagaccatcaatttcggtgttctctacggtatgagtgcctttcgtttgtcgcaggaattaggcattccctatgaagaagctcaggcgttcattcagaaatactttcaaagctatcccaaagttaaagcatggatcgagaagactctccgtgaaggccgcacacgtggttacgtagagaccttatttggacgtcgccgctatgttcccgatttaaacgctcgcgtgaaaggcaagcgtgaagccgccgaacgcatggcgttcaacatgcctgtacagggcacggcagctgacctcatgaaacttgcaatggtgcgcctttttccacaattgcgtgaagttggtgcccgcatgctgttgcaggtccacgatgaactcttgttagaagcgccaaaagagcgtgcggaagaggtggcagccctcgcgaaagaagttatggaaggcgtgtggcccttagcggtgcctcttgaagtcgaagttggtattggcgaggattggctggctgccaaagga

SEQ ID NO: 5682 - protein, 841 aa, synthetic construct
  REGION 1..841: note = Variant of DNA polymerase I from Thermus sp. strain 2.9
MHHHHHHGGSGVLPVFEPKGRVLLVDGHHLAYRNFFALKGLTTSLGEPVQGVYGFAKSLLKALKEDGDVVIVVFDAKAPSFRHEAYEAYKAGRAPTPEDFPRQLALMKELVDLLGLERLEVPGFEADDVLATLAKKAEREGYEVQILTADRDLFQLLSPRISVLHPEGHRITPEWLWEKYGLRPEQWVDFRALAGDPSDNIPGVKGIGEKTALKLLKEWGSLENLLKNLDQVKPESVREKILAHLEDLKLSRELSRVRTDLPLEVDFGRRREPDWEGLKAFLERLEFGSLLHEFGLLESPLLAEEAPWPPPEGAFLGYRLSRPEPMWAELLALAASAQGRVYRAEDPHGALRGLFEVRTLLAKDLAVVALREGLDLPPTDDPMLLAYLLDPSNTTPEGVARRYGGEWTEDAAKRALLAERLHENLLGRLQGEERLLWLYEEVEKPLSRVLAHMEATGVKLDVAYLENLLLEVAAHMRRLEEEVFRLAGRSFRLNSRDQLERVLFDELGLPPIGKTEKTGKRSTSAAVLEALREVHPIVDKILQYREMAKLKGTYIDRLPALVHPKTGRLHTRFNQTATATGRLSSSDPNLQNIPVRTPLGQKIRRAFVAEKGWRLVALDYRQIELRVLAHLSGDENLIRVFQEGKDIHTQTASWMFGLSAEAIDPLMRRAAKTINFGVLYGMSAFRLSQELGIPYEEAQAFIQKYFQSYPKVKAWIEKTLREGRTRGYVETLFGRRRYVPDLNARVKGKREAAERMAFNMPVQGTAADLMKLAMVRLFPQLREVGARMLLQVHDELLLEAPKERAEEVAALAKEVMEGVWPLAVPLEVEVGIGEDWLAAKG

SEQ ID NO: 5683 - DNA, 2523 bp, synthetic construct
  misc_feature 1..2523: note = Variant of DNA polymerase I from Thermus sp. strain 2.9
  source 1..2523: mol_type = other DNA
atgcaccatcatcatcatcatggcggtagcggcgtgttaccggtgttcgagcctaaaggtcgcgtgcttctggttgatggccatcatctcgcgtatcgtaacttctttgccctgaaaggattaaccaccagcctgggcgagccggtacagggtgtctacggctttgcaaagtcgctcctgaaagctctgaaagaagacggtgatgtggtgattgttgtctttgatgcgaaagcgccaagttttcgccacgaagcgtacgaagcttacaaagccgggcgtgctccaacgccggaagactttcctcgccaattggcgcttatgaaggaattagtggatttgcttggcctcgaacgcttggaagttcccggtttcgaggcagacgacgtattagcgactctcgcaaagaaagccgaacgtgagggctatgaagtccagatcttgacagcagatcgcgatcttttccagcttttatctccgcgcatctcggtgttacacccggaagggcatcgtatcaccccggaatggctctgggagaaatatggtttgcgtcccgaacaatgggtggattttcgcgccttagcaggcgatccgagcgacaatattccgggagttaaaggtatcggcgagaagacggcgctcaagctccttaaagaatgggggtcgttggagaacttgcttaagaatttagatcaggtcaaaccagagtcagtgcgtgagaagattcttgctcacctcgaagacctcaaattaagccgcgaattgtcccgtgtacgcaccgatttgccgctcgaagttgatttcggtcgccgccgcgaacctgactgggagggtcttaaagcgtttttagagcgtcttgaatttggttcgctcttgcatgaattcggccttttagaaagcccgttactggccgaagaagcaccttggccaccgcccgagggcgcgtttttaggttaccgtttgagtcgcccggaaccgatgtgggccgaattactggctcttgcagcgtctgcccagggacgtgtgtatcgcgcggaagaccctcatggtgcgctccgcggcctcttcgaagtccgtaccctccttgccaaagacttagctgttgttgcattgcgcgaaggtcttgatttacctccgactgatgatccaatgcttcttgcgtacctcttggacccgtcaaacacgacgcccgaaggcgtagcccgtcgttacggcggcgagtggaccgaagatgcagccaaacgcgcgttattggccgaacgtttgcacgaaaatttattaggacgtttgcaaggcgaggaacgtctcctctggctttacgaagaagtggagaaaccattgagtcgcgtgctcgcgcatatggaagctaccggtgtcaaattagacgtggcgtatttggagaatctcagccttgaagttgctgcccacatgcgccgcttggaggaagaagtattccgtttagcaggccgttcctttcgccttaactctcgcgatcagttagaacgtgtgttgttcgatgaacttggtctccctcctatcggcaagacagagaagaccggtaaacgtagcacttcagcggcggttttagaagctcttcgcgaagtccatcccattgtggacaagatcttgcagtaccgcgaaatggcgaaattgaaaggcacctatattgaccgtcttccggcattagtccacccgaaaacgggacgcctccatacccgcttcaaccaaacagccacggcgaccggtcgtttgtcctcctctgatccaaaccttcagaatattccagtacgtacctttttgggccagaagatccgccgtgcgtttgtagctgaggagggttggcgtttagtggccctcgattatcgtcaaattgaattacgtgtccttgcccatctttctggcgatgagaacctcatccgcgtgtttcaggaaggcaaagacattcacactcaaacggcaagctggatgtttggattatcagctgaagcgatcgatcctttgatgcgtcgtgcagcgaagaccatcaatttcggtgttctctacggtatgagtgcctttcgtttgtcgcaggaattaggcattccctatgaagaagctcagggtttcattcagaaatactttcaaagctatcccaaagttaaagcatggatcgagaagactctccgtgaaggccgcacacgtggttacgtagagaccttatttggacgtcgccgctatgttcccgatttaaacggtcgcgtgaaaggcaagcgtgaagccgccgaacgcatggcgttcaacatgcctgtacagggcacggcagctgacctcatgaaacttgcaatggtgcgcctttttccacaattgcgtgaagttggtgcccgcatgctgttgcaggtccacgatgaactcttgttagaagcgccaaaagagcgtgcggaagaggtggcagccctcgcgaaagaagttatggaaggcgtgtggcccttagcggtgcctcttgaagtcgaagttggtattggcgaggattggctggctgccaaagga

SEQ ID NO: 5684 - protein, 841 aa, synthetic construct
  REGION 1..841: note = Variant of DNA polymerase I from Thermus sp. strain 2.9
MHHHHHHGGSGVLPVFEPKGRVLLVDGHHLAYRNFFALKGLTTSLGEPVQGVYGFAKSLLKALKEDGDVVIVVFDAKAPSFRHEAYEAYKAGRAPTPEDFPRQLALMKELVDLLGLERLEVPGFEADDVLATLAKKAEREGYEVQILTADRDLFQLLSPRISVLHPEGHRITPEWLWEKYGLRPEQWVDFRALAGDPSDNIPGVKGIGEKTALKLLKEWGSLENLLKNLDQVKPESVREKILAHLEDLKLSRELSRVRTDLPLEVDFGRRREPDWEGLKAFLERLEFGSLLHEFGLLESPLLAEEAPWPPPEGAFLGYRLSRPEPMWAELLALAASAQGRVYRAEDPHGALRGLFEVRTLLAKDLAVVALREGLDLPPTDDPMLLAYLLDPSNTTPEGVARRYGGEWTEDAAKRALLAERLHENLLGRLQGEERLLWLYEEVEKPLSRVLAHMEATGVKLDVAYLENLSLEVAAHMRRLEEEVFRLAGRSFRLNSRDQLERVLFDELGLPPIGKTEKTGKRSTSAAVLEALREVHPIVDKILQYREMAKLKGTYIDRLPALVHPKTGRLHTRFNQTATATGRLSSSDPNLQNIPVRTFLGQKIRRAFVAEEGWRLVALDYRQIELRVLAHLSGDENLIRVFQEGKDIHTQTASWMFGLSAEAIDPLMRRAAKTINFGVLYGMSAFRLSQELGIPYEEAQGFIQKYFQSYPKVKAWIEKTLREGRTRGYVETLFGRRRYVPDLNGRVKGKREAAERMAFNMPVQGTAADLMKLAMVRLFPQLREVGARMLLQVHDELLLEAPKERAEEVAALAKEVMEGVWPLAVPLEVEVGIGEDWLAAKG

SEQ ID NO: 5685 - DNA, 2523 bp, synthetic construct
  misc_feature 1..2523: note = Variant of DNA polymerase I from Thermus sp. strain 2.9
  source 1..2523: mol_type = other DNA
atgcaccatcatcatcatcatggcggtagcggcgtgttaccggtgttcgagcctaaaggtcgcgtgcttctggttgatggccatcatctcgcgtatcgtaacttctttgccctgaaaggattaaccaccagcctgggcgagccggtacagggtgtctacggctttgcaaagtcgctcctgaaagctctgaaagaagacggtgatgtggtgattgttgtctttgatgcgaaagcgccaagttttcgccacgaagcgtacgaagcttacaaagccgggcgtgctccaacgccggaagactttcctcgccaattggcgcttatgaaggaattagtggatttgcttggcctcgaacgcttggaagttcccggtttcgaggcagacgacgtattagcgactctcgcaaagaaagccgaacgtgagggctatgaagtccagatcttgacagcagatcgcgatcttttccagcttttatctccgcgcatctcggtgttacacccggaagggcatcgtatcaccccggaatggctctgggagaaatatggtttgcgtcccgaacaatgggtggattttcgcgccttagcaggcgatccgagcgacaatattccgggagttaaaggtatcggcgagaagacggcgctcaagctccttaaagaatgggggtcgttggagaacttgcttaagaatttagatcaggtcaaaccagagtcagtgcgtgagaagattcttgctcacctcgaagacctcaaattaagccgcgaattgtcccgtgtacgcaccgatttgccgctcgaagttgatttcggtcgccgccgcgaacctgactgggagggtcttaaagcgtttttagagcgtcttgaatttggttcgctcttgcatgaattcggccttttagaaagcccgttactggccgaagaagcaccttggccaccgcccgagggcgcgtttttaggttaccgtttgagtcgcccggaaccgatgtgggccgaattactggctcttgcagcgtctgcccagggacgtgtgtatcgcgcggaagaccctcatggtgcgctccgcggcctcttcgaagtccgtggactccttgccaaagacttagctgttgttgcattgcgcgaaggtcttgatttacctccgactgatgatccaatgcttcttgcgtacctcttggacccgtcaaacacgacgcccgaaggcgtagcccgtcgttacggcggcgagtggaccgaagatgcagcgaaacgcgcgttattggccgaacgtttgcacgaaaatttattaggacgtttgcaaggcgaggaacgtctcctctggctttacgaagaagtggagaaaccattgagtcgcgtgctcgcgcatatggaagctaccggtgtcaaattagacgtggcgtatttggagaatcttcaccttgcggttgctgcccacatgcgccgcttggaggaagaagtattccgtttagcaggccgttcctttcgccttaactctcgcgatcagttagaacgtgtgttgttcgatgaacttggtctccctcctatcggcaagacagagaagaccggtaaacgtagcacttcagcggcggttttagaagctcttcgcgaagtccatcccattgtggacaagatcttgcagtaccgcgaaatggcgaaattgaaaggcacctatattgaccgtcttccggcattagtccacccgaaaacgggacgcctccatacccgcttcaaccaaacagccacggcgaccggtcgtttgtcctcctctgatccaaaccttcagaatattccagtacgtaccccattgggccagaagatccgccgtgcgtttgtagctgaggagggttggcgtttagtggccctcgattatcgtcaaattgaattacgtgtccttgcccatctttctggcgatgagaacctcatccgcgtgtttcaggaaggcaaagacattcacactcaaacggcaagctggatgtttggattatcagctgaagcgatcgatcctttgatgcgtcgtgcagcgaagaccatcaatttcggtgttctctacggtatgagtgcctttcgtttgtcgcaggaattaggcattccctatgaagaagctcaggcgttcattcagaaatactttcaaagctatcccaaagttaaagcatggatcgagaagactctccgtgaaggccgcacacgtggttacgtagagaccttatttggacgtcgccgctatgttcccgatttaaacgctcgcgtgaaaggcaagcgtgaagccgccgaacgcatggcgttcaacatgcctgtacagggcacggcagctgacctcatgaaacttgcaatggtgcgcctttttccacaattgcgtgaagttggtgcccgcatgctcttgcaggtccacgatgaactcttgttagaagcgccaaaagagcgtgcggaagaggtggcagccctcgcgaaagaagttatggaaggcgtgtggcccttagcggtgcctcttgaagtcgaagttggtattggcgaggattggctggctgccaaagga

SEQ ID NO: 5686 - protein, 841 aa, synthetic construct
  REGION 1..841: note = Variant of DNA polymerase I from Thermus sp. strain 2.9
MHHHHHHGGSGVLPVFEPKGRVLLVDGHHLAYRNFFALKGLTTSLGEPVQGVYGFAKSLLKALKEDGDVVIVVFDAKAPSFRHEAYEAYKAGRAPTPEDFPRQLALMKELVDLLGLERLEVPGFEADDVLATLAKKAEREGYEVQILTADRDLFQLLSPRISVLHPEGHRITPEWLWEKYGLRPEQWVDFRALAGDPSDNIPGVKGIGEKTALKLLKEWGSLENLLKNLDQVKPESVREKILAHLEDLKLSRELSRVRTDLPLEVDFGRRREPDWEGLKAFLERLEFGSLLHEFGLLESPLLAEEAPWPPPEGAFLGYRLSRPEPMWAELLALAASAQGRVYRAEDPHGALRGLFEVRGLLAKDLAVVALREGLDLPPTDDPMLLAYLLDPSNTTPEGVARRYGGEWTEDAAKRALLAERLHENLLGRLQGEERLLWLYEEVEKPLSRVLAHMEATGVKLDVAYLENLHLAVAAHMRRLEEEVFRLAGRSFRLNSRDQLERVLFDELGLPPIGKTEKTGKRSTSAAVLEALREVHPIVDKILQYREMAKLKGTYIDRLPALVHPKTGRLHTRFNQTATATGRLSSSDPNLQNIPVRTPLGQKIRRAFVAEEGWRLVALDYRQIELRVLAHLSGDENLIRVFQEGKDIHTQTASWMFGLSAEAIDPLMRRAAKTINFGVLYGMSAFRLSQELGIPYEEAQAFIQKYFQSYPKVKAWIEKTLREGRTRGYVETLFGRRRYVPDLNARVKGKREAAERMAFNMPVQGTAADLMKLAMVRLFPQLREVGARMLLQVHDELLLEAPKERAEEVAALAKEVMEGVWPLAVPLEVEVGIGEDWLAAKG

SEQ ID NO: 5687 - DNA, 2523 bp, synthetic construct
  misc_feature 1..2523: note = Variant of DNA polymerase I from Thermus sp. strain 2.9
  source 1..2523: mol_type = other DNA
atgcaccatcatcatcatcatggcggtagcggcgtgttaccggtgttcgagcctaaaggtcgcgtgcttctggttgatggccatcatctcgcgtatcgtaacttctttgccctgaaaggattaaccaccagcctgggcgagccggtacagggtgtctacggctttgcaaagtcgctcctgaaagctctgaaagaagacggtgatgtggtgattgttgtctttgatgcgaaagcgccaagttttcgccacgaagcgtacgaagcttacaaagccgggcgtgctccaacgccggaagactttcctcgccaattggcgcttatgaaggaattagtggatttgcttggcctcgaacgcttggaagttcccggtttcgaggcagacgacgtattagcgactctcgcaaagaaagccgaacgtgagggctatgaagtccagatcttgacagcagatcgcgatcttttccagcttttatctccgcgcatctcggtgttacacccggaagggcatcgtatcaccccggaatggctctgggagaaatatggtttgcgtcccgaacaatgggtggattttcgcgccttagcaggcgatccgagcgacaatattccgggagttaaaggtatcggcgagaagacggcgctcaagctccttaaagaatgggggtcgttggagaacttgcttaagaatttagatcaggtcaaaccagagtcagtgcgtgagaagattcttgctcacctcgaagacctcaaattaagccgcgaattgtcccgtgtacgcaccgatttgccgctcgaagttgatttcggtcgccgccgcgaacctgactgggagggtcttaaagcgtttttagagcgtcttgaatttggttcgctcttgcatgaattcggccttttagaaagcccgttactggccgaagaagcaccttggccaccgcccgagggcgcgtttttaggttaccgtttgagtcgcccggaaccgatgtgggccgaattactggctcttgcagcgtctgcccagggacgtgtgtatcgcgcggaagaccctcatggtgcgctccgcggcctcttcgaagtccgtggactccttgccaaacgtttagctgttgttgcattgcgcgaaggtcttgatttacctccgactgatgatccaatgcttcttgcgtacctcttggacccgtcaaacacgacgcccgaaggcgtagcccgtcgttacggcggcgagtggaccgaagatgcagcgaaacgcgcgttattggccgaacgtttgcacgaaaatttattaggacgtttgcaaggcgaggaacgtctcctctggctttacgaagaagtggagaaaccattgagtcgcgtgctcgcgcatatggaagctaccggtgtcaaattagacgtggcgtatttggagaatctcagccttgaagttgctgcccacatgcgccgcttggaggaagaagtattccgtttagcaggccgttcctttcgccttaactctcgcgatcagttagaacgtgtgttgttcgatgaacttggtctccctcctatcggcaagacagagaagaccggtaaacgtagcacttcagcggcggttttagaagctcttcgcgaagtccatcccattgtggacaagatcttgcagtaccgcgaaatggcgaaattgaaaggcacctatattgaccgtcttccggcattagtccacccgaaaacgggacgcctccatacccgcttcaaccaaacagccacggcgaccggtcgtttgtcctcctctgatccaaaccttcagaatattccagtacgtaccccattgggccagaagatccgccgtgcgtttgtagctgaggagggttggcgtttagtggccctcgattatcgtcaaattgaattacgtgtccttgcccatctttctggcgatgagaacctcatccgcgtgtttcaggaaggcaaagacattcacactcaaacggcaagctggatgtttggattatcagctgaagcgatcgatcctttgatgcgtcgtgcagcgaagaccatcaatttcggtgttctctacggtatgagtgcctttcgtttgtcgcaggaattaggcattccctatgaagaagctcaggcgttcattcagaaatactttcaaagctatcccaaagttaaagcatggatcgagaagactctccgtgaaggccgcacacgtggttacgtagagaccttatttggacgtcgccgctatgttcccgatttaaacgctcgcgtgaaaggcaagcgtgaagccgccgaacgcatggcgttcaacatgcctgtacagggcacggcagctgacctcatgaaacttgcaatggtgcgcctttttccacaattgcgtgaagttggtgcccgcatgctcttgcaggtccacgatgaactcttgttagaagcgccaaaagagcgtgcggaagaggtggcagccctcgcgaaagaagttatggaaggcgtgtggcccttagcggtgcctcttgaagtcgaagttggtattggcgaggattggctggctgccaaagga

SEQ ID NO: 5688 - protein, 841 aa, synthetic construct
  REGION 1..841: note = Variant of DNA polymerase I from Thermus sp. strain 2.9
MHHHHHHGGSGVLPVFEPKGRVLLVDGHHLAYRNFFALKGLTTSLGEPVQGVYGFAKSLLKALKEDGDVVIVVFDAKAPSFRHEAYEAYKAGRAPTPEDFPRQLALMKELVDLLGLERLEVPGFEADDVLATLAKKAEREGYEVQILTADRDLFQLLSPRISVLHPEGHRITPEWLWEKYGLRPEQWVDFRALAGDPSDNIPGVKGIGEKTALKLLKEWGSLENLLKNLDQVKPESVREKILAHLEDLKLSRELSRVRTDLPLEVDFGRRREPDWEGLKAFLERLEFGSLLHEFGLLESPLLAEEAPWPPPEGAFLGYRLSRPEPMWAELLALAASAQGRVYRAEDPHGALRGLFEVRGLLAKRLAVVALREGLDLPPTDDPMLLAYLLDPSNTTPEGVARRYGGEWTEDAAKRALLAERLHENLLGRLQGEERLLWLYEEVEKPLSRVLAHMEATGVKLDVAYLENLSLEVAAHMRRLEEEVFRLAGRSFRLNSRDQLERVLFDELGLPPIGKTEKTGKRSTSAAVLEALREVHPIVDKILQYREMAKLKGTYIDRLPALVHPKTGRLHTRFNQTATATGRLSSSDPNLQNIPVRTPLGQKIRRAFVAEEGWRLVALDYRQIELRVLAHLSGDENLIRVFQEGKDIHTQTASWMFGLSAEAIDPLMRRAAKTINFGVLYGMSAFRLSQELGIPYEEAQAFIQKYFQSYPKVKAWIEKTLREGRTRGYVETLFGRRRYVPDLNARVKGKREAAERMAFNMPVQGTAADLMKLAMVRLFPQLREVGARMLLQVHDELLLEAPKERAEEVAALAKEVMEGVWPLAVPLEVEVGIGEDWLAAKG

SEQ ID NO: 5689 - DNA, 2523 bp, synthetic construct
  misc_feature 1..2523: note = Variant of DNA polymerase I from Thermus sp. strain 2.9
  source 1..2523: mol_type = other DNA
atgcaccatcatcatcatcatggcggtagcggcgtgttaccggtgttcgagcctaaaggtcgcgtgcttctggttgatggccatcatctcgcgtatcgtaacttctttgccctgaaaggattaaccaccagccgcggcgagccggtacagggtgtctacggctttgcaaagtcgctcctgaaagctctgaaagaagacggtgatgtggtgattgttgtctttgatgcgaaagcgccaagttttcgccacgaagcgtacgaagcttacaaagccgggcgtgctccaacgccggaagactttcctcgccaattggcgcttatgaaggaattagtggatttgcttggcctcgaacgcttggaagttcccggtttcgaggcagacgacgtattagcgactctcgcaaagaaagccgaacgtgagggctatgaagtccagatcttgacagcagatcgcgatcttttccagcttttatctccgcgcatctcggtgttacacccggaagggcatcgtatcaccccggaatggctctgggagaaatatggtttgcgtcccgaacaatgggtggattttcgcgccttagcaggcgatccgagcgacaatattccgggagttaaaggtatcggcgagaagacggcgctcaagctccttaaagaatgggggtcgttggagaacttgcttaagaatttagatcaggtcaaaccagagtcagtgcgtgagaagattcttgctcacctcgaagacctcaaattaagccgcgaattgtcccgtgtacgcaccgatttgccgctcgaagttgatttccgccgccgccgcgaacctgactgggagggtcttaaagcgtttttagagcgtcttgaatttggttcgctcttgcatgaattcggccttttagaaagcccgttacctgccgaagaagcaccttggccaccgcccgagggcgcgtttttaggttaccgtttgagtcgcccggaaccgatgtgggccgaattactggctcttgcagcgtctgcccagggacgtgtgtatcgcgcggaagaccctcatggtgcgctccgcggcctcttcgaagtccgtggactccttgccaaagacttagctgttgttgcattgcgcgaaggtcttgatttacctccgactgatgatccaatgcttcttgcgtacctcttggacccgtcaaacacgacgcccgaaggcgtagcccgtcgttacggcggcgagtggaccgaagatgcagcgaaacgcgcgttattggccgaacgtttgcacgaaaatttattaggacgtttgcaaggcgaggaacgtctcctctggctttacgaagaagtggagaaaccattgagtcgcgtgctcgcgcatatggaagctaccggtgtcaaattagacgtggcgtatttggaggcccttagccttgaagttgctgcccacatgcgccgcttggaggaagaagtattccgtttagcaggccgctcctttcgccttaactctcgcgatcagttagaacgtgtgttgttcgatgaacttggtctccctcctatcggcaagacagagaagaccggtaaacgtagcacttcagcggcggttttagaagctcttcgcgaagtccatcccattgtggacaagatcttgcagtaccgcgaaatggcgaaattgaaaggcacctatattgaccgtcttccggcattagtccacccgaaaacgggacgcctccatacccgcttcaaccaaacagccacggcgaccggtcgtttgtccagttctgatccaaaccttcagaatattccagtacgtaccccattgggccagaagatccgccgtgcgtttgtagctgaggagggttggcgtttagtggccctcgattatagtcaaattgaattacgtgtccttgcccatctttctggcgatgagaacctcatccgcgtgtttcaggaaggcaaagacattcacactcaaacggcaagctggatgtttggattatcagctgaagcgatcgatcctttgatgcgtcgtgcagcgaagaccatcaatttcggtgttctctacggtatgagtgcctttcgtttgtcgcaggaattaggcattccctatgaagaagctcaggcgttcattcagaaatactttcaaagctatcccaaagttaaagcatggatcgagaagactctccgcgaaggccgcacacgtggttacgtagagaccttatttggacgtcgccgctatgttcccgatttaaacgctcgcgtgaaaagcgtacgtgaagccgccgaacgcatggcgttcaacatgcctgtacagggcacggcagctgacctcatgaaacttgcaatggtgcgcctttttccacaattgcgtgaagttggtgcccgcatgctcttgcaggtccacgatgaactcttgttagaagcgccaaaagagcgtgcggaagaggtggcagccctcgcgaaagaagttatggaaggcgtgtggcccttagcggtgcctcttgaagtcgaagttggtattggcgaggattggctggctgccaaagga

SEQ ID NO: 5690 - protein, 841 aa, synthetic construct
  REGION 1..841: note = Variant of DNA polymerase I from Thermus sp. strain 2.9
MHHHHHHGGSGVLPVFEPKGRVLLVDGHHLAYRNFFALKGLTTSRGEPVQGVYGFAKSLLKALKEDGDVVIVVFDAKAPSFRHEAYEAYKAGRAPTPEDFPRQLALMKELVDLLGLERLEVPGFEADDVLATLAKKAEREGYEVQILTADRDLFQLLSPRISVLHPEGHRITPEWLWEKYGLRPEQWVDFRALAGDPSDNIPGVKGIGEKTALKLLKEWGSLENLLKNLDQVKPESVREKILAHLEDLKLSRELSRVRTDLPLEVDFRRRREPDWEGLKAFLERLEFGSLLHEFGLLESPLPAEEAPWPPPEGAFLGYRLSRPEPMWAELLALAASAQGRVYRAEDPHGALRGLFEVRGLLAKDLAVVALREGLDLPPTDDPMLLAYLLDPSNTTPEGVARRYGGEWTEDAAKRALLAERLHENLLGRLQGEERLLWLYEEVEKPLSRVLAHMEATGVKLDVAYLEALSLEVAAHMRRLEEEVFRLAGRSFRLNSRDQLERVLFDELGLPPIGKTEKTGKRSTSAAVLEALREVHPIVDKILQYREMAKLKGTYIDRLPALVHPKTGRLHTRFNQTATATGRLSSSDPNLQNIPVRTPLGQKIRRAFVAEEGWRLVALDYSQIELRVLAHLSGDENLIRVFQEGKDIHTQTASWMFGLSAEAIDPLMRRAAKTINFGVLYGMSAFRLSQELGIPYEEAQAFIQKYFQSYPKVKAWIEKTLREGRTRGYVETLFGRRRYVPDLNARVKSVREAAERMAFNMPVQGTAADLMKLAMVRLFPQLREVGARMLLQVHDELLLEAPKERAEEVAALAKEVMEGVWPLAVPLEVEVGIGEDWLAAKG

SEQ ID NO: 5691 - DNA, 2523 bp, synthetic construct
  misc_feature 1..2523: note = Variant of DNA polymerase I from Thermus sp. strain 2.9
  source 1..2523: mol_type = other DNA
atgcaccatcatcatcatcatggcggtagcggcgtgttaccggtgttcgagcctaaaggtcgcgtgcttctggttgatggccatcatctcgcgtatcgtaacttctttgccctgaaaggattaaccaccagcctgggcgagccggtacagggtgtctacggctttgcaaagtcgctcctgaaagctctgaaagaagacggtgatgtggtgattgttgtctttgatgcgaaagcgccaagttttcgccacgaagcgtacgaagcttacaaagccgggcgtgctccaacgccggaagactttcctcgccaattggcgcttatgaaggaattagtggatttgcttggcctcgaacgcttggaagttcccggtttcgaggcagacgacgtattagcgactctcgcaaagaaagccgaacgtgagggctatgaagtccagatcttgacagcagatcgcgatcttttccagcttttatctccgcgcatctcggtgttacacccggaagggcatcgtatcaccccggaatggctctgggagaaatatggtttgcgtcccgaacaatgggtggattttcgcgccttagcaggcgatccgagcgacaatattccgggagttaaaggtatcggcgagaagacggcgctcaagctccttaaagaatgggggtcgttggagaacttgcttaagaatttagatcaggtcaaaccagagtcagtgcgtgagaagattcttgctcacctcgaagacctcaaattaagccgcgaattgtcccgtgtacgcaccgatttgccgctcgaagttgatttcggccgccgccgcgaacctgactgggagggtcttaaagcgtttttagagcgtcttgaatttggttcgctcttgcatgaattcggccttttagaaagcccgttaccggccgaagaagcaccttggccaccgcccgagggcgcgtttttaggttaccgtttgagtcgcccggaaccgatgtgggccgaattactggctcttgcagcgtctgcccagggacgtgtgtatcgcgcggaagaccctcatggtgcgctccgcggcctcttcgaagtccgtggactccttgccaaagacttagctgttgttgcattgcgcgaaggtcttgatttacctccgactgatgatccaatgcttcttgcgtacctcttggacccgtcaaacacgacgcccgaaggcgtagcccgtcgttacggcggcgagtggaccgaagatgcagcgaaacgcgcgttattggccgaacgtttgcacgaaaatttattaggacgtttgcaaggcgaggaacgtctcctctggctttacgaagaagtggagaaaccattgagtcgcgtgctcgcgcatatggaagctaccggtgtcaaattagacgtggcgtatttggaggcccttcaccttgaagttgctgcccatatgcgccgcttggaggaagaagtattccgtttagcaggccgttcctttcgccttaactctcgcgatcagttagaacgtgtgttgttcgatgaacttggtctccctcctatcggcaagacagagaagaccggtaaacgtagcacttcagcggcggttttagaagctcttcgcgaagtccatcccattgtggacaagatcttgcagtaccgcgaactggcgaaattgaaaggcacctatattgaccctcttccggcattagtccacccgaaaacgggacgcctccatacccgcttcaaccaaacagccacggcgaccggtcgtttgtccagttctgatccaaaccttcagaatattccagtacgtaccccattgggccagaagatccgccgtgcgtttgtagctgaggagggttggcgtttagtggccctcgattatcgtcaaattgaattacgtgtccttgcccatctttctggcgatgagaacctcatccgcgtgtttcaggaaggcaaagacattcacactcaaacggcaagctggatgtttggattatcagctgaagcgatcgatcctttgatgcgtcgtgcagcgaagaccatcaatttcggtgttctctacggtatgagtgcctttcgtttgtcgcaggaattaggcattccctatgaagaagctcaggcgttcattcagaaatactttcaaagctatcccaaagttaaagcatggatcgagaagactctccgcgaaggccgcacacgtggttacgtagagaccttatttggacgtcgccgctatgttcccgatttaaacgctcgcgtgaaaggcaagcgtgaagccgccgaacgcatggcgttcaacatgcctgtacagggcacggcagctgacctcatgaaacttgcaatggtgcgcctttttccacaattgcgtgaagttggtgcccgcatgctcttgcaggtccacgatgaactcttgttagaagcgccaaaagagcgtgcggaagaggtggcagccctcgcgaaagaagttatggaaggcgtgtggcccttagcggtgcctcttgaagtcgaagttggtattggcgaggattggctggctgccaaagga

SEQ ID NO: 5692 - protein, 841 aa, synthetic construct
  REGION 1..841: note = Variant of DNA polymerase I from Thermus sp. strain 2.9
MHHHHHHGGSGVLPVFEPKGRVLLVDGHHLAYRNFFALKGLTTSLGEPVQGVYGFAKSLLKALKEDGDVVIVVFDAKAPSFRHEAYEAYKAGRAPTPEDFPRQLALMKELVDLLGLERLEVPGFEADDVLATLAKKAEREGYEVQILTADRDLFQLLSPRISVLHPEGHRITPEWLWEKYGLRPEQWVDFRALAGDPSDNIPGVKGIGEKTALKLLKEWGSLENLLKNLDQVKPESVREKILAHLEDLKLSRELSRVRTDLPLEVDFGRRREPDWEGLKAFLERLEFGSLLHEFGLLESPLPAEEAPWPPPEGAFLGYRLSRPEPMWAELLALAASAQGRVYRAEDPHGALRGLFEVRGLLAKDLAVVALREGLDLPPTDDPMLLAYLLDPSNTTPEGVARRYGGEWTEDAAKRALLAERLHENLLGRLQGEERLLWLYEEVEKPLSRVLAHMEATGVKLDVAYLEALHLEVAAHMRRLEEEVFRLAGRSFRLNSRDQLERVLFDELGLPPIGKTEKTGKRSTSAAVLEALREVHPIVDKILQYRELAKLKGTYIDPLPALVHPKTGRLHTRFNQTATATGRLSSSDPNLQNIPVRTPLGQKIRRAFVAEEGWRLVALDYRQIELRVLAHLSGDENLIRVFQEGKDIHTQTASWMFGLSAEAIDPLMRRAAKTINFGVLYGMSAFRLSQELGIPYEEAQAFIQKYFQSYPKVKAWIEKTLREGRTRGYVETLFGRRRYVPDLNARVKGKREAAERMAFNMPVQGTAADLMKLAMVRLFPQLREVGARMLLQVHDELLLEAPKERAEEVAALAKEVMEGVWPLAVPLEVEVGIGEDWLAAKG

SEQ ID NO: 5693 - DNA, 2523 bp, synthetic construct
  misc_feature 1..2523: note = Variant of DNA polymerase I from Thermus sp. strain 2.9
  source 1..2523: mol_type = other DNA
atgcaccatcatcatcatcatggcggtagcggcgtgttaccggtgttcgagcctaaaggtcgcgtgcttctggttgatggccatcatctcgcgtatcgtaacttctttgccctgaaaggattaaccaccagcctgggcgagccggtacagggtgtctacggctttgcaaagtcgctcctgaaagctctgaaagaagacggtgatgtggtgattgttgtctttgatgcgaaagcgccaagttttcgccacgaagcgtacgaagcttacaaagccgggcgtgctccaacgccggaagactttcctcgccaattggcgcttatgaaggaattagtggatttgcttggcctcgaacgcttggaagttcccggtttcgaggcagacgacgtattagcgactctcgcaaagaaagccgaacgtgagggctatgaagtccagatcttgacagcagatcgcgatcttttccagcttttatctccgcgcatctcggtgttacacccggaagggcatcgtatcaccccggaatggctctgggagaaatatggtttgcgtcccgaacaatgggtggattttcgcgccttagcaggcgatccgagcgacaatattccgggagttaaaggtatcggcgagaagacggcgctcaagctccttaaagaatgggggtcgttggagaacttgcttaagaatttagatcaggtcaaaccagagtcagtgcgtgagaagattcttgctcacctcgaagacctcaaattaagccgcgaattgtcccgtgtacgcaccgatttgccgctcgaagttgatttcggtcgccgccgcgaacctgactgggagggtcttaaagcgtttttagagcgtcttgaatttggttcgctcttgcatgaattcggccttttagaaagcccgttactggccgaagaagcaccttggccaccgcccgagggcgcgtttttaggttaccgtttgagtcgcccggaaccgatgtgggccgaattactggctcttgcagcgtctgcccagggacgtgtgtatcgcgcggaagaccctcatggtgcgctccgcggcctcttcgaagtccgtaccctccttgccaaagacttagctgttgttgcattgcgcgaaggtcttgatttacctccgactgatgatccaatgcttcttgcgtacctcttggacccgtcaaacacgacgcccgaaggcgtagcccgtcgttacggcggcgagtggaccgaagatgcagccaaacgcgcgttattggccgaacgtttgcacgaaaatttattaggacgtttgcaaggcgaggaacgtctcctctggctttacgaagaagtggagaaaccattgagtcgcgtgctcgcgcatatggaagctaccggtgtcaaattagacgtggcgtatttggagaatctcagccttgaagttgctgcccacatgcgccgcttggaggaagaagtattccgtttagcaggccgttcctttcgccttaactctcgcgatcagttagaacgtgtgttgttcgatgaacttggtctccctcctatcggcaagacagagaagaccggtaaacgtagcacttcagcggcggttttagaagctcttcgcgaagtccatcccattgtggacaagatcttgcagtaccgcgaaatggcgaaattgaaaggcacctatattgaccgtcttccggcattagtccacccgaaaacgggacgcctccatacccgcttcaaccaaacagccacggcgaccggtcgtttgtcctcctctgatccaaaccttcagaatattccagtacgtacctttttgggccagaagatccgccgtgcgtttgtagctgaggagggttgggcgttagtggccctcgattatcgtcaaattgaattacgtgtccttgcccatctttctggcgatgagaacctcatccgcgtgtttcaggaaggcaaagacattcacactcaaacggcaagctggatgtttggattatcagctgaagcgatcgatcctttgatgcgtcgtgcagcgaagaccatcaatttcggtgttctctacggtatgagtgcctttcgtttgtcgcaggaattaggcattcccctggaagaagctcaggctttcattcagaaatactttcaaggctatcccaaagttaaagcatggatcgagaagactctccgtgaaggccgcacacgtggttacgtagagaccttatttggacgtcgccgctatgttcccgatttaaactcgcgcgtgaaaggcaagcgtgaagccgccgaacgcatggcgttcaacatgcctgtacagggcacggcagctgacctcatgaaacttgcaatggtgcgcctttttccacaattgcgtgaagttggtgcccgcatgctgttgcaggtccacgatgaactcttgttagaagcgccaaaagagcgtgcggaagaggtggcagccctcgcgaaagaagttatggaaggcgtgtggcccttagcggtgcctcttgaagtcgaagttggtattggcgaggattggctggctgccaaagga

SEQ ID NO: 5694 - protein, 841 aa, synthetic construct
  REGION 1..841: note = Variant of DNA polymerase I from Thermus sp. strain 2.9
MHHHHHHGGSGVLPVFEPKGRVLLVDGHHLAYRNFFALKGLTTSLGEPVQGVYGFAKSLLKALKEDGDVVIVVFDAKAPSFRHEAYEAYKAGRAPTPEDFPRQLALMKELVDLLGLERLEVPGFEADDVLATLAKKAEREGYEVQILTADRDLFQLLSPRISVLHPEGHRITPEWLWEKYGLRPEQWVDFRALAGDPSDNIPGVKGIGEKTALKLLKEWGSLENLLKNLDQVKPESVREKILAHLEDLKLSRELSRVRTDLPLEVDFGRRREPDWEGLKAFLERLEFGSLLHEFGLLESPLLAEEAPWPPPEGAFLGYRLSRPEPMWAELLALAASAQGRVYRAEDPHGALRGLFEVRTLLAKDLAVVALREGLDLPPTDDPMLLAYLLDPSNTTPEGVARRYGGEWTEDAAKRALLAERLHENLLGRLQGEERLLWLYEEVEKPLSRVLAHMEATGVKLDVAYLENLSLEVAAHMRRLEEEVFRLAGRSFRLNSRDQLERVLFDELGLPPIGKTEKTGKRSTSAAVLEALREVHPIVDKILQYREMAKLKGTYIDRLPALVHPKTGRLHTRFNQTATATGRLSSSDPNLQNIPVRTFLGQKIRRAFVAEEGWALVALDYRQIELRVLAHLSGDENLIRVFQEGKDIHTQTASWMFGLSAEAIDPLMRRAAKTINFGVLYGMSAFRLSQELGIPLEEAQAFIQKYFQGYPKVKAWIEKTLREGRTRGYVETLFGRRRYVPDLNSRVKGKREAAERMAFNMPVQGTAADLMKLAMVRLFPQLREVGARMLLQVHDELLLEAPKERAEEVAALAKEVMEGVWPLAVPLEVEVGIGEDWLAAKG

SEQ ID NO: 5695 - DNA, 2523 bp, synthetic construct
  misc_feature 1..2523: note = Variant of DNA polymerase I from Thermus sp. strain 2.9
  source 1..2523: mol_type = other DNA
atgcaccatcatcatcatcatggcggtagcggcgtgttaccggtgttcgagcctaaaggtcgcgtgcttctggttgatggccatcatctcgcgtatcgtaacttctttgccctgaaaggattaaccaccagcctgggcgagccggtacagggtgtctacggctttgcaaagtcgctcctgaaagctctgaaagaagacggtgatgtggtgattgttgtctttgatgcgaaagcgccaagttttcgccacgaagcgtacgaagcttacaaagccgggcgtgctccaacgccggaagactttcctcgccaattggcgcttatgaaggaattagtggatttgcttggcctcgaacgcttggaagttcccggtttcgaggcagacgacgtattagcgactctcgcaaagaaagccgaacgtgagggctatgaagtccagatcttgacagcagatcgcgatcttttccagcttttatctccgcgcatctcggtgttacacccggaagggcatcgtatcaccccggaatggctctgggagaaatatggtttgcgtcccgaacaatgggtggattttcgcgccttagcaggcgatccgagcgacaatattccgggagttaaaggtatcggcgagaagacggcgctcaagctccttaaagaatgggggtcgttggagaacttgcttaagaatttagatcaggtcaaaccagagtcagtgcgtgagaagattcttgctcacctcgaagacctcaaattaagccgcgaattgtcccgtgtacgcaccgatttgccgctcgaagttgatttcggtcgccgccgcgaacctgactgggagggtcttaaagcgtttttagagcgtcttgaatttggttcgctcttgcatgaattcggccttttagaaagcccgttactggccgaagaagcaccttggccaccgcccgagggcgcgtttttaggttaccgtttgagtcgcccggaaccgatgtgggccgaattactggctcttgcagcgtctgcccagggacgtgtgtatcgcgcggaagaccctcatggtgcgctccgcggcctcttcgaagtccgtggactccttgccaaagacttagctgttgttgcattgcgcgaaggtcttgatttacctccgactgatgatccaatgcttcttgcgtacctcttggacccgtcaaacacgacgcccgaaggcgtagcccgtcgttacggcggcgagtggaccgaagatgcagcgaaacgcgcgttattggccgaacgtttgcacgaaaatttattaggacgtttgcaaggcgaggaacgtctcctctggctttacgaagaagtggagaaaccattgagtcgcgtgctcgcgcatatggaagctaccggtgtcaaattagacgtggcgtatttggagaatctcagccttgaagttgctgcccacatgcgccgcttggaggaagaagtattccgtttagcaggccgttcctttcgccttaactctcgcgatcagttagaacgtgtgttgttcgatgaacttggtctccctcctatcggcaagacagagaagaccggtaaacgtagcacttcagcggcggttttagaagctcttcgcgaagtccatcccattgtggacaagatcttgcagtaccgcgaaatggcgaaattgaaaggcacctatattgaccgtcttccggcattagtccacccgaaaacgggacgcctccatacccgcttcaaccaaacagccacggcgaccggtcgtttgtcctcctctgatccaaaccttcagaatattccagtacgtaccccattgggccagaagatccgccgtgcgtttgtagctgaggagggttggcgtttagtggccctcgattatcgtcaaattgaattacgtgtccttgcccatctttctggcgatgagaacctcatccgcgtgtttcaggaaggcaaagacattcacactcaaacggcaagctggatgtttggattatcagctgaagcgatcgatcctttgatgcgtcgtgcagcgaagaccatcaatttcggtgttctctacggtatgagtgcctttcgtttgtcgcaggaattaggcattccctatgaagaagctcaggcgttcattcagaaatactttcaaagctatcccaaagttaaagcatggatcgagaagactctccgtgaaggccgcacacgtggttacgtagagaccttatttggacgtcgccgctatgttcccgatttaaacgctcgcgtgaaaggcaagcgtgaagccgccgaacgcatggcgttcaacatgcctgtacagggcacggcagctgacctcatgaaacttgcaatggtgcgcctttttccacaattgcgtgaagttggtgcccgcatgagtttgcaggtccacgatgaactcttgttagaagcgccaaaagagcgtgcggaagaggtggcagccctcgcgaaagaagttatggaaggcgtgtggcccttagcggtgcctcttgaagtcgaagttggtattggcgaggattggctggctgccaaagga

SEQ ID NO: 5696 - protein, 841 aa, synthetic construct
  REGION 1..841: note = Variant of DNA polymerase I from Thermus sp. strain 2.9
MHHHHHHGGSGVLPVFEPKGRVLLVDGHHLAYRNFFALKGLTTSLGEPVQGVYGFAKSLLKALKEDGDVVIVVFDAKAPSFRHEAYEAYKAGRAPTPEDFPRQLALMKELVDLLGLERLEVPGFEADDVLATLAKKAEREGYEVQILTADRDLFQLLSPRISVLHPEGHRITPEWLWEKYGLRPEQWVDFRALAGDPSDNIPGVKGIGEKTALKLLKEWGSLENLLKNLDQVKPESVREKILAHLEDLKLSRELSRVRTDLPLEVDFGRRREPDWEGLKAFLERLEFGSLLHEFGLLESPLLAEEAPWPPPEGAFLGYRLSRPEPMWAELLALAASAQGRVYRAEDPHGALRGLFEVRGLLAKDLAVVALREGLDLPPTDDPMLLAYLLDPSNTTPEGVARRYGGEWTEDAAKRALLAERLHENLLGRLQGEERLLWLYEEVEKPLSRVLAHMEATGVKLDVAYLENLSLEVAAHMRRLEEEVFRLAGRSFRLNSRDQLERVLFDELGLPPIGKTEKTGKRSTSAAVLEALREVHPIVDKILQYREMAKLKGTYIDRLPALVHPKTGRLHTRFNQTATATGRLSSSDPNLQNIPVRTPLGQKIRRAFVAEEGWRLVALDYRQIELRVLAHLSGDENLIRVFQEGKDIHTQTASWMFGLSAEAIDPLMRRAAKTINFGVLYGMSAFRLSQELGIPYEEAQAFIQKYFQSYPKVKAWIEKTLREGRTRGYVETLFGRRRYVPDLNARVKGKREAAERMAFNMPVQGTAADLMKLAMVRLFPQLREVGARMSLQVHDELLLEAPKERAEEVAALAKEVMEGVWPLAVPLEVEVGIGEDWLAAKG

SEQ ID NO: 5697 - DNA, 2523 bp, synthetic construct
  misc_feature 1..2523: note = Variant of DNA polymerase I from Thermus sp. strain 2.9
  source 1..2523: mol_type = other DNA
atgcaccatcatcatcatcatggcggtagcggcgtgttaccggtgttcgagcctaaaggtcgcgtgcttctggttgatggccatcatctcgcgtatcgtaacttctttgccctgaaaggattaaccaccagcctgggcgagccggtacagggtgtctacggctttgcaaagtcgctcctgaaagctctgaaagaagacggtgatgtggtgattgttgtctttgatgcgaaagcgccaagttttcgccacgaagcgtacgaagcttacaaagccgggcgtgctccaacgccggaagactttcctcgccaattggcgcttatgaaggaattagtggatttgcttggcctcgaacgcttggaagttcccggtttcgaggcagacgacgtattagcgactctcgcaaagaaagccgaacgtgagggctatgaagtccagatcttgacagcagatcgcgatcttttccagcttttatctccgcgcatctcggtgttacacccggaagggcatcgtatcaccccggaatggctctgggagaaatatggtttgcgtcccgaacaatgggtggattttcgcgccttagcaggcgatccgagcgacaatattccgggagttaaaggtatcggcgagaagacggcgctcaagctccttaaagaatgggggtcgttggagaacttgcttaagaatttagatcaggtcaaaccagagtcagtgcgtgagaagattcttgctcacctcgaagacctcaaattaagccgcgaattgtcccgtgtacgcaccgatttgccgctcgaagttgatttcggtcgccgccgcgaacctgactgggagggtcttaaagcgtttttagagcgtcttgaatttggttcgctcttgcatgaattcggccttttagaaagcccgttactggccgaagaagcaccttggccaccgcccgagggcgcgtttttaggttaccgtttgagtcgcccggaaccgatgtgggccgaattactggctcttgcagcgtctgcccagggacgtgtgtatcgcgcggaagaccctcatggtgcgctccgcggcctcttcgaagtccgtggactccttgccaaagacttagctgttgttgcattgcgcgaaggtcttgatttacctccgactgatgatccaatgcttcttgcgtacctcttggacccgtcaaacacgacgcccgaaggcgtagcccgtcgttacggcggcgagtggaccgaagatgcagcgaaacgcgcgttattggccgaacgtttgcacgaaaatttattaggacgtttgcaaggcgaggaacgtctcctctggctttacgaagaagtggagaaaccattgagtcgcgtgctcgcgcatatggaagctaccggtgtcaaattagacgtggcgtatttggagaatctcagccttgaagttgctgcccacatgcgccgcttggaggaagaagtattccgtttagcaggccgttcctttcgccttaactctcgcgatcagttagaacgtgtgttgttcgatgaacttggtctccctcctatcggcaagacagagaagaccggtaaacgtagcacttcagcggcggttttagaagctcttcgcgaagtccatcccattgtggacaagatcttgcagtaccgcgaaatggcgaaattgaaaggcacctatattgaccgtcttccggcattagtccacccgaaaacgggacgcctccatacccgcttcaaccaaacagccacggcgaccggtcgtttgtcctcctctgatccaaaccttcagaatattccagtacgtaccccattgggccagaagatccgccgtgcgtttgtagctgaggagggttggcgtttagtggccctcgattatcgtcaaattgaattacgtgtccttgcccatctttctggcgatgagaacctcatccgcgtgtttcaggaaggcaaagacattcacactcaaacggcaagctggatgtttggattatcagctgaagcgatcgatcctttgatgcgtcgtgcagcgaagaccatcaatttcggtgttctctacggtatgagtgcctttcgtttgtcgcaggaattaggcattccctatgaagaagctcaggcgttcattcagaaatactttcaaagctatcccaaagttaaagcatggatcgagaagactctccgtgaaggccgcacacgtggttacgtagagaccttatttggacgtcgccgctatgttcccgatttaaacgctcgcgtgaaaggcaagcgtgaagccgccgaacgcatggcgttcaacatgcctgtacagggcacggcagctgacctcatgaaacttgcaatggtgcgccagtttccacaattgcgtgaagttggtgcccgcatgctcttgcaggtccacgatgaactcttgttagaagcgccaaaagagcgtgcggaagaggtggcagccctcgcgaaagaagttatggaaggcgtgtggcccttagcggtgcctcttgaagtcgaagttggtattggcgaggattggctggctgccaaagga

SEQ ID NO: 5698 - protein, 841 aa, synthetic construct
  REGION 1..841: note = Variant of DNA polymerase I from Thermus sp. strain 2.9
MHHHHHHGGSGVLPVFEPKGRVLLVDGHHLAYRNFFALKGLTTSLGEPVQGVYGFAKSLLKALKEDGDVVIVVFDAKAPSFRHEAYEAYKAGRAPTPEDFPRQLALMKELVDLLGLERLEVPGFEADDVLATLAKKAEREGYEVQILTADRDLFQLLSPRISVLHPEGHRITPEWLWEKYGLRPEQWVDFRALAGDPSDNIPGVKGIGEKTALKLLKEWGSLENLLKNLDQVKPESVREKILAHLEDLKLSRELSRVRTDLPLEVDFGRRREPDWEGLKAFLERLEFGSLLHEFGLLESPLLAEEAPWPPPEGAFLGYRLSRPEPMWAELLALAASAQGRVYRAEDPHGALRGLFEVRGLLAKDLAVVALREGLDLPPTDDPMLLAYLLDPSNTTPEGVARRYGGEWTEDAAKRALLAERLHENLLGRLQGEERLLWLYEEVEKPLSRVLAHMEATGVKLDVAYLENLSLEVAAHMRRLEEEVFRLAGRSFRLNSRDQLERVLFDELGLPPIGKTEKTGKRSTSAAVLEALREVHPIVDKILQYREMAKLKGTYIDRLPALVHPKTGRLHTRFNQTATATGRLSSSDPNLQNIPVRTPLGQKIRRAFVAEEGWRLVALDYRQIELRVLAHLSGDENLIRVFQEGKDIHTQTASWMFGLSAEAIDPLMRRAAKTINFGVLYGMSAFRLSQELGIPYEEAQAFIQKYFQSYPKVKAWIEKTLREGRTRGYVETLFGRRRYVPDLNARVKGKREAAERMAFNMPVQGTAADLMKLAMVRQFPQLREVGARMLLQVHDELLLEAPKERAEEVAALAKEVMEGVWPLAVPLEVEVGIGEDWLAAKG

SEQ ID NO: 5699 - DNA, 2523 bp, synthetic construct
  misc_feature 1..2523: note = Variant of DNA polymerase I from Thermus sp. strain 2.9
  source 1..2523: mol_type = other DNA
atgcaccatcatcatcatcatggcggtagcggcgtgttaccggtgttcgagcctaaaggtcgcgtgcttctggttgatggccatcatctcgcgtatcgtaacttctttgccctgaaaggattaaccaccagccgcggcgagccggtacagggtgtctacggctttgcaaagtcgctcctgaaagctctgaaagaagacggtgatgtggtgattgttgtctttgatgcgaaagcgccaagttttcgccacgaagcgtacgaagcttacaaagccgggcgtgctccaacgccggaagactttcctcgccaattggcgcttatgaaggaattagtggatttgcttggcctcgaacgcttggaagttcccggtttcgaggcagacgacgtattagcgactctcgcaaagaaagccgaacgtgagggctatgaagtccagatcttgacagcagatcgcgatcttttccagcttttatctccgcgcatctcggtgttacacccggaagggcatcgtatcaccccggaatggctctgggagaaatatggtttgcgtcccgaacaatgggtggattttcgcgccttagcaggcgatccgagcgacaatattccgggagttaaaggtatcggcgagaagacggcgctcaagctccttaaagaatgggggtcgttggagaacttgcttaagaatttagatcaggtcaaaccagagtcagtgcgtgagaagattcttgctcacctcgaagacctcaaattaagccgcgaattgtcccgtgtacgcaccgatttgccgctcgaagttgatttccgccgccgccgcgaacctgactgggagggtcttaaagcgtttttagagcgtcttgaatttggttcgctcttgcatgaattcggccttttagaaagcccgttactggccgaagaagcaccttggccaccgcccgagggcgcgtttttaggttaccgtttgagtcgcccggaaccgatgtgggccgaattactggctcttgcagcgtctgcccagggacgtgtgtatcgcgcggaagaccctcatggtgcgctccgcggcctcttcgaagtccgtggactccttgccaaagacttagctgttgttgcattgcgcgaaggtcttgatttacctccgactgatgatccaatgcttcttgcgtacctcttggacccgtcaaacacgacgcccgaaggcgtagcccgtcgttacggcggcgagtggaccgaagatgcagcgaaacgcgcgttattggccgaacgtttgcacgaaaatttattaggacgtttgcaaggcgaggaacgtctcctctggctttacgaagaagtggagaaaccattgagtcgcgtgctcgcgcatatggaagctaccggtgtcaaattagacgtggcgtatttggagaatcttcaccttgaagttgctgcccacatgcgccgcttggaggaagaagtattccgtttagcaggccgttcctttcgccttaactctcgcgatcagttagaacgtgtgttgttcgatgaacttggtctccctcctatcggcaagacagagaagaccggtaaacgtagcacttcagcggcggttttagaagctcttcgcgaagtccatcccattgtggacaagatcttgcagtaccgcgaaatggcgaaattgaaaggcacctatattgaccgtcttccggcattagtccacccgaaaacgggacgcctccatacccgcttcaaccaaacagccacggcgaccggtcgtttgtcctcctctgatccaaaccttcagaatattccagtacgtaccccattgggccagaagatccgccgtgcgtttgtagctgaggagggttggcgtttagtggccctcgattatcgtcaaattgaattacgtgtccttgcccatctttctggcgatgagaacctcatccgcgtgtttcaggaaggcaaagacattcacactcaaacggcaagctggatgtttggattatcagctgaagcgatcgatcctttgatgcgtcgtgcagcgaagaccatcaatttcggtgttctctacggtatgagtgcctttcgtttgtcgcaggaattaggcattccctatgaagaagctcaggcgttcattcagaaatactttcaaagctatcccaaagttaaagcatggatcgagaagactctccgcgaaggccgcacacgtggttacgtagagaccttatttggacgtcgccgctatgttcccgatttaaacgctcgcgtgaaaggcaagcgtgaagccgccgaacgcatggcgttcaacatgcctgtacagggcacggcagctgacctcatgaaacttgcaatggtgcgcctttttccacaattgcgtgaagttggtgcccgcatgctcttgcaggtccacgatgaactcttgttagaagcgccaaaagagcgtgcggaagaggtggcagccctcgcgaaagaagttatggaaggcgtgtggcccttagcggtgcctcttgaagtcgaagttggtattggcgaggattggctggctgccaaagga

SEQ ID NO: 5700 - protein, 841 aa, synthetic construct
  REGION 1..841: note = Variant of DNA polymerase I from Thermus sp. strain 2.9
MHHHHHHGGSGVLPVFEPKGRVLLVDGHHLAYRNFFALKGLTTSRGEPVQGVYGFAKSLLKALKEDGDVVIVVFDAKAPSFRHEAYEAYKAGRAPTPEDFPRQLALMKELVDLLGLERLEVPGFEADDVLATLAKKAEREGYEVQILTADRDLFQLLSPRISVLHPEGHRITPEWLWEKYGLRPEQWVDFRALAGDPSDNIPGVKGIGEKTALKLLKEWGSLENLLKNLDQVKPESVREKILAHLEDLKLSRELSRVRTDLPLEVDFRRRREPDWEGLKAFLERLEFGSLLHEFGLLESPLLAEEAPWPPPEGAFLGYRLSRPEPMWAELLALAASAQGRVYRAEDPHGALRGLFEVRGLLAKDLAVVALREGLDLPPTDDPMLLAYLLDPSNTTPEGVARRYGGEWTEDAAKRALLAERLHENLLGRLQGEERLLWLYEEVEKPLSRVLAHMEATGVKLDVAYLENLHLEVAAHMRRLEEEVFRLAGRSFRLNSRDQLERVLFDELGLPPIGKTEKTGKRSTSAAVLEALREVHPIVDKILQYREMAKLKGTYIDRLPALVHPKTGRLHTRFNQTATATGRLSSSDPNLQNIPVRTPLGQKIRRAFVAEEGWRLVALDYRQIELRVLAHLSGDENLIRVFQEGKDIHTQTASWMFGLSAEAIDPLMRRAAKTINFGVLYGMSAFRLSQELGIPYEEAQAFIQKYFQSYPKVKAWIEKTLREGRTRGYVETLFGRRRYVPDLNARVKGKREAAERMAFNMPVQGTAADLMKLAMVRLFPQLREVGARMLLQVHDELLLEAPKERAEEVAALAKEVMEGVWPLAVPLEVEVGIGEDWLAAKG

SEQ ID NO: 5701 - DNA, 2523 bp, synthetic construct
  misc_feature 1..2523: note = Variant of DNA polymerase I from Thermus sp. strain 2.9
  source 1..2523: mol_type = other DNA
atgcaccatcatcatcatcatggcggtagcggcgtgttaccggtgttcgagcctaaaggtcgcgtgcttctggttgatggccatcatctcgcgtatcgtaacttctttgccctgaaaggattaaccaccagcctgggcgagccggtacagggtgtctacggctttgcaaagtcgctcctgaaagctctgaaagaagacggtgatgtggtgattgttgtctttgatgcgaaagcgccaagttttcgccacgaagcgtacgaagcttacaaagccgggcgtgctccaacgccggaagactttcctcgccaattggcgcttatgaaggaattagtggatttgcttggcctcgaacgcttggaagttcccggtttcgaggcagacgacgtattagcgactctcgcaaagaaagccgaacgtgagggctatgaagtccagatcttgacagcagatcgcgatcttttccagcttttatctccgcgcatctcggtgttacacccggaagggcatcgtatcaccccggaatggctctgggagaaatatggtttgcgtcccgaacaatgggtggattttcgcgccttagcaggcgatccgagcgacaatattccgggagttaaaggtatcggcgagaagacggcgctcaagctccttaaagaatgggggtcgttggagaacttgcttaagaatttagatcaggtcaaaccagagtcagtgcgtgagaagattcttgctcacctcgaagacctcaaattaagccgcgaattgtcccgtgtacgcaccgatttgccgctcgaagttgatttcggtcgccgccgcgaacctgactgggagggtcttaaagcgtttttagagcgtcttgaatttggttcgctcttgcatgaattcggccttttagaaagcccgttactggccgaagaagcaccttggccaccgcccgagggcgcgtttttaggttaccgtttgagtcgcccggaaccgatgtgggccgaattactggctcttgcagcgtctgcccagggacgtgtgtatcgcgcggaagaccctcatggtgcgctccgcggcctcttcgaagtccgtggactccttgccaaagacttagctgttgttgcattgcgcgaaggtcttgatttacctccgactgatgatccaatgcttcttgcgtacctcttggacccgtcaaacacgacgcccgaaggcgtagcccgtcgttacggcggcgagtggaccgaagatgcagcgaaacgcgcgttattggccgaacgtttgcacgaaaatttattaggacgtttgcaaggcgaggaacgtctcctctggctttacgaagaagtggagaaaccattgagtcgcgtgctcgcgcatatggaagctaccggtgtcaaattagacgtggcgtatttggagaatctcagccttgaagttgctgcccacatgcgccgcttggaggaagaagtattccgtttagcaggccgttcctttcgccttaactctcgcgatcagttagaacgtgtgttgttcgatgaacttggtctccctcctatcggcaagacagagaagaccggtaaacgtagcacttcagcggcggttttagaagctcttcgcgaagtccatcccattgtggacaagatcttgcagtaccgcgaaatggcgaaattgaaaggcacctatattgaccgtcttccggcattagtccacccgaaaacgggacgcctccatacccgcttcaaccaaacagccacggcgaccggtcgtttgtcctcctctgatccaaaccttcagaatattccagtacgtaccccattgggccagaagatccgccgtgcgtttgtagctgaggagggttggcgtttagtggccctcgattatcgtcaaattgaattacgtgtccttgcccatctttctggcgatgagaacctcatccgcgtgtttcaggaaggcaaagacattcacactcaaacggcaagctggatgtttggattatcagctgaagcgatcgatcctttgatgcgtcgtgcagcgaagaccatcaatttcggtgttctctacggtatgagtgcctttcgtttgtcgcaggaattaggcattccctatgaagaagctcaggcgttcattcagaaatactttcaaagctatcccaaagttaaagcatggatcgagaagactctccgtgaaggccgcacacgtggttacgtagagaccttatttggacgtcgccgctatgttcccgatttaaacgctcgcgtgaaaggcaagcgtgaagccgccgaacgcatggcgttcaacatgcctgtacagggcacggcagctgacctcatgaaacttgcaatggtgcgcctttttccacaattgcgtgaagttggtgcccgcatgctcttgcaggtccacgatgaactcttgttagaagcgccaaaagagcgtgcggaagaggtggcagccctcgcgaaagaagttatggaaggcgtgtggcccttagcggtgcctcttgaagtcgaagttggtattggcgaggattggctggctgagaaagga

SEQ ID NO: 5702 - protein, 841 aa, synthetic construct
  REGION 1..841: note = Variant of DNA polymerase I from Thermus sp. strain 2.9
MHHHHHHGGSGVLPVFEPKGRVLLVDGHHLAYRNFFALKGLTTSLGEPVQGVYGFAKSLLKALKEDGDVVIVVFDAKAPSFRHEAYEAYKAGRAPTPEDFPRQLALMKELVDLLGLERLEVPGFEADDVLATLAKKAEREGYEVQILTADRDLFQLLSPRISVLHPEGHRITPEWLWEKYGLRPEQWVDFRALAGDPSDNIPGVKGIGEKTALKLLKEWGSLENLLKNLDQVKPESVREKILAHLEDLKLSRELSRVRTDLPLEVDFGRRREPDWEGLKAFLERLEFGSLLHEFGLLESPLLAEEAPWPPPEGAFLGYRLSRPEPMWAELLALAASAQGRVYRAEDPHGALRGLFEVRGLLAKDLAVVALREGLDLPPTDDPMLLAYLLDPSNTTPEGVARRYGGEWTEDAAKRALLAERLHENLLGRLQGEERLLWLYEEVEKPLSRVLAHMEATGVKLDVAYLENLSLEVAAHMRRLEEEVFRLAGRSFRLNSRDQLERVLFDELGLPPIGKTEKTGKRSTSAAVLEALREVHPIVDKILQYREMAKLKGTYIDRLPALVHPKTGRLHTRFNQTATATGRLSSSDPNLQNIPVRTPLGQKIRRAFVAEEGWRLVALDYRQIELRVLAHLSGDENLIRVFQEGKDIHTQTASWMFGLSAEAIDPLMRRAAKTINFGVLYGMSAFRLSQELGIPYEEAQAFIQKYFQSYPKVKAWIEKTLREGRTRGYVETLFGRRRYVPDLNARVKGKREAAERMAFNMPVQGTAADLMKLAMVRLFPQLREVGARMLLQVHDELLLEAPKERAEEVAALAKEVMEGVWPLAVPLEVEVGIGEDWLAEKG

SEQ ID NO: 5703 - DNA, 2523 bp, synthetic construct
  misc_feature 1..2523: note = Variant of DNA polymerase I from Thermus sp. strain 2.9
  source 1..2523: mol_type = other DNA
atgcaccatcatcatcatcatggcggtagcggcgtgttaccggtgttcgagcctaaaggtcgcgtgcttctggttgatggccatcatctcgcgtatcgtaacttctttgccctgaaaggattaaccaccagcctgggcgagccggtacagggtgtctacggctttgcaaagtcgctcctgaaagctctgaaagaagacggtgatgtggtgattgttgtctttgatgcgaaagcgccaagttttcgccacgaagcgtacgaagcttacaaagccgggcgtgctccaacgccggaagactttcctcgccaattggcgcttatgaaggaattagtggatttgcttggcctcgaacgcttggaagttcccggtttcgaggcagacgacgtattagcgactctcgcaaagaaagccgaacgtgagggctatgaagtccagatcttgacagcagatcgcgatcttttccagcttttatctccgcgcatctcggtgttacacccggaagggcatcgtatcaccccggaatggctctgggagaaatatggtttgcgtcccgaacaatgggtggattttcgcgccttagcaggcgatccgagcgacaatattccgggagttaaaggtatcggcgagaagacggcgctcaagctccttaaagaatgggggtcgttggagaacttgcttaagaatttagatcaggtcaaaccagagtcagtgcgtgagaagattcttgctcacctcgaagacctcaaattaagccgcgaattgtcccgtgtacgcaccgatttgccgctcgaagttgatttcggtcgccgccgcgaacctgactgggagggtcttaaagcgtttttagagcgtcttgaatttggttcgctcttgcatgaattcggccttttagaaagcccgttactggccgaagaagcaccttggccaccgcccgagggcgcgtttttaggttaccgtttgagtcgcccggaaccgatgtgggccgaattactggctcttgcagcgtctgcccagggacgtgtgtatcgcgcggaagaccctcatggtgcgctccgcggcctcttcgaagtccgtggactccttgccaaagacttagctgttgttgcattgcgcgaaggtcttgatttacctccgactgatgatccaatgcttcttgcgtacctcttggacccgtcaaacacgacgcccgaaggcgtagcccgtcgttacggcggcgagtggaccgaagatgcagcgaaacgcgcgttattggccgaacgtttgcacgaaaatttattaggacgtttgcaaggcgaggaacgtctcctctggctttacgaagaagtggagaaaccattgagtcgcgtgctcgcgcatatggaagctaccggtgtcaaattagacgtggcgtatttggagaatctcagccttgaagttgctgcccacatgcgccgcttggaggaagaagtattccgtttagcaggccgttcctttcgccttaactctcgcgatcagttagaacgtgtgttgttcgatgaacttggtctccctgatatcggcaagacagagaagaccggtaaacgtagcacttcagcggcggttttagaagctcttcgcgaagtccatcccattgtggacaagatcttgcagtaccgcgaaatggcgaaattgaaaggcacctatattgaccgtcttccggcattagtccacccgaaaacgggacgcctccatacccgcttcaaccaaacagccacggcgaccggtcgtttgtcctcctctgatccaaaccttcagaatattccagtacgtaccccattgggccagaagatccgccgtgcgtttgtagctgaggagggttggcgtttagtggccctcgattatcgtcaaattgaattacgtgtccttgcccatctttctggcgatgagaacctcatccgcgtgtttcaggaaggcaaagacattcacactcaaacggcaagctggatgtttggattatcagctgaagcgatcgatcctttgatgcgtcgtgcagcgaagaccatcaatttcggtgttctctacggtatgagtgcctttcgtttgtcgcaggaattaggcattccctatgaagaagctcaggcgttcattcagaaatactttcaaagctatcccaaagttaaagcatggatcgagaagactctccgtgaaggccgcacacgtggttacgtagagaccttatttggacgtcgccgctatgttcccgatttaaacgctcgcgtgaaaggcaagcgtgaagccgccgaacgcatggcgttcaacatgcctgtacagggcacggcagctgacctcatgaaacttgcaatggtgcgcctttttccacaattgcgtgaagttggtgcccgcatgctcttgcaggtccacgatgaactcttgttagaagcgccaaaagagcgtgcggaagaggtggcagccctcgcgaaagaagttatggaaggcgtgtggcccttagcggtgcctcttgaagtcgaagttggtattggcgaggattggctggctgccaaagga

SEQ ID NO: 5704 - protein, 841 aa, synthetic construct
  REGION 1..841: note = Variant of DNA polymerase I from Thermus sp. strain 2.9
MHHHHHHGGSGVLPVFEPKGRVLLVDGHHLAYRNFFALKGLTTSLGEPVQGVYGFAKSLLKALKEDGDVVIVVFDAKAPSFRHEAYEAYKAGRAPTPEDFPRQLALMKELVDLLGLERLEVPGFEADDVLATLAKKAEREGYEVQILTADRDLFQLLSPRISVLHPEGHRITPEWLWEKYGLRPEQWVDFRALAGDPSDNIPGVKGIGEKTALKLLKEWGSLENLLKNLDQVKPESVREKILAHLEDLKLSRELSRVRTDLPLEVDFGRRREPDWEGLKAFLERLEFGSLLHEFGLLESPLLAEEAPWPPPEGAFLGYRLSRPEPMWAELLALAASAQGRVYRAEDPHGALRGLFEVRGLLAKDLAVVALREGLDLPPTDDPMLLAYLLDPSNTTPEGVARRYGGEWTEDAAKRALLAERLHENLLGRLQGEERLLWLYEEVEKPLSRVLAHMEATGVKLDVAYLENLSLEVAAHMRRLEEEVFRLAGRSFRLNSRDQLERVLFDELGLPDIGKTEKTGKRSTSAAVLEALREVHPIVDKILQYREMAKLKGTYIDRLPALVHPKTGRLHTRFNQTATATGRLSSSDPNLQNIPVRTPLGQKIRRAFVAEEGWRLVALDYRQIELRVLAHLSGDENLIRVFQEGKDIHTQTASWMFGLSAEAIDPLMRRAAKTINFGVLYGMSAFRLSQELGIPYEEAQAFIQKYFQSYPKVKAWIEKTLREGRTRGYVETLFGRRRYVPDLNARVKGKREAAERMAFNMPVQGTAADLMKLAMVRLFPQLREVGARMLLQVHDELLLEAPKERAEEVAALAKEVMEGVWPLAVPLEVEVGIGEDWLAAKG

SEQ ID NO: 5705 - DNA, 2523 bp, synthetic construct
  misc_feature 1..2523: note = Variant of DNA polymerase I from Thermus sp. strain 2.9
  source 1..2523: mol_type = other DNA
atgcaccatcatcatcatcatggcggtagcggcgtgttaccggtgttcgagcctaaaggtcgcgtgcttctggttgatggccatcatctcgcgtatcgtaacttctttgccctgaaaggattaaccaccagcctgggcgagccggtacagggtgtctacggctttgcaaagtcgctcctgaaagctctgaaagaagacggtgatgtggtgattgttgtctttgatgcgaaagcgccaagttttcgccacgaagcgtacgaagcttacaaagccgggcgtgctccaacgccggaagactttcctcgccaattggcgcttatgaaggaattagtggatttgcttggcctcgaacgcttggaagttcccggtttcgaggcagacgacgtattagcgactctcgcaaagaaagccgaacgtgagggctatgaagtccagatcttgacagcagatcgcgatcttttccagcttttatctccgcgcatctcggtgttacacccggaagggcatcgtatcaccccggaatggctctgggagaaatatggtttgcgtcccgaacaatgggtggattttcgcgccttagcaggcgatccgagcgacaatattccgggagttaaaggtatcggcgagaagacggcgctcaagctccttaaagaatgggggtcgttggagaacttgcttaagaatttagatcaggtcaaaccagagtcagtgcgtgagaagattcttgctcacctcgaagacctcaaattaagccgcgaattgtcccgtgtacgcaccgatttgccgctcgaagttgatttcggtcgccgccgcgaacctgactgggagggtcttaaagcgtttttagagcgtcttgaatttggttcgctcttgcatgaattcggccttttagaaagcccgttactggccgaagaagcaccttggccaccgcccgagggcgcgtttttaggttaccgtttgagtcgcccggaaccgatgtgggccgaattactggctcttgcagcgtctgcccagggacgtgtgtatcgcgcggaagaccctcatggtgcgctccgcggcctcttcgaagtccgtggactccttgccaaagacttagctgttgttgcattgcgcgaaggtcttgatttacctccgactgatgatccaatgcttcttgcgtacctcttggacccgtcaaacacgacgcccgaaggcgtagcccgtcgttacggcggcgagtggaccgaagatgcagcgaaacgcgcgttattggccgaacgtttgcacgaaaatttattaggacgtttgcaaggcgaggaacgtctcctctggctttacgaagaagtggagaaaccattgagtcgcgtgctcgcgcatatggaagctaccggtgtcaaattagacgtggcgtatttggagaatctcagccttgaagttgctgcccacatgcgccgcttggaggaagaagtattccgtttagcaggccgttcctttcgccttaactctcgcgatcagttagaacgtgtgttgttcgatgaacttggtctccctcctatcggcaagacagagaagaccggtaaacgtagcacttcagcggcggttttagaagctcttcgcgaagtccatcccattgtggacaagatcttgcagtaccgcgaaatggcgaaattgaaaggcacctatattgaccgtcttccggcattagtccacccgaaaacgggacgcctccatacccgcttcaaccaaacagccacggcgaccggtcgtttgtcctcctctgatccaaaccttcagaatattccagtacgtaccccattgggccagaagatccgccgtgcgtttgtagctgaggagggttggcgtttagtggccctcgattatcgtcaaattgaattacgtgtccttgcccatctttctggcgatgagaacctcatccgcgtgtttcaggaaggcaaagacattcacactcaaacggcaagctggatgtttggattatcagctgaagcgatcgatcctttgatgcgtcgtgcagcgaagaccatcaatttcggtgttctctacggtatgagtgcctttcgtttgtcgcaggaatggggcattccctatgaagaagctcaggcgttcattcagaaatactttcaaagctatcccaaagttaaagcatggatcgagaagactctccgtgaaggccgcacacgtggttacgtagagaccttatttggacgtcgccgctatgttcccgatttaaacgctcgcgtgaaaggcaagcgtgaagccgccgaacgcatggcgttcaacatgcctgtacagggcacggcagctgacctcatgaaacttgcaatggtgcgcctttttccacaattgcgtgaagttggtgcccgcatgctcttgcaggtccacgatgaactcttgttagaagcgccaaaagagcgtgcggaagaggtggcagccctcgcgaaagaagttatggaaggcgtgtggcccttagcggtgcctcttgaagtcgaagttggtattggcgaggattggctggctgccaaagga

SEQ ID NO: 5706 - protein, 841 aa, synthetic construct
  REGION 1..841: note = Variant of DNA polymerase I from Thermus sp. strain 2.9
MHHHHHHGGSGVLPVFEPKGRVLLVDGHHLAYRNFFALKGLTTSLGEPVQGVYGFAKSLLKALKEDGDVVIVVFDAKAPSFRHEAYEAYKAGRAPTPEDFPRQLALMKELVDLLGLERLEVPGFEADDVLATLAKKAEREGYEVQILTADRDLFQLLSPRISVLHPEGHRITPEWLWEKYGLRPEQWVDFRALAGDPSDNIPGVKGIGEKTALKLLKEWGSLENLLKNLDQVKPESVREKILAHLEDLKLSRELSRVRTDLPLEVDFGRRREPDWEGLKAFLERLEFGSLLHEFGLLESPLLAEEAPWPPPEGAFLGYRLSRPEPMWAELLALAASAQGRVYRAEDPHGALRGLFEVRGLLAKDLAVVALREGLDLPPTDDPMLLAYLLDPSNTTPEGVARRYGGEWTEDAAKRALLAERLHENLLGRLQGEERLLWLYEEVEKPLSRVLAHMEATGVKLDVAYLENLSLEVAAHMRRLEEEVFRLAGRSFRLNSRDQLERVLFDELGLPPIGKTEKTGKRSTSAAVLEALREVHPIVDKILQYREMAKLKGTYIDRLPALVHPKTGRLHTRFNQTATATGRLSSSDPNLQNIPVRTPLGQKIRRAFVAEEGWRLVALDYRQIELRVLAHLSGDENLIRVFQEGKDIHTQTASWMFGLSAEAIDPLMRRAAKTINFGVLYGMSAFRLSQEWGIPYEEAQAFIQKYFQSYPKVKAWIEKTLREGRTRGYVETLFGRRRYVPDLNARVKGKREAAERMAFNMPVQGTAADLMKLAMVRLFPQLREVGARMLLQVHDELLLEAPKERAEEVAALAKEVMEGVWPLAVPLEVEVGIGEDWLAAKG

SEQ ID NO: 5707 - DNA, 2523 bp, synthetic construct
  misc_feature 1..2523: note = Variant of DNA polymerase I from Thermus sp. strain 2.9
  source 1..2523: mol_type = other DNA
atgcaccatcatcatcatcatggcggtagcggcgtgttaccggtgttcgagcctaaaggtcgcgtgcttctggttgatggccatcatctcgcgtatcgtaacttctttgccctgaaaggattaaccaccagcctgggcgagccggtacagggtgtctacggctttgcaaagtcgctcctgaaagctctgaaagaagacggtgatgtggtgattgttgtctttgatgcgaaagcgccaagttttcgccacgaagcgtacgaagcttacaaagccgggcgtgctccaacgccggaagactttcctcgccaattggcgcttatgaaggaattagtggatttgcttggcctcgaacgcttggaagttcccggtttcgaggcagacgacgtattagcgactctcgcaaagaaagccgaacgtgagggctatgaagtccagatcttgacagcagatcgcgatcttttccagcttttatctccgcgcatctcggtgttacacccggaagggcatcgtatcaccccggaatggctctgggagaaatatggtttgcgtcccgaacaatgggtggattttcgcgccttagcaggcgatccgagcgacaatattccgggagttaaaggtatcggcgagaagacggcgctcaagctccttaaagaatgggggtcgttggagaacttgcttaagaatttagatcaggtcaaaccagagtcagtgcgtgagaagattcttgctcacctcgaagacctcaaattaagccgcgaattgtcccgtgtacgcaccgatttgccgctcgaagttgatttcggtcgccgccgcgaacctgactgggagggtcttaaagcgtttttagagcgtcttgaatttggttcgctcttgcatgaattcggccttttagaaagcccgttactggccgaagaagcaccttggccaccgcccgagggcgcgtttttaggttaccgtttgagtcgcccggaaccgatgtgggccgaattactggctcttgcagcgtctgcccagggacgtgtgtatcgcgcggaagaccctcatggtgcgctccgcggcctcttcgaagtccgtggactccttgccaaagacttagctgttgttgcattgcgcgaaggtcttgatttacctccgactgatgatccaatgcttcttgcgtacctcttggacccgtcaaacacgacgcccgaaggcgtagcccgtcgttacggcggcgagtggaccgaagatgcagcgaaacgcgcgttattggccgaacgtttgcacgaaaatttattaggacgtttgcaaggcgaggaacgtctcctctggctttacgaagaagtggagaaaccattgagtcgcgtgctcgcgcatatggaagctaccggtgtcaaattagacgtggcgtatttggagaatctcagccttgaagttgctgcccacatgcgccgcttggaggaagaagtattccgtttagcaggccgttcctttcgccttaactctcgcgatcagttagaacgtgtgttgttcgatgaacttggtctccctcctatcggcaagacagagaagaccggtaaacgtagcacttcagcggcggttttagaagctcttcgcgaagtccatcccattgtggacaagatcttgcagtaccgcgaaatggcgaaattgaaaggcacctatattgaccgtcttccggcattagtccacccgaaaacgggacgcctccatacccgcttcaaccaaacagccacggcgaccggtcgtttgtcctcctctgatccaaaccttcagaatattccagtacgtaccccattgggccagaagatccgccgtgcgtttgtagctgaggagggttggacgttagtggccctcgattatcgtcaaattgaattacgtgtccttgcccatctttctggcgatgagaacctcatccgcgtgtttcaggaaggcaaagacattcacactcaaacggcaagctggatgtttggattatcagctgaagcgatcgatcctttgatgcgtcgtgcagcgaagaccatcaatttcggtgttctctacggtatgagtgcctttcgtttgtcgcaggaattaggcattccctatgaagaagctcaggcgttcattcagaaatactttcaaagctatcccaaagttaaagcatggatcgagaagactctccgtgaaggccgcacacgtggttacgtagagaccttatttggacgtcgccgctatgttcccgatttaaacgctcgcgtgaaaggcaagcgtgaagccgccgaacgcatggcgttcaacatgcctgtacagggcacggcagctgacctcatgaaacttgcaatggtgcgcctttttccacaattgcgtgaagttggtgcccgcatgctcttgcaggtccacgatgaactcttgttagaagcgccaaaagagcgtgcggaagaggtggcagccctcgcgaaagaagttatggaaggcgtgtggcccttagcggtgcctcttgaagtcgaagttggtattggcgaggattggctggctgccaaagga

SEQ ID NO: 5708 - protein, 841 aa, synthetic construct
  REGION 1..841: note = Variant of DNA polymerase I from Thermus sp. strain 2.9
MHHHHHHGGSGVLPVFEPKGRVLLVDGHHLAYRNFFALKGLTTSLGEPVQGVYGFAKSLLKALKEDGDVVIVVFDAKAPSFRHEAYEAYKAGRAPTPEDFPRQLALMKELVDLLGLERLEVPGFEADDVLATLAKKAEREGYEVQILTADRDLFQLLSPRISVLHPEGHRITPEWLWEKYGLRPEQWVDFRALAGDPSDNIPGVKGIGEKTALKLLKEWGSLENLLKNLDQVKPESVREKILAHLEDLKLSRELSRVRTDLPLEVDFGRRREPDWEGLKAFLERLEFGSLLHEFGLLESPLLAEEAPWPPPEGAFLGYRLSRPEPMWAELLALAASAQGRVYRAEDPHGALRGLFEVRGLLAKDLAVVALREGLDLPPTDDPMLLAYLLDPSNTTPEGVARRYGGEWTEDAAKRALLAERLHENLLGRLQGEERLLWLYEEVEKPLSRVLAHMEATGVKLDVAYLENLSLEVAAHMRRLEEEVFRLAGRSFRLNSRDQLERVLFDELGLPPIGKTEKTGKRSTSAAVLEALREVHPIVDKILQYREMAKLKGTYIDRLPALVHPKTGRLHTRFNQTATATGRLSSSDPNLQNIPVRTPLGQKIRRAFVAEEGWTLVALDYRQIELRVLAHLSGDENLIRVFQEGKDIHTQTASWMFGLSAEAIDPLMRRAAKTINFGVLYGMSAFRLSQELGIPYEEAQAFIQKYFQSYPKVKAWIEKTLREGRTRGYVETLFGRRRYVPDLNARVKGKREAAERMAFNMPVQGTAADLMKLAMVRLFPQLREVGARMLLQVHDELLLEAPKERAEEVAALAKEVMEGVWPLAVPLEVEVGIGEDWLAAKG

SEQ ID NO: 5709 - DNA, 2523 bp, synthetic construct
  misc_feature 1..2523: note = Variant of DNA polymerase I from Thermus sp. strain 2.9
  source 1..2523: mol_type = other DNA
atgcaccatcatcatcatcatggcggtagcggcgtgttaccggtgttcgagcctaaaggtcgcgtgcttctggttgatggccatcatctcgcgtatcgtaacttctttgccctgaaaggattaaccaccagcctgggcgagccggtacagggtgtctacggctttgcaaagtcgctcctgaaagctctgaaagaagacggtgatgtggtgattgttgtctttgatgcgaaagcgccaagttttcgccacgaagcgtacgaagcttacaaagccgggcgtgctccaacgccggaagactttcctcgccaattggcgcttatgaaggaattagtggatttgcttggcctcgaacgcttggaagttcccggtttcgaggcagacgacgtattagcgactctcgcaaagaaagccgaacgtgagggctatgaagtccagatcttgacagcagatcgcgatcttttccagcttttatctccgcgcatctcggtgttacacccggaagggcatcgtatcaccccggaatggctctgggagaaatatggtttgcgtcccgaacaatgggtggattttcgcgccttagcaggcgatccgagcgacaatattccgggagttaaaggtatcggcgagaagacggcgctcaagctccttaaagaatgggggtcgttggagaacttgcttaagaatttagatcaggtcaaaccagagtcagtgcgtgagaagattcttgctcacctcgaagacctcaaattaagccgcgaattgtcccgtgtacgcaccgatttgccgctcgaagttgatttcggccgccgccgcgaacctgactgggagggtcttaaagcgtttttagagcgtcttgaatttggttcgctcttgcatgaattcggccttttagaaagcccgttactggccgaagaagcaccttggccaccgcccgagggcgcgtttttaggttaccgtttgagtcgcccggaaccgatgtgggccgaattactggctcttgcagcgtctgcccagggacgtgtgtatcgcgcggaagaccctcatggtgcgctccgcggcctcttcgaagtccgtggactccttgccaaagacttagctgttgttgcattgcgcgaaggtcttgatttacctccgactgatgatccaatgcttcttgcgtacctcttggacccgtcaaacacgacgcccgaaggcgtagcccgtcgttacggcggcgagtggaccgaagatgcagcgaaacgcgcgttattggccgaacgtttgcacgcaaatttattaggacgtttgcaaggcgaggaacgtctcctctggctttacgaagaagtggagaaaccattgagtcgcgtgctcgcgcatatggaagctaccggtgtcaaattagacgtggcgtatttggagaatcttcaccttgaagttgctgcccatatgcgccgcttggaggaagaagtattccgtttagcaggccgttcctttcgccttaactctcgcgatcagttagaacgtgtgttgttcgatgaacttggtctccctcctatcggcaagacagagaagaccggtaaacgtagcacttcagcggcggttttagaagctcttcgcgaagtccatcccattgtggacaagatcttgcagtaccgcgaactggcgaaattgaaaggcacctatattgaccctcttccggcattagtccacccgaaaacgggacgcctccatacccgcttcaaccaaacagccacggcgaccggtcgtttgtccagttctgatccaaaccttcagaatattccagtacgtaccccattgggccagaagatccgccgtgcgtttgtagctgaggagggttggcgtttagtggccctcgattatcgtcaaattgaattacgtgtccttgcccatctttctggcgatgagaacctcatccgcgtgtttcaggaaggcaaagacattcacactcaaacggcaagctggatgtttggattatcagctgaagcgatcgatcctttgatgcgtcgtgcagcgaagaccatcaatttcggtgttctctacggtatgagtgcctttcgtttgtcgcaggaattaggcattccctatgaagaagctcaggcgttcattcagaaatactttcaaagctatcccaaagttaaagcatggatcgagaagactctccgcgaaggccgcacacgtggttacgtagagaccttatttggacgtcgccgctatgttcccgatttaaacgctcgcgtgaaaggcgtacgtgaagccgccgaacgcatggcgttcaacatgcctgtacagggcacggcagctgacctcatgaaacttgcaatggtgcgcctttttccacaattgcgtgaagttggtgcccgcatgctcttgcaggtccacgatgaactcttgttagaagcgccaaaagagcgtgcggaagaggtggcagccctcgcgaaagaagttatggaaggcgtgtggcccttagcggtgcctcttgaagtcgaagttggtattggcgaggattggctggctgccaaagga

SEQ ID NO: 5710 - protein, 841 aa, synthetic construct
  REGION 1..841: note = Variant of DNA polymerase I from Thermus sp. strain 2.9
MHHHHHHGGSGVLPVFEPKGRVLLVDGHHLAYRNFFALKGLTTSLGEPVQGVYGFAKSLLKALKEDGDVVIVVFDAKAPSFRHEAYEAYKAGRAPTPEDFPRQLALMKELVDLLGLERLEVPGFEADDVLATLAKKAEREGYEVQILTADRDLFQLLSPRISVLHPEGHRITPEWLWEKYGLRPEQWVDFRALAGDPSDNIPGVKGIGEKTALKLLKEWGSLENLLKNLDQVKPESVREKILAHLEDLKLSRELSRVRTDLPLEVDFGRRREPDWEGLKAFLERLEFGSLLHEFGLLESPLLAEEAPWPPPEGAFLGYRLSRPEPMWAELLALAASAQGRVYRAEDPHGALRGLFEVRGLLAKDLAVVALREGLDLPPTDDPMLLAYLLDPSNTTPEGVARRYGGEWTEDAAKRALLAERLHANLLGRLQGEERLLWLYEEVEKPLSRVLAHMEATGVKLDVAYLENLHLEVAAHMRRLEEEVFRLAGRSFRLNSRDQLERVLFDELGLPPIGKTEKTGKRSTSAAVLEALREVHPIVDKILQYRELAKLKGTYIDPLPALVHPKTGRLHTRFNQTATATGRLSSSDPNLQNIPVRTPLGQKIRRAFVAEEGWRLVALDYRQIELRVLAHLSGDENLIRVFQEGKDIHTQTASWMFGLSAEAIDPLMRRAAKTINFGVLYGMSAFRLSQELGIPYEEAQAFIQKYFQSYPKVKAWIEKTLREGRTRGYVETLFGRRRYVPDLNARVKGVREAAERMAFNMPVQGTAADLMKLAMVRLFPQLREVGARMLLQVHDELLLEAPKERAEEVAALAKEVMEGVWPLAVPLEVEVGIGEDWLAAKG

SEQ ID NO: 5711 - DNA, 2523 bp, synthetic construct
  misc_feature 1..2523: note = Variant of DNA polymerase I from Thermus sp. strain 2.9
  source 1..2523: mol_type = other DNA
atgcaccatcatcatcatcatggcggtagcggcgtgttaccggtgttcgagcctaaaggtcgcgtgcttctggttgatggccatcatctcgcgtatcgtaacttctttgccctgaaaggattaaccaccagcctgggcgagccggtacagggtgtctacggctttgcaaagtcgctcctgaaagctctgaaagaagacggtgatgtggtgattgttgtctttgatgcgaaagcgccaagttttcgccacgaagcgtacgaagcttacaaagccgggcgtgctccaacgccggaagactttcctcgccaattggcgcttatgaaggaattagtggatttgcttggcctcgaacgcttggaagttcccggtttcgaggcagacgacgtattagcgactctcgcaaagaaagccgaacgtgagggctatgaagtccagatcttgacagcagatcgcgatcttttccagcttttatctccgcgcatctcggtgttacacccggaagggcatcgtatcaccccggaatggctctgggagaaatatggtttgcgtcccgaacaatgggtggattttcgcgccttagcaggcgatccgagcgacaatattccgggagttaaaggtatcggcgagaagacggcgctcaagctccttaaagaatgggggtcgttggagaacttgcttaagaatttagatcaggtcaaaccagagtcagtgcgtgagaagattcttgctcacctcgaagacctcaaattaagccgcgaattgtcccgtgtacgcaccgatttgccgctcgaagttgatttcggtcgccgccgcgaacctgactgggagggtcttaaagcgtttttagagcgtcttgaatttggttcgctcttgcatgaattcggccttttagaaagcccgttactggccgaagaagcaccttggccaccgcccgagggcgcgtttttaggttaccgtttgagtcgcccggaaccgatgtgggccgaattactggctcttgcagcgtctgcccagggacgtgtgtatcgcgcggaagaccctcatggtgcgctccgcggcctcttcgaagtccgtggcctccttgccaaagacttagctgttgttgcattgcgcgaaggtcttgatttacctccgactgatgatccaatgcttcttgcgtacctcttggacccgtcaaacacgacgcccgaaggcgtagcccgtcgttacggcggcgagtggaccgaagatgcagccaaacgcgcgttattggccgaacgtttgcacgaaaatttattaggacgtttgcaaggcgaggaacgtctcctctggctttacgaagaagtggagaaaccattgagtcgcgtgctcgcgcatatggaagctaccggtgtcaaattagacgtggcgtatttggagaatctcagccttgaagttgctgcccacatgcgccgcttggaggaagaagtattccgtttagcaggccgttcctttcgccttaactctcgcgatcagttagaacgtgtgttgttcgatgaacttggtctccctcctatcggcaagacagagaagaccggtaaacgtagcacttcagcggcggttttagaagctcttcgcgaagtccatcccattgtggacaagatcttgcagtaccgcgaaatggcgaaattgaaaggcacctatattgaccgtcttccggcattagtccacccgaaaacgggacgcctccatacccgcttcaaccaaacagccacggcgaccggtcgtttgtcctcctctgatccaaaccttcagaatattccagtacgtaccccattgggccagaagatccgccgtgcgtttgtagctgaggagggttgggcgttagtggccctcgattatcgtcaaattgaattacgtgtccttgcccatctttctggcgatgagaacctcatccgcgtgtttcaggaaggcaaagacattcacactcaaacggcaagctggatgtttggattatcagctgaagcgatcgatcctttgatgcgtcgtgcagcgaagaccatcaatttcggtgttctctacggtatgagtgcctttcgtttgtcgcaggaattaggcattccctatgaagaagctcaggcgttcattcagaaatactttcaaagctatcccaaagttaaagcatggatcgagaagactctccgtgaaggccgcacacgtggttacgtagagaccttatttggacgtcgccgctatgttcccgatttaaacgctcgcgtgaaaggcaagcgtgaagccgccgaacgcatggcgttcaacatgcctgtacagggcacggcagctgacctcatgaaacttgcaatggtgcgcctttttccacaattgcgtgaagttggtgcccgcatggatttgcaggtccacgatgaactcttgttagaagcgccaaaagagcgtgcggaagaggtggcagccctcgcgaaagaagttatggaaggcgtgtggcccttagcggtgcctcttgaagtcgaagttggtattggcgaggattggctggctgccaaagga

SEQ ID NO: 5712 - protein, 841 aa, synthetic construct
  REGION 1..841: note = Variant of DNA polymerase I from Thermus sp. strain 2.9
MHHHHHHGGSGVLPVFEPKGRVLLVDGHHLAYRNFFALKGLTTSLGEPVQGVYGFAKSLLKALKEDGDVVIVVFDAKAPSFRHEAYEAYKAGRAPTPEDFPRQLALMKELVDLLGLERLEVPGFEADDVLATLAKKAEREGYEVQILTADRDLFQLLSPRISVLHPEGHRITPEWLWEKYGLRPEQWVDFRALAGDPSDNIPGVKGIGEKTALKLLKEWGSLENLLKNLDQVKPESVREKILAHLEDLKLSRELSRVRTDLPLEVDFGRRREPDWEGLKAFLERLEFGSLLHEFGLLESPLLAEEAPWPPPEGAFLGYRLSRPEPMWAELLALAASAQGRVYRAEDPHGALRGLFEVRGLLAKDLAVVALREGLDLPPTDDPMLLAYLLDPSNTTPEGVARRYGGEWTEDAAKRALLAERLHENLLGRLQGEERLLWLYEEVEKPLSRVLAHMEATGVKLDVAYLENLSLEVAAHMRRLEEEVFRLAGRSFRLNSRDQLERVLFDELGLPPIGKTEKTGKRSTSAAVLEALREVHPIVDKILQYREMAKLKGTYIDRLPALVHPKTGRLHTRFNQTATATGRLSSSDPNLQNIPVRTPLGQKIRRAFVAEEGWALVALDYRQIELRVLAHLSGDENLIRVFQEGKDIHTQTASWMFGLSAEAIDPLMRRAAKTINFGVLYGMSAFRLSQELGIPYEEAQAFIQKYFQSYPKVKAWIEKTLREGRTRGYVETLFGRRRYVPDLNARVKGKREAAERMAFNMPVQGTAADLMKLAMVRLFPQLREVGARMDLQVHDELLLEAPKERAEEVAALAKEVMEGVWPLAVPLEVEVGIGEDWLAAKG

SEQ ID NO: 5713 - DNA, 2523 bp, synthetic construct
  misc_feature 1..2523: note = Variant of DNA polymerase I from Thermus sp. strain 2.9
  source 1..2523: mol_type = other DNA
atgcaccatcatcatcatcatggcggtagcggcgtgttaccggtgttcgagcctaaaggtcgcgtgcttctggttgatggccatcatctcgcgtatcgtaacttctttgccctgaaaggattaaccaccagcctgggcgagccggtacagggtgtctacggctttgcaaagtcgctcctgaaagctctgaaagaagacggtgatgtggtgattgttgtctttgatgcgaaagcgccaagttttcgccacgaagcgtacgaagcttacaaagccgggcgtgctccaacgccggaagactttcctcgccaattggcgcttatgaaggaattagtggatttgcttggcctcgaacgcttggaagttcccggtttcgaggcagacgacgtattagcgactctcgcaaagaaagccgaacgtgagggctatgaagtccagatcttgacagcagatcgcgatcttttccagcttttatctccgcgcatctcggtgttacacccggaagggcatcgtatcaccccggaatggctctgggagaaatatggtttgcgtcccgaacaatgggtggattttcgcgccttagcaggcgatccgagcgacaatattccgggagttaaaggtatcggcgagaagacggcgctcaagctccttaaagaatgggggtcgttggagaacttgcttaagaatttagatcaggtcaaaccagagtcagtgcgtgagaagattcttgctcacctcgaagacctcaaattaagccgcgaattgtcccgtgtacgcaccgatttgccgctcgaagttgatttcggtcgccgccgcgaacctgactgggagggtcttaaagcgtttttagagcgtcttgaatttggttcgctcttgcatgaattcggccttttagaaagcccgttactggccgaagaagcaccttggccaccgcccgagggcgcgtttttaggttaccgtttgagtcgcccggaaccgatgtgggccgaattactggctcttgcagcgtctgcccagggacgtgtgtatcgcgcggaagaccctcatggtgcgctccgcggcctcttcgaagtccgtggcctccttgccaaagacttagctgttgttgcattgcgcgaaggtcttgatttacctccgactgatgatccaatgcttcttgcgtacctcttggacccgtcaaacacgacgcccgaaggcgtagcccgtcgttacggcggcgagtggaccgaagatgcaggcaaacgcgcgttattggccgaacgtttgcacgaaaatttattaggacgtttgcaaggcgaggagcgtctccgttggctttacgaagaagtggagaaaccattgagtcgcgtgctcgcgcatatggaagctaccggtgtcaaattagacgtggcgtatttggagaatctcagccttgaagttgctgcccacatgcgccgcttggaggaagaagtattccgtttagcaggccgttcctttcgccttaactctcgcgatcagttagaacgtgtgttgttcgatgaacttggtctccctcctatcggcaagacagagaagaccggtaaacgtagcacttcagcggcggttttagaagctcttcgcgaagtccatcccattgtggacaagatcttgcagtaccgcgaaatggcgaaattgaaaggcacctatattgaccgtcttccggcattagtccacccgaaaacgggacgcctccatacccgcttcaaccaaacagccacggcgaccggtcgtttgtcctcctctgatccaaaccttcagaatattccagtacgtaccccattgggccagaagatccgccgtgcgtttgtagctgaggagggttggcgtttagtggccctcgattatcgtcaaattgaattacgtgtccttgcccatctttctggcgatgagaacctcatccgcgtgtttcaggaaggcaaagacattcacactcaaacggcaagctggatgtttggattatcagctgaagcgatcgatcctttgatgcgtcgtgcagcgaagaccatcaatttcggtgttctctacggtatgagtgcctttcgtttgtcgcaggaattaggcattccctatgaagaagctcaggcgttcattcagaaatactttcaaagctatcccaaagttaaagcatggatcgagaagactctccgtgaaggccgcacacgtggttacgtagagaccttatttggacgtcgccgctatgttcccgatttaaacggtcgcgtgaaaggcaagcgtgaagccgccgaacgcatggcgttcaacatgcctgtacagggcacggcagctgacctcatgaaacttgcaatggtgcgcctttttccacaattgcgtgaagttggtgcccgcatgctgttgcaggtccacgatgaactcttgttagaagcgccaaaagagcgtgcggaagaggtggcagccctcgcgaaagaagttatggaaggcgtgtggcccttagcggtgcctcttgaagtcgaagttggtattggcgaggattggctggctgccaaagga

SEQ ID NO: 5714 - protein, 841 aa, synthetic construct
  REGION 1..841: note = Variant of DNA polymerase I from Thermus sp. strain 2.9
MHHHHHHGGSGVLPVFEPKGRVLLVDGHHLAYRNFFALKGLTTSLGEPVQGVYGFAKSLLKALKEDGDVVIVVFDAKAPSFRHEAYEAYKAGRAPTPEDFPRQLALMKELVDLLGLERLEVPGFEADDVLATLAKKAEREGYEVQILTADRDLFQLLSPRISVLHPEGHRITPEWLWEKYGLRPEQWVDFRALAGDPSDNIPGVKGIGEKTALKLLKEWGSLENLLKNLDQVKPESVREKILAHLEDLKLSRELSRVRTDLPLEVDFGRRREPDWEGLKAFLERLEFGSLLHEFGLLESPLLAEEAPWPPPEGAFLGYRLSRPEPMWAELLALAASAQGRVYRAEDPHGALRGLFEVRGLLAKDLAVVALREGLDLPPTDDPMLLAYLLDPSNTTPEGVARRYGGEWTEDAGKRALLAERLHENLLGRLQGEERLRWLYEEVEKPLSRVLAHMEATGVKLDVAYLENLSLEVAAHMRRLEEEVFRLAGRSFRLNSRDQLERVLFDELGLPPIGKTEKTGKRSTSAAVLEALREVHPIVDKILQYREMAKLKGTYIDRLPALVHPKTGRLHTRFNQTATATGRLSSSDPNLQNIPVRTPLGQKIRRAFVAEEGWRLVALDYRQIELRVLAHLSGDENLIRVFQEGKDIHTQTASWMFGLSAEAIDPLMRRAAKTINFGVLYGMSAFRLSQELGIPYEEAQAFIQKYFQSYPKVKAWIEKTLREGRTRGYVETLFGRRRYVPDLNGRVKGKREAAERMAFNMPVQGTAADLMKLAMVRLFPQLREVGARMLLQVHDELLLEAPKERAEEVAALAKEVMEGVWPLAVPLEVEVGIGEDWLAAKG

SEQ ID NO: 5715 - DNA, 2523 bp, synthetic construct
  misc_feature 1..2523: note = Variant of DNA polymerase I from Thermus sp. strain 2.9
  source 1..2523: mol_type = other DNA
atgcaccatcatcatcatcatggcggtagcggcgtgttaccggtgttcgagcctaaaggtcgcgtgcttctggttgatggccatcatctcgcgtatcgtaacttctttgccctgaaaggattaaccaccagcctgggcgagccggtacagggtgtctacggctttgcaaagtcgctcctgaaagctctgaaagaagacggtgatgtggtgattgttgtctttgatgcgaaagcgccaagttttcgccacgaagcgtacgaagcttacaaagccgggcgtgctccaacgccggaagactttcctcgccaattggcgcttatgaaggaattagtggatttgcttggcctcgaacgcttggaagttcccggtttcgaggcagacgacgtattagcgactctcgcaaagaaagccgaacgtgagggctatgaagtccagatcttgacagcagatcgcgatcttttccagcttttatctccgcgcatctcggtgttacacccggaagggcatcgtatcaccccggaatggctctgggagaaatatggtttgcgtcccgaacaatgggtggattttcgcgccttagcaggcgatccgagcgacaatattccgggagttaaaggtatcggcgagaagacggcgctcaagctccttaaagaatgggggtcgttggagaacttgcttaagaatttagatcaggtcaaaccagagtcagtgcgtgagaagattcttgctcacctcgaagacctcaaattaagccgcgaattgtcccgtgtacgcaccgatttgccgctcgaagttgatttcggtcgccgccgcgaacctgactgggagggtcttaaagcgtttttagagcgtcttgaatttggttcgctcttgcatgaattcggccttttagaaagcccgttactggccgaagaagcaccttggccaccgcccgagggcgcgtttttaggttaccgtttgagtcgcccggaaccgatgtgggccgaattactggctcttgcagcgtctgcccagggacgtgtgtatcgcgcggaagaccctcatggtgcgctccgcggcctcttcgaagtccgtggcctccttgccaaagacttagctgttgttgcattgcgcgaaggtcttgatttacctccgactgatgatccaatgcttcttgcgtacctcttggacccgtcaaacacgacgcccgaaggcgtagcccgtcgttacggcggcgagtggaccgaagatgcagccaaacgcgcgttattggccgaacgtttgcacgaaaatttattaggacgtttgcaaggcgaggagcgtctccgttggctttacgaagaagtggagaaaccattgagtcgcgtgctcgcgcatatggaagctaccggtgtcaaattagacgtggcgtatttggagaatctcagccttgaagttgctgcccacatgcgccgcttggaggaagaagtattccgtttagcaggccgttcctttcgccttaactctcgcgatcagttagaacgtgtgttgttcgatgaacttggtctccctcctatcggcaagacagagaagaccggtaaacgtagcacttcagcggcggttttagaagctcttcgcgaagtccatcccattgtggacaagatcttgcagtaccgcgaaatggcgaaattgaaaggcacctatattgaccgtcttccggcattagtccacccgaaaacgggacgcctccatacccgcttcaaccaaacagccacggcgaccggtcgtttgtcctcctctgatccaaaccttcagaatattccagtacgtaccccattgggccagaagatccgccgtgcgtttgtagctgagccgggttgggcgttagtggccctcgattatcgtcaaattgaattacgtgtccttgcccatctttctggcgatgagaacctcatccgcgtgtttcaggaaggcaaagacattcacactcaaacggcaagctggatgtttggattatcagctgaagcgatcgatcctttgatgcgtcgtgcagcgaagaccatcaatttcggtgttctctacggtatgagtgcctttcgtttgtcgcaggaattaggcattcccctggaagaagctcaggctttcattcagaaatactttcaaagctatcccaaagttaaagcatggatcgagaagactctccgtgaaggccgcacacgtggttacgtagagaccttatttggacgtcgccgctatgttcccgatttaaacgctcgcgtgaaaggcaagcgtgaagccgccgaacgcatggcgttcaacatgcctgtacagggcacggcagctgacctcatgaaacttgcaatggtgcgcctttttccacaattgcgtgaagttggtgcccgcatgctgttgcaggtccacgatgaactcttgttagaagcgccaaaagagcgtgcggaagaggtggcagccctcgcgaaagaagttatggaaggcgtgtggcccttagcggtgcctcttgaagtcgaagttggtattggcgaggattggctggctgccaaagga

SEQ ID NO: 5716 - protein, 841 aa, synthetic construct
  REGION 1..841: note = Variant of DNA polymerase I from Thermus sp. strain 2.9
MHHHHHHGGSGVLPVFEPKGRVLLVDGHHLAYRNFFALKGLTTSLGEPVQGVYGFAKSLLKALKEDGDVVIVVFDAKAPSFRHEAYEAYKAGRAPTPEDFPRQLALMKELVDLLGLERLEVPGFEADDVLATLAKKAEREGYEVQILTADRDLFQLLSPRISVLHPEGHRITPEWLWEKYGLRPEQWVDFRALAGDPSDNIPGVKGIGEKTALKLLKEWGSLENLLKNLDQVKPESVREKILAHLEDLKLSRELSRVRTDLPLEVDFGRRREPDWEGLKAFLERLEFGSLLHEFGLLESPLLAEEAPWPPPEGAFLGYRLSRPEPMWAELLALAASAQGRVYRAEDPHGALRGLFEVRGLLAKDLAVVALREGLDLPPTDDPMLLAYLLDPSNTTPEGVARRYGGEWTEDAAKRALLAERLHENLLGRLQGEERLRWLYEEVEKPLSRVLAHMEATGVKLDVAYLENLSLEVAAHMRRLEEEVFRLAGRSFRLNSRDQLERVLFDELGLPPIGKTEKTGKRSTSAAVLEALREVHPIVDKILQYREMAKLKGTYIDRLPALVHPKTGRLHTRFNQTATATGRLSSSDPNLQNIPVRTPLGQKIRRAFVAEPGWALVALDYRQIELRVLAHLSGDENLIRVFQEGKDIHTQTASWMFGLSAEAIDPLMRRAAKTINFGVLYGMSAFRLSQELGIPLEEAQAFIQKYFQSYPKVKAWIEKTLREGRTRGYVETLFGRRRYVPDLNARVKGKREAAERMAFNMPVQGTAADLMKLAMVRLFPQLREVGARMLLQVHDELLLEAPKERAEEVAALAKEVMEGVWPLAVPLEVEVGIGEDWLAAKG

SEQ ID NO: 5717 - DNA, 2523 bp, synthetic construct
  misc_feature 1..2523: note = Variant of DNA polymerase I from Thermus sp. strain 2.9
  source 1..2523: mol_type = other DNA
atgcaccatcatcatcatcatggcggtagcggcgtgttaccggtgttcgagcctaaaggtcgcgtgcttctggttgatggccatcatctcgcgtatcgtaacttctttgccctgaaaggattaaccaccagcctgggcgagccggtacagggtgtctacggctttgcaaagtcgctcctgaaagctctgaaagaagacggtgatgtggtgattgttgtctttgatgcgaaagcgccaagttttcgccacgaagcgtacgaagcttacaaagccgggcgtgctccaacgccggaagactttcctcgccaattggcgcttatgaaggaattagtggatttgcttggcctcgaacgcttggaagttcccggtttcgaggcagacgacgtattagcgactctcgcaaagaaagccgaacgtgagggctatgaagtccagatcttgacagcagatcgcgatcttttccagcttttatctccgcgcatctcggtgttacacccggaagggcatcgtatcaccccggaatggctctgggagaaatatggtttgcgtcccgaacaatgggtggattttcgcgccttagcaggcgatccgagcgacaatattccgggagttaaaggtatcggcgagaagacggcgctcaagctccttaaagaatgggggtcgttggagaacttgcttaagaatttagatcaggtcaaaccagagtcagtgcgtgagaagattcttgctcacctcgaagacctcaaattaagccgcgaattgtcccgtgtacgcaccgatttgccgctcgaagttgatttcggtcgccgccgcgaacctgactgggagggtcttaaagcgtttttagagcgtcttgaatttggttcgctcttgcatgaattcggccttttagaaagcccgttactggccgaagaagcaccttggccaccgcccgagggcgcgtttttaggttaccgtttgagtcgcccggaaccgatgtgggccgaattactggctcttgcagcgtctgcccagggacgtgtgtatcgcgcggaagaccctcatggtgcgctccgcggcctcttcgaagtccgtggcctccttgccaaagacttagctgttgttgcattgcgcgaaggtcttgatttacctccgactgatgatccaatgcttcttgcgtacctcttggacccgtcaaacacgacgcccgaaggcgtagcccgtcgttacggcggcgagtggaccgaagatgcagccaaacgcgcgttattggccgaacgtttgcacgaaaatttattaggacgtttgcaaggcgaggagcgtctcctgtggctttacgaagaagtggagaaaccattgagtcgcgtgctcgcgcatatggaagctaccggtgtcaaattagacgtggcgtatttggagaatctcagccttgaagttgctgcccacatgcgccgcttggaggaagaagtattccgtttagcaggccgttcctttcgccttaactctcgcgatcagttagaacgtgtgttgttcgatgaacttggtctccctcctatcggcaagacagagaagaccggtaaacgtagcacttcagcggcggttttagaagctcttcgcgaagtccatcccattgtggacaagatcttgcagtaccgcgaaatggcgaaattgaaaggcacctatattgaccgtcttccggcattagtccacccgaaaacgggacgcctccatacccgcttcaaccaaacagccacggcgaccggtcgtttgtcctcctctgatccaaaccttcagaatattccagtacgtaccccattgggccagaagatccgccgtgcgtttgtagctgaggagggttgggcgttagtggccctcgattatcgtcaaattgaattacgtgtccttgcccatctttctggcgatgagaacctcatccgcgtgtttcaggaaggcaaagacattcacactcaaacggcaagctggatgtttggattatcagctgaagcgatcgatcctttgatgcgtcgtgcagcgaagaccatcaatttcggtgttctctacggtatgagtgcctttcgtttgtcgcaggaattaggcattccctatgaagaagctcaggcgttcattcagaaatactttcaaagctatcccaaagttaaagcatggatcgagaagactctccgtgaaggccgcacacgtggttacgtagagaccttatttggacgtcgccgctatgttcccgatttaaacggtcgcgtgaaaggcaagcgtgaagccgccgaacgcatggcgttcaacatgcctgtacagggcacggcagctgacctcatgaaacttgcaatggtgcgcctttttccacaattgcgtgaagttggtgcccgcatgctgttgcaggtccacgatgaactcttgttagaagcgccaaaagagcgtgcggaagaggtggcagccctcgcgaaagaagttatggaaggcgtgtggcccttagcggtgcctcttgaagtcgaagttggtattggcgaggattggctggctgccaaagga

SEQ ID NO: 5718 - protein, 841 aa, synthetic construct
  REGION 1..841: note = Variant of DNA polymerase I from Thermus sp. strain 2.9
MHHHHHHGGSGVLPVFEPKGRVLLVDGHHLAYRNFFALKGLTTSLGEPVQGVYGFAKSLLKALKEDGDVVIVVFDAKAPSFRHEAYEAYKAGRAPTPEDFPRQLALMKELVDLLGLERLEVPGFEADDVLATLAKKAEREGYEVQILTADRDLFQLLSPRISVLHPEGHRITPEWLWEKYGLRPEQWVDFRALAGDPSDNIPGVKGIGEKTALKLLKEWGSLENLLKNLDQVKPESVREKILAHLEDLKLSRELSRVRTDLPLEVDFGRRREPDWEGLKAFLERLEFGSLLHEFGLLESPLLAEEAPWPPPEGAFLGYRLSRPEPMWAELLALAASAQGRVYRAEDPHGALRGLFEVRGLLAKDLAVVALREGLDLPPTDDPMLLAYLLDPSNTTPEGVARRYGGEWTEDAAKRALLAERLHENLLGRLQGEERLLWLYEEVEKPLSRVLAHMEATGVKLDVAYLENLSLEVAAHMRRLEEEVFRLAGRSFRLNSRDQLERVLFDELGLPPIGKTEKTGKRSTSAAVLEALREVHPIVDKILQYREMAKLKGTYIDRLPALVHPKTGRLHTRFNQTATATGRLSSSDPNLQNIPVRTPLGQKIRRAFVAEEGWALVALDYRQIELRVLAHLSGDENLIRVFQEGKDIHTQTASWMFGLSAEAIDPLMRRAAKTINFGVLYGMSAFRLSQELGIPYEEAQAFIQKYFQSYPKVKAWIEKTLREGRTRGYVETLFGRRRYVPDLNGRVKGKREAAERMAFNMPVQGTAADLMKLAMVRLFPQLREVGARMLLQVHDELLLEAPKERAEEVAALAKEVMEGVWPLAVPLEVEVGIGEDWLAAKG

SEQ ID NO: 5719 - DNA, 2523 bp, synthetic construct
  misc_feature 1..2523: note = Variant of DNA polymerase I from Thermus sp. strain 2.9
  source 1..2523: mol_type = other DNA
atgcaccatcatcatcatcatggcggtagcggcgtgttaccggtgttcgagcctaaaggtcgcgtgcttctggttgatggccatcatctcgcgtatcgtaacttctttgccctgaaaggattaaccaccagcctgggcgagccggtacagggtgtctacggctttgcaaagtcgctcctgaaagctctgaaagaagacggtgatgtggtgattgttgtctttgatgcgaaagcgccaagttttcgccacgaagcgtacgaagcttacaaagccgggcgtgctccaacgccggaagactttcctcgccaattggcgcttatgaaggaattagtggatttgcttggcctcgaacgcttggaagttcccggtttcgaggcagacgacgtattagcgactctcgcaaagaaagccgaacgtgagggctatgaagtccagatcttgacagcagatcgcgatcttttccagcttttatctccgcgcatctcggtgttacacccggaagggcatcgtatcaccccggaatggctctgggagaaatatggtttgcgtcccgaacaatgggtggattttcgcgccttagcaggcgatccgagcgacaatattccgggagttaaaggtatcggcgagaagacggcgctcaagctccttaaagaatgggggtcgttggagaacttgcttaagaatttagatcaggtcaaaccagagtcagtgcgtgagaagattcttgctcacctcgaagacctcaaattaagccgcgaattgtcccgtgtacgcaccgatttgccgctcgaagttgatttcggtcgccgccgcgaacctgactgggagggtcttaaagcgtttttagagcgtcttgaatttggttcgctcttgcatgaattcggccttttagaaagcccgttactggccgaagaagcaccttggccaccgcccgagggcgcgtttttaggttaccgtttgagtcgcccggaaccgatgtgggccgaattactggctcttgcagcgtctgcccagggacgtgtgtatcgcgcggaagaccctcatggtgcgctccgcggcctcttcgaagtccgtggactccttgccaaagacttagctgttgttgcattgcgcgaaggtcttgatttacctccgactgatgatccaatgcttcttgcgtacctcttggacccgtcaaacacgacgcccgaaggcgtagcccgtcgttacggcggcgagtggcgtgaagatgcagcgaaacgcgcgttattggccgaacgtttgcacgaaaatttattaggacgtttgcaaggcgaggaacgtctcctctggctttacgaagaagtggagaaaccattgagtcgcgtgctcgcgcatatggaagctaccggtgtcaaattagacgtggcgtatttggagaatctcagccttgaagttgctgcccacatgcgccgcttggaggaagaagtattccgtttagcaggccgttcctttcgccttaactctcgcgatcagttagaacgtgtgttgttcgatgaacttggtctccctcctatcggcaagacagagaagaccggtaaacgtagcacttcagcggcggttttagaagctcttcgcgaagtccatcccattgtggacaagatcttgcagtaccgcgaaatggcgaaattgaaaggcacctatattgaccgtcttccggcattagtccacccgaaaacgggacgcctccatacccgcttcaaccaaacagccacggcgaccggtcgtttgtcctcctctgatccaaaccttcagaatattccagtacgtaccccattgggccagaagatccgccgtgcgtttgtagctgaggagggttggcgtttagtggccctcgattatcgtcaaattgaattacgtgtccttgcccatctttctggcgatgagaacctcatccgcgtgtttcaggaaggcaaagacattcacactcaaacggcaagctggatgtttggattatcagctgaagcgatcgatcctttgatgcgtcgtgcagcgaagaccatcaatttcggtgttctctacggtatgagtgcctttcgtttgtcgcaggaattaggcattccctatgaagaagctcaggcgttcattcagaaatactttcaaagctatcccaaagttaaagcatggatcgagaagactctccgtgaaggccgcacacgtggttacgtagagaccttatttggacgtcgccgctatgttcccgatttaaacgctcgcgtgaaaggcaagcgtgaagccgccgaacgcatggcgttcaacatgcctgtacagggcacggcagctgacctcatgaaacttgcaatggtgcgcctttttccacaattgcgtgaagttggtgcccgcatgctcttgcaggtccacgatgaactcttgttagaagcgccaaaagagcgtgcggaagaggtggcagccctcgcgaaagaagttatggaaggcgtgtggcccttagcggtgcctcttgaagtcgaagttggtattggcgaggattggctggctgccaaagga

SEQ ID NO: 5720 - protein, 841 aa, synthetic construct
  REGION 1..841: note = Variant of DNA polymerase I from Thermus sp. strain 2.9
MHHHHHHGGSGVLPVFEPKGRVLLVDGHHLAYRNFFALKGLTTSLGEPVQGVYGFAKSLLKALKEDGDVVIVVFDAKAPSFRHEAYEAYKAGRAPTPEDFPRQLALMKELVDLLGLERLEVPGFEADDVLATLAKKAEREGYEVQILTADRDLFQLLSPRISVLHPEGHRITPEWLWEKYGLRPEQWVDFRALAGDPSDNIPGVKGIGEKTALKLLKEWGSLENLLKNLDQVKPESVREKILAHLEDLKLSRELSRVRTDLPLEVDFGRRREPDWEGLKAFLERLEFGSLLHEFGLLESPLLAEEAPWPPPEGAFLGYRLSRPEPMWAELLALAASAQGRVYRAEDPHGALRGLFEVRGLLAKDLAVVALREGLDLPPTDDPMLLAYLLDPSNTTPEGVARRYGGEWREDAAKRALLAERLHENLLGRLQGEERLLWLYEEVEKPLSRVLAHMEATGVKLDVAYLENLSLEVAAHMRRLEEEVFRLAGRSFRLNSRDQLERVLFDELGLPPIGKTEKTGKRSTSAAVLEALREVHPIVDKILQYREMAKLKGTYIDRLPALVHPKTGRLHTRFNQTATATGRLSSSDPNLQNIPVRTPLGQKIRRAFVAEEGWRLVALDYRQIELRVLAHLSGDENLIRVFQEGKDIHTQTASWMFGLSAEAIDPLMRRAAKTINFGVLYGMSAFRLSQELGIPYEEAQAFIQKYFQSYPKVKAWIEKTLREGRTRGYVETLFGRRRYVPDLNARVKGKREAAERMAFNMPVQGTAADLMKLAMVRLFPQLREVGARMLLQVHDELLLEAPKERAEEVAALAKEVMEGVWPLAVPLEVEVGIGEDWLAAKG

SEQ ID NO: 5721 - DNA, 2523 bp, synthetic construct
  misc_feature 1..2523: note = Variant of DNA polymerase I from Thermus sp. strain 2.9
  source 1..2523: mol_type = other DNA
atgcaccatcatcatcatcatggcggtagcggcgtgttaccggtgttcgagcctaaaggtcgcgtgcttctggttgatggccatcatctcgcgtatcgtaacttctttgccctgaaaggattaaccaccagcctgggcgagccggtacagggtgtctacggctttgcaaagtcgctcctgaaagctctgaaagaagacggtgatgtggtgattgttgtctttgatgcgaaagcgccaagttttcgccacgaagcgtacgaagcttacaaagccgggcgtgctccaacgccggaagactttcctcgccaattggcgcttatgaaggaattagtggatttgcttggcctcgaacgcttggaagttcccggtttcgaggcagacgacgtattagcgactctcgcaaagaaagccgaacgtgagggctatgaagtccagatcttgacagcagatcgcgatcttttccagcttttatctccgcgcatctcggtgttacacccggaagggcatcgtatcaccccggaatggctctgggagaaatatggtttgcgtcccgaacaatgggtggattttcgcgccttagcaggcgatccgagcgacaatattccgggagttaaaggtatcggcgagaagacggcgctcaagctccttaaagaatgggggtcgttggagaacttgcttaagaatttagatcaggtcaaaccagagtcagtgcgtgagaagattcttgctcacctcgaagacctcaaattaagccgcgaattgtcccgtgtacgcaccgatttgccgctcgaagttgatttcggtcgccgccgcgaacctgactgggagggtcttaaagcgtttttagagcgtcttgaatttggttcgctcttgcatgaattcggccttttagaaagcccgttactggccgaagaagcaccttggccaccgcccgagggcgcgtttttaggttaccgtttgagtcgcccggaaccgatgtgggccgaattactggctcttgcagcgtctgcccagggacgtgtgtatcgcgcggaagaccctcatggtgcgctccgcggcctcttcgaagtccgtggactccttgccaaagacttagctgttgttgcattgcgcgaaggtcttgatttacctccgactgatgatccaatgcttcttgcgtacctcttggacccgtcaaacacgacgcccgaaggcgtagcccgtcgttacggcggcgagtggaccgaagatgcagcgaaacgcgcgttattggccgaacgtttgcacgaaaatttattaggacgtttgcaaggcgaggaacgtctcctctggctttacgaagaagtggagaaaccattgagtcgcgtgctcgcgcatatggaagctaccggtgtcaaattagacgtggcgtatttggagaatctcagccttgaagttgctgcccacatgcgccgcttggaggaagaagtattccgtttagcaggccgttcctttcgccttaactctcgcgatcagttagaacgtgtgttgttcgatgaacttggtctccctcctatcggcaagacagagaagaccggtaaacgtagcacttcagcggcggttttagaagctcttcgcgaagtccatcccattgtggacaagatcttgcagtaccgcgaaatggcgaaattgaaaggcacctatattgaccgtcttccggcattagtccacccgaaaacgggacgcctccatacccgcttcaaccaaacagccacggcgaccggtcgtttgtcctcctctgatccaaaccttcagaatattccagtacgtaccccattgggccagaagatccgccgtgcgtttgtagctgaggagggttggcgtttagtggccctcgattatcgtcaaattgaattacgtgtccttgcccatctttctggcgatgagaacctcatccgcgtgtttcaggaaggcaaagacattcacactcaaacggcaagctggatgtttggattatcagctgaagcgatcgatcctttgatgcgtcgtgcagcgaagaccatcaatttcggtgttctctacggtatgagtgcctttcgtttgtcgcaggaattaggcattccctatgaagaagctcaggcgttcattcagaaatactttcaaagctatcccaaagttaaagcatggatcgagaagactctccgtgaaggccgcacacgtggttacgtagagaccttatttggacgtcgccgctatgttcccgatttaaacgctcgcgtgaaaggcaagcgtgaagccgccgaacgcatggcgttcaacatgcctgtacagggcacggcagctgacctcatgaaacttgcaatggtgcgcctttttccacaattgcgtgaagttggtgcccgcatgctcttgcaggtccacgatgaactcttgttagaagcgccaaaagagcgtgcggaagaggtggcagccctcgcgaaagaagttatggaaggcgtgtggcccttagcggtgcctcttgaagtcgaagttggtattggcgaggattggctgactgccaaagga

SEQ ID NO: 5722 - protein, 841 aa, synthetic construct
  REGION 1..841: note = Variant of DNA polymerase I from Thermus sp. strain 2.9
MHHHHHHGGSGVLPVFEPKGRVLLVDGHHLAYRNFFALKGLTTSLGEPVQGVYGFAKSLLKALKEDGDVVIVVFDAKAPSFRHEAYEAYKAGRAPTPEDFPRQLALMKELVDLLGLERLEVPGFEADDVLATLAKKAEREGYEVQILTADRDLFQLLSPRISVLHPEGHRITPEWLWEKYGLRPEQWVDFRALAGDPSDNIPGVKGIGEKTALKLLKEWGSLENLLKNLDQVKPESVREKILAHLEDLKLSRELSRVRTDLPLEVDFGRRREPDWEGLKAFLERLEFGSLLHEFGLLESPLLAEEAPWPPPEGAFLGYRLSRPEPMWAELLALAASAQGRVYRAEDPHGALRGLFEVRGLLAKDLAVVALREGLDLPPTDDPMLLAYLLDPSNTTPEGVARRYGGEWTEDAAKRALLAERLHENLLGRLQGEERLLWLYEEVEKPLSRVLAHMEATGVKLDVAYLENLSLEVAAHMRRLEEEVFRLAGRSFRLNSRDQLERVLFDELGLPPIGKTEKTGKRSTSAAVLEALREVHPIVDKILQYREMAKLKGTYIDRLPALVHPKTGRLHTRFNQTATATGRLSSSDPNLQNIPVRTPLGQKIRRAFVAEEGWRLVALDYRQIELRVLAHLSGDENLIRVFQEGKDIHTQTASWMFGLSAEAIDPLMRRAAKTINFGVLYGMSAFRLSQELGIPYEEAQAFIQKYFQSYPKVKAWIEKTLREGRTRGYVETLFGRRRYVPDLNARVKGKREAAERMAFNMPVQGTAADLMKLAMVRLFPQLREVGARMLLQVHDELLLEAPKERAEEVAALAKEVMEGVWPLAVPLEVEVGIGEDWLTAKG

SEQ ID NO: 5723 - DNA, 2523 bp, synthetic construct
  misc_feature 1..2523: note = Variant of DNA polymerase I from Thermus sp. strain 2.9
  source 1..2523: mol_type = other DNA
atgcaccatcatcatcatcatggcggtagcggcgtgttaccggtgttcgagcctaaaggtcgcgtgcttctggttgatggccatcatctcgcgtatcgtaacttctttgccctgaaaggattaaccaccagcctgggcgagccggtacagggtgtctacggctttgcaaagtcgctcctgaaagctctgaaagaagacggtgatgtggtgattgttgtctttgatgcgaaagcgccaagttttcgccacgaagcgtacgaagcttacaaagccgggcgtgctccaacgccggaagactttcctcgccaattggcgcttatgaaggaattagtggatttgcttggcctcgaacgcttggaagttcccggtttcgaggcagacgacgtattagcgactctcgcaaagaaagccgaacgtgagggctatgaagtccagatcttgacagcagatcgcgatcttttccagcttttatctccgcgcatctcggtgttacacccggaagggcatcgtatcaccccggaatggctctgggagaaatatggtttgcgtcccgaacaatgggtggattttcgcgccttagcaggcgatccgagcgacaatattccgggagttaaaggtatcggcgagaagacggcgctcaagctccttaaagaatgggggtcgttggagaacttgcttaagaatttagatcaggtcaaaccagagtcagtgcgtgagaagattcttgctcacctcgaagacctcaaattaagccgcgaattgtcccgtgtacgcaccgatttgccgctcgaagttgatttcggtcgccgccgcgaacctgactgggagggtcttaaagcgtttttagagcgtcttgaatttggttcgctcttgcatgaattcggccttttagaaagcccgttactggccgaagaagcaccttggccaccgcccgagggcgcgtttttaggttaccgtttgagtcgcccggaaccgatgtgggccgaattactggctcttgcagcgtctgcccagggacgtgtgtatcgcgcggaagaccctcatggtgcgctccgcggcctcttcgaagtccgtggactccttgccaaagacttagctgttgttgcattgcgcgaaggtcttgatttacctccgactgatgatccaatgcttgctgcgtacctcttggacccgtcaaacacgacgcccgaaggcgtagcccgtcgttacggcggcgagtggaccgaagatgcagcgaaacgcgcgttattggccgaacgtttgcacgaaaatttattaggacgtttgcaaggcgaggaacgtctcctctggctttacgaagaagtggagaaaccattgagtcgcgtgctcgcgcatatggaagctaccggtgtcaaattagacgtggcgtatttggagaatctcagccttgaagttgctgcccacatgcgccgcttggaggaagaagtattccgtttagcaggccgttcctttcgccttaactctcgcgatcagttagaacgtgtgttgttcgatgaacttggtctccctcctatcggcaagacagagaagaccggtaaacgtagcacttcagcggcggttttagaagctcttcgcgaagtccatcccattgtggacaagatcttgcagtaccgcgaaatggcgaaattgaaaggcacctatattgaccgtcttccggcattagtccacccgaaaacgggacgcctccatacccgcttcaaccaaacagccacggcgaccggtcgtttgtcctcctctgatccaaaccttcagaatattccagtacgtaccccattgggccagaagatccgccgtgcgtttgtagctgaggagggttggcgtttagtggccctcgattatcgtcaaattgaattacgtgtccttgcccatctttctggcgatgagaacctcatccgcgtgtttcaggaaggcaaagacattcacactcaaacggcaagctggatgtttggattatcagctgaagcgatcgatcctttgatgcgtcgtgcagcgaagaccatcaatttcggtgttctctacggtatgagtgcctttcgtttgtcgcaggaattaggcattccctatgaagaagctcaggcgttcattcagaaatactttcaaagctatcccaaagttaaagcatggatcgagaagactctccgtgaaggccgcacacgtggttacgtagagaccttatttggacgtcgccgctatgttcccgatttaaacgctcgcgtgaaaggcaagcgtgaagccgccgaacgcatggcgttcaacatgcctgtacagggcacggcagctgacctcatgaaacttgcaatggtgcgcctttttccacaattgcgtgaagttggtgcccgcatgctcttgcaggtccacgatgaactcttgttagaagcgccaaaagagcgtgcggaagaggtggcagccctcgcgaaagaagttatggaaggcgtgtggcccttagcggtgcctcttgaagtcgaagttggtattggcgaggattggctggctgccaaagga

SEQ ID NO: 5724 - protein, 841 aa, synthetic construct
  REGION 1..841: note = Variant of DNA polymerase I from Thermus sp. strain 2.9
MHHHHHHGGSGVLPVFEPKGRVLLVDGHHLAYRNFFALKGLTTSLGEPVQGVYGFAKSLLKALKEDGDVVIVVFDAKAPSFRHEAYEAYKAGRAPTPEDFPRQLALMKELVDLLGLERLEVPGFEADDVLATLAKKAEREGYEVQILTADRDLFQLLSPRISVLHPEGHRITPEWLWEKYGLRPEQWVDFRALAGDPSDNIPGVKGIGEKTALKLLKEWGSLENLLKNLDQVKPESVREKILAHLEDLKLSRELSRVRTDLPLEVDFGRRREPDWEGLKAFLERLEFGSLLHEFGLLESPLLAEEAPWPPPEGAFLGYRLSRPEPMWAELLALAASAQGRVYRAEDPHGALRGLFEVRGLLAKDLAVVALREGLDLPPTDDPMLAAYLLDPSNTTPEGVARRYGGEWTEDAAKRALLAERLHENLLGRLQGEERLLWLYEEVEKPLSRVLAHMEATGVKLDVAYLENLSLEVAAHMRRLEEEVFRLAGRSFRLNSRDQLERVLFDELGLPPIGKTEKTGKRSTSAAVLEALREVHPIVDKILQYREMAKLKGTYIDRLPALVHPKTGRLHTRFNQTATATGRLSSSDPNLQNIPVRTPLGQKIRRAFVAEEGWRLVALDYRQIELRVLAHLSGDENLIRVFQEGKDIHTQTASWMFGLSAEAIDPLMRRAAKTINFGVLYGMSAFRLSQELGIPYEEAQAFIQKYFQSYPKVKAWIEKTLREGRTRGYVETLFGRRRYVPDLNARVKGKREAAERMAFNMPVQGTAADLMKLAMVRLFPQLREVGARMLLQVHDELLLEAPKERAEEVAALAKEVMEGVWPLAVPLEVEVGIGEDWLAAKG

SEQ ID NO: 5725 - DNA, 2523 bp, synthetic construct
  misc_feature 1..2523: note = Variant of DNA polymerase I from Thermus sp. strain 2.9
  source 1..2523: mol_type = other DNA
atgcaccatcatcatcatcatggcggtagcggcgtgttaccggtgttcgagcctaaaggtcgcgtgcttctggttgatggccatcatctcgcgtatcgtaacttctttgccctgaaaggattaaccaccagcctgggcgagccggtacagggtgtctacggctttgcaaagtcgctcctgaaagctctgaaagaagacggtgatgtggtgattgttgtctttgatgcgaaagcgccaagttttcgccacgaagcgtacgaagcttacaaagccgggcgtgctccaacgccggaagactttcctcgccaattggcgcttatgaaggaattagtggatttgcttggcctcgaacgcttggaagttcccggtttcgaggcagacgacgtattagcgactctcgcaaagaaagccgaacgtgagggctatgaagtccagatcttgacagcagatcgcgatcttttccagcttttatctccgcgcatctcggtgttacacccggaagggcatcgtatcaccccggaatggctctgggagaaatatggtttgcgtcccgaacaatgggtggattttcgcgccttagcaggcgatccgagcgacaatattccgggagttaaaggtatcggcgagaagacggcgctcaagctccttaaagaatgggggtcgttggagaacttgcttaagaatttagatcaggtcaaaccagagtcagtgcgtgagaagattcttgctcacctcgaagacctcaaattaagccgcgaattgtcccgtgtacgcaccgatttgccgctcgaagttgatttcggtcgccgccgcgaacctgactgggagggtcttaaagcgtttttagagcgtcttgaatttggttcgctcttgcatgaattcggccatttagaaagcccgttactggccgaagaagcaccttggccaccgcccgagggcgcgtttttaggttaccgtttgagtcgcccggaaccgatgtgggccgaattactggctcttgcagcgtctgcccagggacgtgtgtatcgcgcggaagaccctcatggtgcgctccgcggcctcttcgaagtccgtggactccttgccaaagacttagctgttgttgcattgcgcgaaggtcttgatttacctccgactgatgatccaatgcttcttgcgtacctcttggacccgtcaaacacgacgcccgaaggcgtagcccgtcgttacggcggcgagtggaccgaagatgcagcgaaacgcgcgttattggccgaacgtttgcacgaaaatttattaggacgtttgcaaggcgagctgcgtctcctctggctttacgaagaagtggagaaaccattgagtcgcgtgctcgcgcatatggaagctaccggtgtcaaattagacgtggcgtatttggagaatctcagccttgaagttgctgcccacatgcgccgcttggaggaagaagtattccgtttagcaggccgttcctttcgccttaactctcgcgatcagttagaacgtgtgttgttcgatgaacttggtctccctcctatcggcaagacagagaagaccggtaaacgtagcacttcagcggcggttttagaagctcttcgcgaagtccatcccattgtggacaagatcttgcagtaccgcgaaatggcgaaattgaaaggcacctatattgaccgtcttccggcattagtccacccgaaaacgggacgcctccatacccgcttcaaccaaacagccacggcgaccggtcgtttgtcctcctctgatccaaaccttcagaatattccagtacgtaccccattgggccagaagatccgccgtgcgtttgtagctgaggagggttggcgtttagtggccctcgattatcgtcaaattgaattacgtgtccttgcccatctttctggcgatgagaacctcatccgcgtgtttcaggaaggcaaagacattcacactcaaacggcaagctggatgtttggattatcagctgaagcgatcgatcctttgatgcgtcgtgcagcgaagaccatcaatttcggtgttctctacggtatgagtgcctttcgtttgtcgcaggaattaggcattccctatgaagaagctcaggcgttcattcagaaatactttcaaagctatcccaaagttaaagcatggatcgagaagactctccgtgaaggccgcacacgtggttacgtagagaccttatttggacgtcgccgctatgttcccgatttaaacgctcgcgtgaaaggcaagcgtgaagccgccgaacgcatggcgttcaacatgcctgtacagggcacggcagctgacctcatgaaacttgcaatggtgcgcctttttccacaattgcgtgaagttggtgcccgcatgctcttgcaggtccacgatgaactcttgttagaagcgccaaaagagcgtgcggaagaggtggcagccctcgcgaaagaagttatggaaggcgtgtggcccttagcggtgcctcttgaagtcgaagttggtattggcgaggattggctggctgccaaagga

SEQ ID NO: 5726 - protein, 841 aa, synthetic construct
  REGION 1..841: note = Variant of DNA polymerase I from Thermus sp. strain 2.9
MHHHHHHGGSGVLPVFEPKGRVLLVDGHHLAYRNFFALKGLTTSLGEPVQGVYGFAKSLLKALKEDGDVVIVVFDAKAPSFRHEAYEAYKAGRAPTPEDFPRQLALMKELVDLLGLERLEVPGFEADDVLATLAKKAEREGYEVQILTADRDLFQLLSPRISVLHPEGHRITPEWLWEKYGLRPEQWVDFRALAGDPSDNIPGVKGIGEKTALKLLKEWGSLENLLKNLDQVKPESVREKILAHLEDLKLSRELSRVRTDLPLEVDFGRRREPDWEGLKAFLERLEFGSLLHEFGHLESPLLAEEAPWPPPEGAFLGYRLSRPEPMWAELLALAASAQGRVYRAEDPHGALRGLFEVRGLLAKDLAVVALREGLDLPPTDDPMLLAYLLDPSNTTPEGVARRYGGEWTEDAAKRALLAERLHENLLGRLQGELRLLWLYEEVEKPLSRVLAHMEATGVKLDVAYLENLSLEVAAHMRRLEEEVFRLAGRSFRLNSRDQLERVLFDELGLPPIGKTEKTGKRSTSAAVLEALREVHPIVDKILQYREMAKLKGTYIDRLPALVHPKTGRLHTRFNQTATATGRLSSSDPNLQNIPVRTPLGQKIRRAFVAEEGWRLVALDYRQIELRVLAHLSGDENLIRVFQEGKDIHTQTASWMFGLSAEAIDPLMRRAAKTINFGVLYGMSAFRLSQELGIPYEEAQAFIQKYFQSYPKVKAWIEKTLREGRTRGYVETLFGRRRYVPDLNARVKGKREAAERMAFNMPVQGTAADLMKLAMVRLFPQLREVGARMLLQVHDELLLEAPKERAEEVAALAKEVMEGVWPLAVPLEVEVGIGEDWLAAKG

SEQ ID NO: 5727 - DNA, 2523 bp, synthetic construct
  misc_feature 1..2523: note = Variant of DNA polymerase I from Thermus sp. strain 2.9
  source 1..2523: mol_type = other DNA
atgcaccatcatcatcatcatggcggtagcggcgtgttaccggtgttcgagcctaaaggtcgcgtgcttctggttgatggccatcatctcgcgtatcgtaacttctttgccctgaaaggattaaccaccagcctgggcgagccggtacagggtgtctacggctttgcaaagtcgctcctgaaagctctgaaagaagacggtgatgtggtgattgttgtctttgatgcgaaagcgccaagttttcgccacgaagcgtacgaagcttacaaagccgggcgtgctccaacgccggaagactttcctcgccaattggcgcttatgaaggaattagtggatttgcttggcctcgaacgcttggaagttcccggtttcgaggcagacgacgtattagcgactctcgcaaagaaagccgaacgtgagggctatgaagtccagatcttgacagcagatcgcgatcttttccagcttttatctccgcgcatctcggtgttacacccggaagggcatcgtatcaccccggaatggctctgggagaaatatggtttgcgtcccgaacaatgggtggattttcgcgccttagcaggcgatccgagcgacaatattccgggagttaaaggtatcggcgagaagacggcgctcaagctccttaaagaatgggggtcgttggagaacttgcttaagaatttagatcaggtcaaaccagagtcagtgcgtgagaagattcttgctcacctcgaagacctcaaattaagccgcgaattgtcccgtgtacgcaccgatttgccgctcgaagttgatttcggtcgccgccgcgaacctgactgggagggtcttaaagcgtttttagagcgtcttgaatttggttcgctcttgcatgaattcggccttttagaaagcccgttactggccgaagaagcaccttggccaccgcccgagggcgcgtttttaggttaccgtttgagtcgcccggaaccgatgtgggccgaattactggctcttgcagcgtctgcccagggacgtgtgtatcgcgcggaagaccctcatggtgcgctccgcggcctcttcgaagtccgtggcctccttgccaaagacttagctgttgttgcattgcgcgaaggtcttgatttacctccgactgatgatccaatgcttcttgcgtacctcttggacccgtcaaacacgacgcccgaaggcgtagcccgtcgttacggcggcgagtggtgggaagatgcagccaaacgcgcgttattggccgaacgtttgcacgaaaatttattaggacgtttgcaaggcgaggaacgtctcctctggctttacgaagaagtggagaaaccattgagtcgcgtgctcgcgcatatggaagctaccggtgtcaaattagacgtggcgtatttggagaatctcagccttgaagttgctgcccacatgcgccgcttggaggaagaagtattccgtttagcaggccgttcctttcgccttaactctcgcgatcagttagaacgtgtgttgttcgatgaacttggtctccctcctatcggcaagacagagaagaccggtaaacgtagcacttcagcggcggttttagaagctcttcgcgaagtccatcccattgtggacaagatcttgcagtaccgcgaaatggcgaaattgaaaggcacctatattgaccgtcttccggcattagtccacccgaaaacgggacgcctccatacccgcttcaaccaaacagccacggcgaccggtcgtttgtcctcctctgatccaaaccttcagaatattccagtacgtacctttttgggccagaagatccgccgtgcgtttgtagctgaggagggttggcgtttagtggccctcgattatcgtcaaattgaattacgtgtccttgcccatctttctggcgatgagaacctcatccgcgtgtttcaggaaggcaaagacattcacactcaaacggcaagctggatgtttggattatcagctgaagcgatcgatcctttgatgcgtcgtgcagcgaagaccatcaatttcggtgttctctacggtatgagtgcctttcgtttgtcgcaggaattaggcattcccctggaagaagctcagggtttcattcagaaatactttcaaagctatcccaaagttaaagcatggatcgagaagactctccgtgaaggccgcacacgtggttacgtagagaccttatttggacgtcgccgctatgttcccgatttaaacgctcgcgtgaaaggcaagcgtgaagccgccgaacgcatggcgttcaacatgcctgtacagggcacggcagctgacctcatgaaacttgcaatggtgcgcctttttccacaattgcgtgaagttggtgcccgcatgctgttgcaggtccacgatgaactcttgttagaagcgccaaaagagcgtgcggaagaggtggcagccctcgcgaaagaagttatggaaggcgtgtggcccttagcggtgcctcttgaagtcgaagttggtattggcgaggattggctggctgccaaagga

SEQ ID NO: 5728 - protein, 841 aa, synthetic construct
  REGION 1..841: note = Variant of DNA polymerase I from Thermus sp. strain 2.9
MHHHHHHGGSGVLPVFEPKGRVLLVDGHHLAYRNFFALKGLTTSLGEPVQGVYGFAKSLLKALKEDGDVVIVVFDAKAPSFRHEAYEAYKAGRAPTPEDFPRQLALMKELVDLLGLERLEVPGFEADDVLATLAKKAEREGYEVQILTADRDLFQLLSPRISVLHPEGHRITPEWLWEKYGLRPEQWVDFRALAGDPSDNIPGVKGIGEKTALKLLKEWGSLENLLKNLDQVKPESVREKILAHLEDLKLSRELSRVRTDLPLEVDFGRRREPDWEGLKAFLERLEFGSLLHEFGLLESPLLAEEAPWPPPEGAFLGYRLSRPEPMWAELLALAASAQGRVYRAEDPHGALRGLFEVRGLLAKDLAVVALREGLDLPPTDDPMLLAYLLDPSNTTPEGVARRYGGEWWEDAAKRALLAERLHENLLGRLQGEERLLWLYEEVEKPLSRVLAHMEATGVKLDVAYLENLSLEVAAHMRRLEEEVFRLAGRSFRLNSRDQLERVLFDELGLPPIGKTEKTGKRSTSAAVLEALREVHPIVDKILQYREMAKLKGTYIDRLPALVHPKTGRLHTRFNQTATATGRLSSSDPNLQNIPVRTFLGQKIRRAFVAEEGWRLVALDYRQIELRVLAHLSGDENLIRVFQEGKDIHTQTASWMFGLSAEAIDPLMRRAAKTINFGVLYGMSAFRLSQELGIPLEEAQGFIQKYFQSYPKVKAWIEKTLREGRTRGYVETLFGRRRYVPDLNARVKGKREAAERMAFNMPVQGTAADLMKLAMVRLFPQLREVGARMLLQVHDELLLEAPKERAEEVAALAKEVMEGVWPLAVPLEVEVGIGEDWLAAKG

SEQ ID NO: 5729 - DNA, 2523 bp, synthetic construct
  misc_feature 1..2523: note = Variant of DNA polymerase I from Thermus sp. strain 2.9
  source 1..2523: mol_type = other DNA
atgcaccatcatcatcatcatggcggtagcggcgtgttaccggtgttcgagcctaaaggtcgcgtgcttctggttgatggccatcatctcgcgtatcgtaacttctttgccctgaaaggattaaccaccagcctgggcgagccggtacagggtgtctacggctttgcaaagtcgctcctgaaagctctgaaagaagacggtgatgtggtgattgttgtctttgatgcgaaagcgccaagttttcgccacgaagcgtacgaagcttacaaagccgggcgtgctccaacgccggaagactttcctcgccaattggcgcttatgaaggaattagtggatttgcttggcctcgaacgcttggaagttcccggtttcgaggcagacgacgtattagcgactctcgcaaagaaagccgaacgtgagggctatgaagtccagatcttgacagcagatcgcgatcttttccagcttttatctccgcgcatctcggtgttacacccggaagggcatcgtatcaccccggaatggctctgggagaaatatggtttgcgtcccgaacaatgggtggattttcgcgccttagcaggcgatccgagcgacaatattccgggagttaaaggtatcggcgagaagacggcgctcaagctccttaaagaatgggggtcgttggagaacttgcttaagaatttagatcaggtcaaaccagagtcagtgcgtgagaagattcttgctcacctcgaagacctcaaattaagccgcgaattgtcccgtgtacgcaccgatttgccgctcgaagttgatttcggtcgccgccgcgaacctgactgggagggtcttaaagcgtttttagagcgtcttgaatttggttcgctcttgcatgaattcggccttttagaaagcccgttactggccgaagaagcaccttggccaccgcccgagggcgcgtttttaggttaccgtttgagtcgcccggaaccgatgtgggccgaattactggctcttgcagcgtctgcccagggacgtgtgtatcgcgcggaagaccctcatggtgcgctccgcggcctcttcgaagtccgtggcctccttgccaaagacttagctgttgttgcattgcgcgaaggtcttgatttacctccgactgatgatccaatgcttcttgcgtacctcttggacccgtcaaacacgacgcccgaaggcgtagcccgtcgttacggcggcgagtggaccgaagatgcagcgaaacgcgcgttattggccgaacgtttgcacgaaaatttattaggacgtttgcaaggcgaggcgcgtctccgttggctttacgaagaagtggagaaaccattgagtcgcgtgctcgcgcatatggaagctaccggtgtcaaattagacgtggcgtatttggagaatctcagccttgaagttgctgcccacatgcgccgcttggaggaagaagtattccgtttagcaggccgttcctttcgccttaactctcgcgatcagttagaacgtgtgttgttcgatgaacttggtctccctcctatcggcaagacagagaagaccggtaaacgtagcacttcagcggcggttttagaagctcttcgcgaagtccatcccattgtggacaagatcttgcagtaccgcgaaatggcgaaattgaaaggcacctatattgaccgtcttccggcattagtccacccgaaaacgggacgcctccatacccgcttcaaccaaacagccacggcgaccggtcgtttgtcctcctctgatccaaaccttcagaatattccagtacgtacctttttgggccagaagatccgccgtgcgtttgtagctgaggagggttggcgtttagtggccctcgattatcgtcaaattgaattacgtgtccttgcccatctttctggcgatgagaacctcatccgcgtgtttcaggaaggcaaagacattcacactcaaacggcaagctggatgtttggattatcagctgaagcgatcgatcctttgatgcgtcgtgcagcgaagaccatcaatttcggtgttctctacggtatgagtgcctttcgtttgtcgcaggaattaggcattccctatgaagaagctcagggtttcattcagaaatactttcaaagctatcccaaagttaaagcatggatcgagaagactctccgtgaaggccgcacacgtggttacgtagagaccttatttggacgtcgccgctatgttcccgatttaaacggtcgcgtgaaaggcaagcgtgaagccgccgaacgcatggcgttcaacatgcctgtacagggcacggcagctgacctcatgaaacttgcaatggtgcgcctttttccacaattgcgtgaagttggtgcccgcatgctcttgcaggtccacgatgaactcttgttagaagcgccaaaagagcgtgcggaagaggtggcagccctcgcgaaagaagttatggaaggcgtgtggcccttagcggtgcctcttgaagtcgaagttggtattggcgaggattggctggctgccaaagga

SEQ ID NO: 5730 - protein, 841 aa, synthetic construct
  REGION 1..841: note = Variant of DNA polymerase I from Thermus sp. strain 2.9
MHHHHHHGGSGVLPVFEPKGRVLLVDGHHLAYRNFFALKGLTTSLGEPVQGVYGFAKSLLKALKEDGDVVIVVFDAKAPSFRHEAYEAYKAGRAPTPEDFPRQLALMKELVDLLGLERLEVPGFEADDVLATLAKKAEREGYEVQILTADRDLFQLLSPRISVLHPEGHRITPEWLWEKYGLRPEQWVDFRALAGDPSDNIPGVKGIGEKTALKLLKEWGSLENLLKNLDQVKPESVREKILAHLEDLKLSRELSRVRTDLPLEVDFGRRREPDWEGLKAFLERLEFGSLLHEFGLLESPLLAEEAPWPPPEGAFLGYRLSRPEPMWAELLALAASAQGRVYRAEDPHGALRGLFEVRGLLAKDLAVVALREGLDLPPTDDPMLLAYLLDPSNTTPEGVARRYGGEWTEDAAKRALLAERLHENLLGRLQGEARLRWLYEEVEKPLSRVLAHMEATGVKLDVAYLENLSLEVAAHMRRLEEEVFRLAGRSFRLNSRDQLERVLFDELGLPPIGKTEKTGKRSTSAAVLEALREVHPIVDKILQYREMAKLKGTYIDRLPALVHPKTGRLHTRFNQTATATGRLSSSDPNLQNIPVRTFLGQKIRRAFVAEEGWRLVALDYRQIELRVLAHLSGDENLIRVFQEGKDIHTQTASWMFGLSAEAIDPLMRRAAKTINFGVLYGMSAFRLSQELGIPYEEAQGFIQKYFQSYPKVKAWIEKTLREGRTRGYVETLFGRRRYVPDLNGRVKGKREAAERMAFNMPVQGTAADLMKLAMVRLFPQLREVGARMLLQVHDELLLEAPKERAEEVAALAKEVMEGVWPLAVPLEVEVGIGEDWLAAKG

SEQ ID NO: 5731 - DNA, 2523 bp, synthetic construct
  misc_feature 1..2523: note = Variant of DNA polymerase I from Thermus sp. strain 2.9
  source 1..2523: mol_type = other DNA
atgcaccatcatcatcatcatggcggtagcggcgtgttaccggtgttcgagcctaaaggtcgcgtgcttctggttgatggccatcatctcgcgtatcgtaacttctttgccctgaaaggattaaccaccagcctgggcgagccggtacagggtgtctacggctttgcaaagtcgctcctgaaagctctgaaagaagacggtgatgtggtgattgttgtctttgatgcgaaagcgccaagttttcgccacgaagcgtacgaagcttacaaagccgggcgtgctccaacgccggaagactttcctcgccaattggcgcttatgaaggaattagtggatttgcttggcctcgaacgcttggaagttcccggtttcgaggcagacgacgtattagcgactctcgcaaagaaagccgaacgtgagggctatgaagtccagatcttgacagcagatcgcgatcttttccagcttttatctccgcgcatctcggtgttacacccggaagggcatcgtatcaccccggaatggctctgggagaaatatggtttgcgtcccgaacaatgggtggattttcgcgccttagcaggcgatccgagcgacaatattccgggagttaaaggtatcggcgagaagacggcgctcaagctccttaaagaatgggggtcgttggagaacttgcttaagaatttagatcaggtcaaaccagagtcagtgcgtgagaagattcttgctcacctcgaagacctcaaattaagccgcgaattgtcccgtgtacgcaccgatttgccgctcgaagttgatttcggtcgccgccgcgaacctgactgggagggtcttaaagcgtttttagagcgtcttgaatttggttcgctcttgcatgaattcggccttttagaaagcccgttactggccgaagaagcaccttggccaccgcccgagggcgcgtttttaggttaccgtttgagtcgcccggaaccgatgtgggccgaattactggctcttgcagcgtctgcccagggacgtgtgtatcgcgcggaagaccctcatggtgcgctccgcggcctcttcgaagtccgtggactccttgccaaagacttagctgttgttgcattgcgcgaaggtcttgatttacctccgactgatgatccaatgcttcttgcgtacctcttggacccgtcaaacacgacgcccgaaggcgtagcccgtcgttacggcggcgagtggaccgaagatgcaggcaaacgcgcgttattggccgaacgtttgcacgaaaatttattaggacgtttgcaaggcgaggagcgtctcctgtggctttacgaagaagtggagaaaccattgagtcgcgtgctcgcgcatatggaagctaccggtgtcaaattagacgtggcgtatttggagaatctcagccttgaagttgctgcccacatgcgccgcttggaggaagaagtattccgtttagcaggccgttcctttcgccttaactctcgcgatcagttagaacgtgtgttgttcgatgaacttggtctccctcctatcggcaagacagagaagaccggtaaacgtagcacttcagcggcggttttagaagctcttcgcgaagtccatcccattgtggacaagatcttgcagtaccgcgaaatggcgaaattgaaaggcacctatattgaccgtcttccggcattagtccacccgaaaacgggacgcctccatacccgcttcaaccaaacagccacggcgaccggtcgtttgtcctcctctgatccaaaccttcagaatattccagtacgtaccccattgggccagaagatccgccgtgcgtttgtagctgaggagggttgggcgttagtggccctcgattatcgtcaaattgaattacgtgtccttgcccatctttctggcgatgagaacctcatccgcgtgtttcaggaaggcaaagacattcacactcaaacggcaagctggatgtttggattatcagctgaagcgatcgatcctttgatgcgtcgtgcagcgaagaccatcaatttcggtgttctctacggtatgagtgcctttcgtttgtcgcaggaattaggcattccctatgaagaagctcaggctttcattcagaaatactttcaaggctatcccaaagttaaagcatggatcgagaagactctccgtgaaggccgcacacgtggttacgtagagaccttatttggacgtcgccgctatgttcccgatttaaacgctcgcgtgaaaggcaagcgtgaagccgccgaacgcatggcgttcaacatgcctgtacagggcacggcagctgacctcatgaaacttgcaatggtgcgcctttttccacaattgcgtgaagttggtgcccgcatgctgttgcaggtccacgatgaactcttgttagaagcgccaaaagagcgtgcggaagaggtggcagccctcgcgaaagaagttatggaaggcgtgtggcccttagcggtgcctcttgaagtcgaagttggtattggcgaggattggctggctgccaaagga

SEQ ID NO: 5732 - protein, 841 aa, synthetic construct
  REGION 1..841: note = Variant of DNA polymerase I from Thermus sp. strain 2.9
MHHHHHHGGSGVLPVFEPKGRVLLVDGHHLAYRNFFALKGLTTSLGEPVQGVYGFAKSLLKALKEDGDVVIVVFDAKAPSFRHEAYEAYKAGRAPTPEDFPRQLALMKELVDLLGLERLEVPGFEADDVLATLAKKAEREGYEVQILTADRDLFQLLSPRISVLHPEGHRITPEWLWEKYGLRPEQWVDFRALAGDPSDNIPGVKGIGEKTALKLLKEWGSLENLLKNLDQVKPESVREKILAHLEDLKLSRELSRVRTDLPLEVDFGRRREPDWEGLKAFLERLEFGSLLHEFGLLESPLLAEEAPWPPPEGAFLGYRLSRPEPMWAELLALAASAQGRVYRAEDPHGALRGLFEVRGLLAKDLAVVALREGLDLPPTDDPMLLAYLLDPSNTTPEGVARRYGGEWTEDAGKRALLAERLHENLLGRLQGEERLLWLYEEVEKPLSRVLAHMEATGVKLDVAYLENLSLEVAAHMRRLEEEVFRLAGRSFRLNSRDQLERVLFDELGLPPIGKTEKTGKRSTSAAVLEALREVHPIVDKILQYREMAKLKGTYIDRLPALVHPKTGRLHTRFNQTATATGRLSSSDPNLQNIPVRTPLGQKIRRAFVAEEGWALVALDYRQIELRVLAHLSGDENLIRVFQEGKDIHTQTASWMFGLSAEAIDPLMRRAAKTINFGVLYGMSAFRLSQELGIPYEEAQAFIQKYFQGYPKVKAWIEKTLREGRTRGYVETLFGRRRYVPDLNARVKGKREAAERMAFNMPVQGTAADLMKLAMVRLFPQLREVGARMLLQVHDELLLEAPKERAEEVAALAKEVMEGVWPLAVPLEVEVGIGEDWLAAKG

SEQ ID NO: 5733 - DNA, 2523 bp, synthetic construct
  misc_feature 1..2523: note = Variant of DNA polymerase I from Thermus sp. strain 2.9
  source 1..2523: mol_type = other DNA
atgcaccatcatcatcatcatggcggtagcggcgtgttaccggtgttcgagcctaaaggtcgcgtgcttctggttgatggccatcatctcgcgtatcgtaacttctttgccctgaaaggattaaccaccagcctgggcgagccggtacagggtgtctacggctttgcaaagtcgctcctgaaagctctgaaagaagacggtgatgtggtgattgttgtctttgatgcgaaagcgccaagttttcgccacgaagcgtacgaagcttacaaagccgggcgtgctccaacgccggaagactttcctcgccaattggcgcttatgaaggaattagtggatttgcttggcctcgaacgcttggaagttcccggtttcgaggcagacgacgtattagcgactctcgcaaagaaagccgaacgtgagggctatgaagtccagatcttgacagcagatcgcgatcttttccagcttttatctccgcgcatctcggtgttacacccggaagggcatcgtatcaccccggaatggctctgggagaaatatggtttgcgtcccgaacaatgggtggattttcgcgccttagcaggcgatccgagcgacaatattccgggagttaaaggtatcggcgagaagacggcgctcaagctccttaaagaatgggggtcgttggagaacttgcttaagaatttagatcaggtcaaaccagagtcagtgcgtgagaagattcttgctcacctcgaagacctcaaattaagccgcgaattgtcccgtgtacgcaccgatttgccgctcgaagttgatttcggtcgccgccgcgaacctgactgggagggtcttaaagcgtttttagagcgtcttgaatttggttcgctcttgcatgaattcggccttttagaaagcccgttactggccgaagaagcaccttggccaccgcccgagggcgcgtttttaggttaccgtttgagtcgcccggaaccgatgtgggccgaattactggctcttgcagcgtctgcccagggacgtgtgtatcgcgcggaagaccctcatggtgcgctccgcggcctcttcgaagtccgtaccctccttgccaaagacttagctgttgttgcattgcgcgaaggtcttgatttacctccgactgatgatccaatgcttcttgcgtacctcttggacccgtcaaacacgacgcccgaaggcgtagcccgtcgttacggcggcgagtggaccgaagatgcagccaaacgcgcgttattggccgaacgtttgcacgaaaatttattaggacgtttgcaaggcgaggaacgtctcctctggctttacgaagaagtggagaaaccattgagtcgcgtgctcgcgcatatggaagctaccggtgtcaaattagacgtggcgtatttggagaatctcagccttgaagttgctgcccacatgcgccgcttggaggaagaagtattccgtttagcaggccgttcctttcgccttaactctcgcgatcagttagaacgtgtgttgttcgatgaacttggtctccctcctatcggcaagacagagaagaccggtaaacgtagcacttcagcggcggttttagaagctcttcgcgaagtccatcccattgtggacaagatcttgcagtaccgcgaaatggcgaaattgaaaggcacctatattgaccgtcttccggcattagtccacccgaaaacgggacgcctccatacccgcttcaaccaaacagccacggcgaccggtcgtttgtcctcctctgatccaaaccttcagaatattccagtacgtaccccattgggccagaagatccgccgtgcgtttgtagctgaggagggttggcgtttagtggccctcgattatcgtcaaattgaattacgtgtccttgcccatctttctggcgatgagaacctcatccgcgtgtttcaggaaggcaaagacattcacactcaaacggcaagctggatgtttggattatcagctgaagcgatcgatcctttgatgcgtcgtgcagcgaagaccatcaatttcggtgttctctacggtatgagtgcctttcgtttgtcgcaggaattaggcattccctatgaagaagctcagggtttcattcagaaatactttcaaagctatcccaaagttaaagcatggatcgagaagactctccgtgaaggccgcacacgtggttacgtagagaccttatttggacgtcgccgctatgttcccgatttaaacgctcgcgtgaaaggcaagcgtgaagccgccgaacgcatggcgttcaacatgcctgtacagggcacggcagctgacctcatgaaacttgcaatggtgcgcctttttccacaattgcgtgaagttggtgcccgcatgctgttgcaggtccacgatgaactcttgttagaagcgccaaaagagcgtgcggaagaggtggcagccctcgcgaaagaagttatggaaggcgtgtggcccttagcggtgcctcttgaagtcgaagttggtattggcgaggattggctggctgccaaagga

SEQ ID NO: 5734 - protein, 841 aa, synthetic construct
  REGION 1..841: note = Variant of DNA polymerase I from Thermus sp. strain 2.9
MHHHHHHGGSGVLPVFEPKGRVLLVDGHHLAYRNFFALKGLTTSLGEPVQGVYGFAKSLLKALKEDGDVVIVVFDAKAPSFRHEAYEAYKAGRAPTPEDFPRQLALMKELVDLLGLERLEVPGFEADDVLATLAKKAEREGYEVQILTADRDLFQLLSPRISVLHPEGHRITPEWLWEKYGLRPEQWVDFRALAGDPSDNIPGVKGIGEKTALKLLKEWGSLENLLKNLDQVKPESVREKILAHLEDLKLSRELSRVRTDLPLEVDFGRRREPDWEGLKAFLERLEFGSLLHEFGLLESPLLAEEAPWPPPEGAFLGYRLSRPEPMWAELLALAASAQGRVYRAEDPHGALRGLFEVRTLLAKDLAVVALREGLDLPPTDDPMLLAYLLDPSNTTPEGVARRYGGEWTEDAAKRALLAERLHENLLGRLQGEERLLWLYEEVEKPLSRVLAHMEATGVKLDVAYLENLSLEVAAHMRRLEEEVFRLAGRSFRLNSRDQLERVLFDELGLPPIGKTEKTGKRSTSAAVLEALREVHPIVDKILQYREMAKLKGTYIDRLPALVHPKTGRLHTRFNQTATATGRLSSSDPNLQNIPVRTPLGQKIRRAFVAEEGWRLVALDYRQIELRVLAHLSGDENLIRVFQEGKDIHTQTASWMFGLSAEAIDPLMRRAAKTINFGVLYGMSAFRLSQELGIPYEEAQGFIQKYFQSYPKVKAWIEKTLREGRTRGYVETLFGRRRYVPDLNARVKGKREAAERMAFNMPVQGTAADLMKLAMVRLFPQLREVGARMLLQVHDELLLEAPKERAEEVAALAKEVMEGVWPLAVPLEVEVGIGEDWLAAKG

SEQ ID NO: 5735 - DNA, 2523 bp, synthetic construct
  misc_feature 1..2523: note = Variant of DNA polymerase I from Thermus sp. strain 2.9
  source 1..2523: mol_type = other DNA
atgcaccatcatcatcatcatggcggtagcggcgtgttaccggtgttcgagcctaaaggtcgcgtgcttctggttgatggccatcatctcgcgtatcgtaacttctttgccctgaaaggattaaccaccagcctgggcgagccggtacagggtgtctacggctttgcaaagtcgctcctgaaagctctgaaagaagacggtgatgtggtgattgttgtctttgatgcgaaagcgccaagttttcgccacgaagcgtacgaagcttacaaagccgggcgtgctccaacgccggaagactttcctcgccaattggcgcttatgaaggaattagtggatttgcttggcctcgaacgcttggaagttcccggtttcgaggcagacgacgtattagcgactctcgcaaagaaagccgaacgtgagggctatgaagtccagatcttgacagcagatcgcgatcttttccagcttttatctccgcgcatctcggtgttacacccggaagggcatcgtatcaccccggaatggctctgggagaaatatggtttgcgtcccgaacaatgggtggattttcgcgccttagcaggcgatccgagcgacaatattccgggagttaaaggtatcggcgagaagacggcgctcaagctccttaaagaatgggggtcgttggagaacttgcttaagaatttagatcaggtcaaaccagagtcagtgcgtgagaagattcttgctcacctcgaagacctcaaattaagccgcgaattgtcccgtgtacgcaccgatttgccgctcgaagttgatttcggtcgccgccgcgaacctgactgggagggtcttaaagcgtttttagagcgtcttgaatttggttcgctcttgcatgaattcggccttttagaaagcccgttactggccgaagaagcaccttggccaccgcccgagggcgcgtttttaggttaccgtttgagtcgcccggaaccgatgtgggccgaattactggctcttgcagcgtctgcccagggacgtgtgtatcgcgcggaagaccctcatggtgcgctccgcggcctcttcgaagtccgtggcctccttgccaaagacttagctgttgttgcattgcgcgaaggtcttgatttacctccgactgatgatccaatgcttcttgcgtacctcttggacccgtcaaacacgacgcccgaaggcgtagcccgtcgttacggcggcgagtggaccgaagatgcaggcaaacgcgcgttattggccgaacgtttgcacgaaaatttattaggacgtttgcaaggcgaggaacgtctcctctggctttacgaagaagtggagaaaccattgagtcgcgtgctcgcgcatatggaagctaccggtgtcaaattagacgtggcgtatttggagaatctcctgcttgaagttgctgcccacatgcgccgcttggaggaagaagtattccgtttagcaggccgttcctttcgccttaactctcgcgatcagttagaacgtgtgttgttcgatgaacttggtctccctcctatcggcaagacagagaagaccggtaaacgtagcacttcagcggcggttttagaagctcttcgcgaagtccatcccattgtggacaagatcttgcagtaccgcgaaatggcgaaattgaaaggcacctatattgaccgtcttccggcattagtccacccgaaaacgggacgcctccatacccgcttcaaccaaacagccacggcgaccggtcgtttgtcctcctctgatccaaaccttcagaatattccagtacgtaccccattgggccagaagatccgccgtgcgtttgtagctgagccgggttggcgtttagtggccctcgattatcgtcaaattgaattacgtgtccttgcccatctttctggcgatgagaacctcatccgcgtgtttcaggaaggcaaagacattcacactcaaacggcaagctggatgtttggattatcagctgaagcgatcgatcctttgatgcgtcgtgcagcgaagaccatcaatttcggtgttctctacggtatgagtgcctttcgtttgtcgcaggaattaggcattcccctggaagaagctcaggctttcattcagaaatactttcaaagctatcccaaagttaaagcatggatcgagaagactctccgtgaaggccgcacacgtggttacgtagagaccttatttggacgtcgccgctatgttcccgatttaaacggtcgcgtgaaaggcaagcgtgaagccgccgaacgcatggcgttcaacatgcctgtacagggcacggcagctgacctcatgaaacttgcaatggtgcgcctttttccacaattgcgtgaagttggtgcccgcatgctgttgcaggtccacgatgaactcttgttagaagcgccaaaagagcgtgcggaagaggtggcagccctcgcgaaagaagttatggaaggcgtgtggcccttagcggtgcctcttgaagtcgaagttggtattggcgaggattggctggctgccaaagga

SEQ ID NO: 5736 - protein, 841 aa, synthetic construct
  REGION 1..841: note = Variant of DNA polymerase I from Thermus sp. strain 2.9
MHHHHHHGGSGVLPVFEPKGRVLLVDGHHLAYRNFFALKGLTTSLGEPVQGVYGFAKSLLKALKEDGDVVIVVFDAKAPSFRHEAYEAYKAGRAPTPEDFPRQLALMKELVDLLGLERLEVPGFEADDVLATLAKKAEREGYEVQILTADRDLFQLLSPRISVLHPEGHRITPEWLWEKYGLRPEQWVDFRALAGDPSDNIPGVKGIGEKTALKLLKEWGSLENLLKNLDQVKPESVREKILAHLEDLKLSRELSRVRTDLPLEVDFGRRREPDWEGLKAFLERLEFGSLLHEFGLLESPLLAEEAPWPPPEGAFLGYRLSRPEPMWAELLALAASAQGRVYRAEDPHGALRGLFEVRGLLAKDLAVVALREGLDLPPTDDPMLLAYLLDPSNTTPEGVARRYGGEWTEDAGKRALLAERLHENLLGRLQGEERLLWLYEEVEKPLSRVLAHMEATGVKLDVAYLENLLLEVAAHMRRLEEEVFRLAGRSFRLNSRDQLERVLFDELGLPPIGKTEKTGKRSTSAAVLEALREVHPIVDKILQYREMAKLKGTYIDRLPALVHPKTGRLHTRFNQTATATGRLSSSDPNLQNIPVRTPLGQKIRRAFVAEPGWRLVALDYRQIELRVLAHLSGDENLIRVFQEGKDIHTQTASWMFGLSAEAIDPLMRRAAKTINFGVLYGMSAFRLSQELGIPLEEAQAFIQKYFQSYPKVKAWIEKTLREGRTRGYVETLFGRRRYVPDLNGRVKGKREAAERMAFNMPVQGTAADLMKLAMVRLFPQLREVGARMLLQVHDELLLEAPKERAEEVAALAKEVMEGVWPLAVPLEVEVGIGEDWLAAKG

SEQ ID NO: 5737 - DNA, 2523 bp, synthetic construct
  misc_feature 1..2523: note = Variant of DNA polymerase I from Thermus sp. strain 2.9
  source 1..2523: mol_type = other DNA
atgcaccatcatcatcatcatggcggtagcggcgtgttaccggtgttcgagcctaaaggtcgcgtgcttctggttgatggccatcatctcgcgtatcgtaacttctttgccctgaaaggattaaccaccagcctgggcgagccggtacagggtgtctacggctttgcaaagtcgctcctgaaagctctgaaagaagacggtgatgtggtgattgttgtctttgatgcgaaagcgccaagttttcgccacgaagcgtacgaagcttacaaagccgggcgtgctccaacgccggaagactttcctcgccaattggcgcttatgaaggaattagtggatttgcttggcctcgaacgcttggaagttcccggtttcgaggcagacgacgtattagcgactctcgcaaagaaagccgaacgtgagggctatgaagtccagatcttgacagcagatcgcgatcttttccagcttttatctccgcgcatctcggtgttacacccggaagggcatcgtatcaccccggaatggctctgggagaaatatggtttgcgtcccgaacaatgggtggattttcgcgccttagcaggcgatccgagcgacaatattccgggagttaaaggtatcggcgagaagacggcgctcaagctccttaaagaatgggggtcgttggagaacttgcttaagaatttagatcaggtcaaaccagagtcagtgcgtgagaagattcttgctcacctcgaagacctcaaattaagccgcgaattgtcccgtgtacgcaccgatttgccgctcgaagttgatttcggtcgccgccgcgaacctgactgggagggtcttaaagcgtttttagagcgtcttgaatttggttcgctcttgcatgaattcggccttttagaaagcccgttactggccgaagaagcaccttggccaccgcccgagggcgcgtttttaggttaccgtttgagtcgcccggaaccgatgtgggccgaattactggctcttgcagcgtctgcccagggacgtgtgtatcgcgcggaagaccctcatggtgcgctccgcggcctcttcgaagtccgtggcctccttgccaaagacttagctgttgttgcattgcgcgaaggtcttgatttacctccgactgatgatccaatgcttcttgcgtacctcttggacccgtcaaacacgacgcccgaaggcgtagcccgtcgttacggcggcgagtggaccgaagatgcaggcaaacgcgcgttattggccgaacgtttgcacgaaaatttattaggacgtttgcaaggcgaggcgcgtctcctgtggctttacgaagaagtggagaaaccattgagtcgcgtgctcgcgcatatggaagctaccggtgtcaaattagacgtggcgtatttggagaatctcagccttgaagttgctgcccacatgcgccgcttggaggaagaagtattccgtttagcaggccgttcctttcgccttaactctcgcgatcagttagaacgtgtgttgttcgatgaacttggtctccctcctatcggcaagacagagaagaccggtaaacgtagcacttcagcggcggttttagaagctcttcgcgaagtccatcccattgtggacaagatcttgcagtaccgcgaaatggcgaaattgaaaggcacctatattgaccgtcttccggcattagtccacccgaaaacgggacgcctccatacccgcttcaaccaaacagccacggcgaccggtcgtttgtcctcctctgatccaaaccttcagaatattccagtacgtaccccattgggccagaagatccgccgtgcgtttgtagctgagccgggttggcgtttagtggccctcgattatcgtcaaattgaattacgtgtccttgcccatctttctggcgatgagaacctcatccgcgtgtttcaggaaggcaaagacattcacactcaaacggcaagctggatgtttggattatcagctgaagcgatcgatcctttgatgcgtcgtgcagcgaagaccatcaatttcggtgttctctacggtatgagtgcctttcgtttgtcgcaggaattaggcattccctatgaagaagctcaggcgttcattcagaaatactttcaaagctatcccaaagttaaagcatggatcgagaagactctccgtgaaggccgcacacgtggttacgtagagaccttatttggacgtcgccgctatgttcccgatttaaactcgcgcgtgaaaggcaagcgtgaagccgccgaacgcatggcgttcaacatgcctgtacagggcacggcagctgacctcatgaaacttgcaatggtgcgcctttttccacaattgcgtgaagttggtgcccgcatgctcttgcaggtccacgatgaactcttgttagaagcgccaaaagagcgtgcggaagaggtggcagccctcgcgaaagaagttatggaaggcgtgtggcccttagcggtgcctcttgaagtcgaagttggtattggcgaggattggctggctgccaaagga

SEQ ID NO: 5738 - protein, 841 aa, synthetic construct
  REGION 1..841: note = Variant of DNA polymerase I from Thermus sp. strain 2.9
MHHHHHHGGSGVLPVFEPKGRVLLVDGHHLAYRNFFALKGLTTSLGEPVQGVYGFAKSLLKALKEDGDVVIVVFDAKAPSFRHEAYEAYKAGRAPTPEDFPRQLALMKELVDLLGLERLEVPGFEADDVLATLAKKAEREGYEVQILTADRDLFQLLSPRISVLHPEGHRITPEWLWEKYGLRPEQWVDFRALAGDPSDNIPGVKGIGEKTALKLLKEWGSLENLLKNLDQVKPESVREKILAHLEDLKLSRELSRVRTDLPLEVDFGRRREPDWEGLKAFLERLEFGSLLHEFGLLESPLLAEEAPWPPPEGAFLGYRLSRPEPMWAELLALAASAQGRVYRAEDPHGALRGLFEVRGLLAKDLAVVALREGLDLPPTDDPMLLAYLLDPSNTTPEGVARRYGGEWTEDAGKRALLAERLHENLLGRLQGEARLLWLYEEVEKPLSRVLAHMEATGVKLDVAYLENLSLEVAAHMRRLEEEVFRLAGRSFRLNSRDQLERVLFDELGLPPIGKTEKTGKRSTSAAVLEALREVHPIVDKILQYREMAKLKGTYIDRLPALVHPKTGRLHTRFNQTATATGRLSSSDPNLQNIPVRTPLGQKIRRAFVAEPGWRLVALDYRQIELRVLAHLSGDENLIRVFQEGKDIHTQTASWMFGLSAEAIDPLMRRAAKTINFGVLYGMSAFRLSQELGIPYEEAQAFIQKYFQSYPKVKAWIEKTLREGRTRGYVETLFGRRRYVPDLNSRVKGKREAAERMAFNMPVQGTAADLMKLAMVRLFPQLREVGARMLLQVHDELLLEAPKERAEEVAALAKEVMEGVWPLAVPLEVEVGIGEDWLAAKG

SEQ ID NO: 5739 - DNA, 2523 bp, synthetic construct
  misc_feature 1..2523: note = Variant of DNA polymerase I from Thermus sp. strain 2.9
  source 1..2523: mol_type = other DNA
atgcaccatcatcatcatcatggcggtagcggcgtgttaccggtgttcgagcctaaaggtcgcgtgcttctggttgatggccatcatctcgcgtatcgtaacttctttgccctgaaaggattaaccaccagcctgggcgagccggtacagggtgtctacggctttgcaaagtcgctcctgaaagctctgaaagaagacggtgatgtggtgattgttgtctttgatgcgaaagcgccaagttttcgccacgaagcgtacgaagcttacaaagccgggcgtgctccaacgccggaagactttcctcgccaattggcgcttatgaaggaattagtggatttgcttggcctcgaacgcttggaagttcccggtttcgaggcagacgacgtattagcgactctcgcaaagaaagccgaacgtgagggctatgaagtccagatcttgacagcagatcgcgatcttttccagcttttatctccgcgcatctcggtgttacacccggaagggcatcgtatcaccccggaatggctctgggagaaatatggtttgcgtcccgaacaatgggtggattttcgcgccttagcaggcgatccgagcgacaatattccgggagttaaaggtatcggcgagaagacggcgctcaagctccttaaagaatgggggtcgttggagaacttgcttaagaatttagatcaggtcaaaccagagtcagtgcgtgagaagattcttgctcacctcgaagacctcaaattaagccgcgaattgtcccgtgtacgcaccgatttgccgctcgaagttgatttcggtcgccgccgcgaacctgactgggagggtcttaaagcgtttttagagcgtcttgaatttggttcgctcttgcatgaattcggccttttagaaagcccgttactggccgaagaagcaccttggccaccgcccgagggcgcgtttttaggttaccgtttgagtcgcccggaaccgatgtgggccgaattactggctcttgcagcgtctgcccagggacgtgtgtatcgcgcggaagaccctcatggtgcgctccgcggcctcttcgaagtccgtaccctccttgccaaagacttagctgttgttgcattgcgcgaaggtcttgatttacctccgactgatgatccaatgcttcttgcgtacctcttggacccgtcaaacacgacgcccgaaggcgtagcccgtcgttacggcggcgagtggaccgaagatgcaggcaaacgcgcgttattggccgaacgtttgcacgaaaatttattaggacgtttgcaaggcgaggagcgtctccgttggctttacgaagaagtggagaaaccattgagtcgcgtgctcgcgcatatggaagctaccggtgtcaaattagacgtggcgtatttggagaatctcagccttgaagttgctgcccacatgcgccgcttggaggaagaagtattccgtttagcaggccgttcctttcgccttaactctcgcgatcagttagaacgtgtgttgttcgatgaacttggtctccctcctatcggcaagacagagaagaccggtaaacgtagcacttcagcggcggttttagaagctcttcgcgaagtccatcccattgtggacaagatcttgcagtaccgcgaaatggcgaaattgaaaggcacctatattgaccgtcttccggcattagtccacccgaaaacgggacgcctccatacccgcttcaaccaaacagccacggcgaccggtcgtttgtcctcctctgatccaaaccttcagaatattccagtacgtacctttttgggccagaagatccgccgtgcgtttgtagctgagccgggttggcgtttagtggccctcgattatcgtcaaattgaattacgtgtccttgcccatctttctggcgatgagaacctcatccgcgtgtttcaggaaggcaaagacattcacactcaaacggcaagctggatgtttggattatcagctgaagcgatcgatcctttgatgcgtcgtgcagcgaagaccatcaatttcggtgttctctacggtatgagtgcctttcgtttgtcgcaggaattaggcattcccctggaagaagctcaggctttcattcagaaatactttcaaagctatcccaaagttaaagcatggatcgagaagactctccgtgaaggccgcacacgtggttacgtagagaccttatttggacgtcgccgctatgttcccgatttaaacggtcgcgtgaaaggcaagcgtgaagccgccgaacgcatggcgttcaacatgcctgtacagggcacggcagctgacctcatgaaacttgcaatggtgcgcctttttccacaattgcgtgaagttggtgcccgcatgctgttgcaggtccacgatgaactcttgttagaagcgccaaaagagcgtgcggaagaggtggcagccctcgcgaaagaagttatggaaggcgtgtggcccttagcggtgcctcttgaagtcgaagttggtattggcgaggattggctggctgccaaagga

SEQ ID NO: 5740 - protein, 841 aa, synthetic construct
  REGION 1..841: note = Variant of DNA polymerase I from Thermus sp. strain 2.9
MHHHHHHGGSGVLPVFEPKGRVLLVDGHHLAYRNFFALKGLTTSLGEPVQGVYGFAKSLLKALKEDGDVVIVVFDAKAPSFRHEAYEAYKAGRAPTPEDFPRQLALMKELVDLLGLERLEVPGFEADDVLATLAKKAEREGYEVQILTADRDLFQLLSPRISVLHPEGHRITPEWLWEKYGLRPEQWVDFRALAGDPSDNIPGVKGIGEKTALKLLKEWGSLENLLKNLDQVKPESVREKILAHLEDLKLSRELSRVRTDLPLEVDFGRRREPDWEGLKAFLERLEFGSLLHEFGLLESPLLAEEAPWPPPEGAFLGYRLSRPEPMWAELLALAASAQGRVYRAEDPHGALRGLFEVRTLLAKDLAVVALREGLDLPPTDDPMLLAYLLDPSNTTPEGVARRYGGEWTEDAGKRALLAERLHENLLGRLQGEERLRWLYEEVEKPLSRVLAHMEATGVKLDVAYLENLSLEVAAHMRRLEEEVFRLAGRSFRLNSRDQLERVLFDELGLPPIGKTEKTGKRSTSAAVLEALREVHPIVDKILQYREMAKLKGTYIDRLPALVHPKTGRLHTRFNQTATATGRLSSSDPNLQNIPVRTFLGQKIRRAFVAEPGWRLVALDYRQIELRVLAHLSGDENLIRVFQEGKDIHTQTASWMFGLSAEAIDPLMRRAAKTINFGVLYGMSAFRLSQELGIPLEEAQAFIQKYFQSYPKVKAWIEKTLREGRTRGYVETLFGRRRYVPDLNGRVKGKREAAERMAFNMPVQGTAADLMKLAMVRLFPQLREVGARMLLQVHDELLLEAPKERAEEVAALAKEVMEGVWPLAVPLEVEVGIGEDWLAAKG

SEQ ID NO: 5741 - DNA, 2523 bp, synthetic construct
  misc_feature 1..2523: note = Variant of DNA polymerase I from Thermus sp. strain 2.9
  source 1..2523: mol_type = other DNA
atgcaccatcatcatcatcatggcggtagcggcgtgttaccggtgttcgagcctaaaggtcgcgtgcttctggttgatggccatcatctcgcgtatcgtaacttctttgccctgaaaggattaaccaccagcctgggcgagccggtacagggtgtctacggctttgcaaagtcgctcctgaaagctctgaaagaagacggtgatgtggtgattgttgtctttgatgcgaaagcgccaagttttcgccacgaagcgtacgaagcttacaaagccgggcgtgctccaacgccggaagactttcctcgccaattggcgcttatgaaggaattagtggatttgcttggcctcgaacgcttggaagttcccggtttcgaggcagacgacgtattagcgactctcgcaaagaaagccgaacgtgagggctatgaagtccagatcttgacagcagatcgcgatcttttccagcttttatctccgcgcatctcggtgttacacccggaagggcatcgtatcaccccggaatggctctgggagaaatatggtttgcgtcccgaacaatgggtggattttcgcgccttagcaggcgatccgagcgacaatattccgggagttaaaggtatcggcgagaagacggcgctcaagctccttaaagaatgggggtcgttggagaacttgcttaagaatttagatcaggtcaaaccagagtcagtgcgtgagaagattcttgctcacctcgaagacctcaaattaagccgcgaattgtcccgtgtacgcaccgatttgccgctcgaagttgatttcggtcgccgccgcgaacctgactgggagggtcttaaagcgtttttagagcgtcttgaatttggttcgctcttgcatgaattcggccttttagaaagcccgttactggccgaagaagcaccttggccaccgcccgagggcgcgtttttaggttaccgtttgagtcgcccggaaccgatgtgggccgaattactggctcttgcagcgtctgcccagggacgtgtgtatcgcgcggaagaccctcatggtgcgctccgcggcctcttcgaagtccgtggactccttgccaaagacttagctgttgttgcattgcgcgaaggtcttgatttacctccgactgatgatccaatgcttcttgcgtacctcttggacccgtcaaacacgacgcccgaaggcgtagcccgtcgttacggcggcgagtggaccgaagatgcagcgaaacgcgcgttattggccgaacgtttgcacgaaaatttattaggacgtttgcaaggcgaggaacgtctcctctggctttacgaagaagtggagaaaccattgagtcgcgtgctcgcgcatatggaagctaccggtgtcaaattagacgtggcgtatttggagaatctcagccttgaagttgctgcccacatgcgccgcttggaggaagaagtattccgtttagcaggccgttcctttcgccttaactctcgcgatcagttagaacgtgtgttgttcgatgaacttggtctccctcctatcggcaagacagagaagaccggtaaacgtagcacttcagcggcggttttagaagctcttcgcgaagtccatcccattgtggacaagatcttgcagtaccgcgaaatggcgaaattgaaaggcacctatattgaccgtcttccggcattagtccacccgaaaacgggacgcctccatacccgcttcaaccaaacagccacggcgaccggtcgtttgtcctcctctgatccaaaccttcagaatattccagtacgtaccccattgggccagaagatccgccgtgcgtttgtagctgaggagggttggcgtttagtggccctcgattatcgtcaaattgaattacgtgtccttgccgggctttctggcgatgagaacctcatccgcgtgtttcaggaaggcaaagacattcacactcaaacggcaagctggatgtttggattatcagctgaagcgatcgatcctttgatgcgtcgtgcagcgaagaccatcaatttcggtgttctctacggtatgagtgcctttcgtttgtcgcaggaattaggcattccctatgaagaagctcaggcgttcattcagaaatactttcaaagctatcccaaagttaaagcatggatcgagaagactctccgtgaaggccgcacacgtggttacgtagagaccttatttggacgtcgccgctatgttcccgatttaaacgctcgcgtgaaaggcaagcgtgaagccgccgaacgcatggcgttcaacatgcctgtacagggcacggcagctgacctcatgaaacttgcaatggtgcgcctttttccacaattgcgtgaagttggtgcccgcatgctcttgcaggtccacgatgaactcttgttagaagcgccaaaagagcgtgcggaagaggtggcagccctcgcgaaagaagttatggaaggcgtgtggcccttagcggtgcctcttgaagtcgaagttggtattggcgaggattggctggctgccaaagga

SEQ ID NO: 5742 - protein, 841 aa, synthetic construct
  REGION 1..841: note = Variant of DNA polymerase I from Thermus sp. strain 2.9
MHHHHHHGGSGVLPVFEPKGRVLLVDGHHLAYRNFFALKGLTTSLGEPVQGVYGFAKSLLKALKEDGDVVIVVFDAKAPSFRHEAYEAYKAGRAPTPEDFPRQLALMKELVDLLGLERLEVPGFEADDVLATLAKKAEREGYEVQILTADRDLFQLLSPRISVLHPEGHRITPEWLWEKYGLRPEQWVDFRALAGDPSDNIPGVKGIGEKTALKLLKEWGSLENLLKNLDQVKPESVREKILAHLEDLKLSRELSRVRTDLPLEVDFGRRREPDWEGLKAFLERLEFGSLLHEFGLLESPLLAEEAPWPPPEGAFLGYRLSRPEPMWAELLALAASAQGRVYRAEDPHGALRGLFEVRGLLAKDLAVVALREGLDLPPTDDPMLLAYLLDPSNTTPEGVARRYGGEWTEDAAKRALLAERLHENLLGRLQGEERLLWLYEEVEKPLSRVLAHMEATGVKLDVAYLENLSLEVAAHMRRLEEEVFRLAGRSFRLNSRDQLERVLFDELGLPPIGKTEKTGKRSTSAAVLEALREVHPIVDKILQYREMAKLKGTYIDRLPALVHPKTGRLHTRFNQTATATGRLSSSDPNLQNIPVRTPLGQKIRRAFVAEEGWRLVALDYRQIELRVLAGLSGDENLIRVFQEGKDIHTQTASWMFGLSAEAIDPLMRRAAKTINFGVLYGMSAFRLSQELGIPYEEAQAFIQKYFQSYPKVKAWIEKTLREGRTRGYVETLFGRRRYVPDLNARVKGKREAAERMAFNMPVQGTAADLMKLAMVRLFPQLREVGARMLLQVHDELLLEAPKERAEEVAALAKEVMEGVWPLAVPLEVEVGIGEDWLAAKG

SEQ ID NO: 5743 - DNA, 2523 bp, synthetic construct
  misc_feature 1..2523: note = Variant of DNA polymerase I from Thermus sp. strain 2.9
  source 1..2523: mol_type = other DNA
atgcaccatcatcatcatcatggcggtagcggcgtgttaccggtgttcgagcctaaaggtcgcgtgcttctggttgatggccatcatctcgcgtatcgtaacttctttgccctgaaaggattaaccaccagcctgggcgagccggtacagggtgtctacggctttgcaaagtcgctcctgaaagctctgaaagaagacggtgatgtggtgattgttgtctttgatgcgaaagcgccaagttttcgccacgaagcgtacgaagcttacaaagccgggcgtgctccaacgccggaagactttcctcgccaattggcgcttatgaaggaattagtggatttgcttggcctcgaacgcttggaagttcccggtttcgaggcagacgacgtattagcgactctcgcaaagaaagccgaacgtgagggctatgaagtccagatcttgacagcagatcgcgatcttttccagcttttatctccgcgcatctcggtgttacacccggaagggcatcgtatcaccccggaatggctctgggagaaatatggtttgcgtcccgaacaatgggtggattttcgcgccttagcaggcgatccgagcgacaatattccgggagttaaaggtatcggcgagaagacggcgctcaagctccttaaagaatgggggtcgttggagaacttgcttaagaatttagatcaggtcaaaccagagtcagtgcgtgagaagattcttgctcacctcgaagacctcaaattaagccgcgaattgtcccgtgtacgcaccgatttgccgctcgaagttgatttcggtcgccgccgcgaacctgactgggagggtcttaaagcgtttttagagcgtcttgaatttggttcgctcttgcatgaattcggccttttagaaagcccgttactggccgaagaagcaccttggccaccgcccgagggcgcgtttttaggttaccgtttgagtcgcccggaaccgatgtgggccgaattactggctcttgcagcgtctgcccagggacgtgtgtatcgcgcggaagaccctcatggtgcgctccgcggcctcttcgaagtccgtggactccttgccaaagacttagctgttgttgcattgcgcgaaggtcttgatttacctccgactgatgatccaatgcttcttgcgtacctcttggacccgtcaaacacgacgcccgaaggcgtagcccgtcgttacggcggcgagtggaccgaagatgcagcgaaacgcgcgttattggccgaacgtttgcacgaaaatttattaggacgtttgcaaggcgaggaacgtctcctctggctttacgaagaagtggagaaaccattgagtcgcgtgctcgcgcatatggaagctaccggtgtcaaattagacgtggcgtatttggagaatctcagccttgaagttgctgcccacatgcgccgcttggaggaagaagtattccgtttagcaggccgttcctttcgccttaactctcgcgatcagttagaacgtgtgttgttcgatgaacttggtctccctcctatcggcaagacagagaagaccggtaaacgtagcacttcagcggcggttttagaagctcttcgcgaagtccatcccattgtggacaagatcttgcagtaccgcgaaatggcgaaattgaaaggcacctatattgaccgtcttccggcattagtccacccgaaaacgggacgcctccatacccgcttcaaccaaacagccacggcgaccggtcgtttgtcctcctctgatccaaaccttcagaatattccagtacgtaccccattgggccagaagatccgccgtgcgtttgtagctgaggagggttggcgtttagtggccctcgattatcgtcaaattgaattacgtgtccttgcccatctttctggcgatgagaacctcatccgcgtgtttcaggaaggcaaagacattcacactcaaacggcaagctggatgtttggattatcagctgaagcgatcgatcctttgatgcgtcgtgcagcgaagaccatcaatttcggtgttctctacggtatgagtgcctttcgtttgtcgcaggaattaggcattccctatgaagaagctcaggcgttcattcagaaatactttcaaagctatcccaaagttaaagcatggatcgagaagactctccgtgaaggccgcacacgtggttacgtagagaccttatttggacgtcgccgctatgttcccgatttaaacgctcgcgtgaaaggcaagcgtgaagccgccgaacgcatggcgttcaacatgcctgtacagggcacggcagctgacctcatgaaacttgcaatggtgcgcctttttccacaattgcgtgaagttggtgcccgcatgctcttgcaggtccacgatgaactcttgttagaagcgccaaaagagcgtgcggaagaggtggcagcctcggcgaaagaagttatggaaggcgtgtggcccttagcggtgcctcttgaagtcgaagttggtattggcgaggattggctggctgccaaagga

SEQ ID NO: 5744 - protein, 841 aa, synthetic construct
  REGION 1..841: note = Variant of DNA polymerase I from Thermus sp. strain 2.9
MHHHHHHGGSGVLPVFEPKGRVLLVDGHHLAYRNFFALKGLTTSLGEPVQGVYGFAKSLLKALKEDGDVVIVVFDAKAPSFRHEAYEAYKAGRAPTPEDFPRQLALMKELVDLLGLERLEVPGFEADDVLATLAKKAEREGYEVQILTADRDLFQLLSPRISVLHPEGHRITPEWLWEKYGLRPEQWVDFRALAGDPSDNIPGVKGIGEKTALKLLKEWGSLENLLKNLDQVKPESVREKILAHLEDLKLSRELSRVRTDLPLEVDFGRRREPDWEGLKAFLERLEFGSLLHEFGLLESPLLAEEAPWPPPEGAFLGYRLSRPEPMWAELLALAASAQGRVYRAEDPHGALRGLFEVRGLLAKDLAVVALREGLDLPPTDDPMLLAYLLDPSNTTPEGVARRYGGEWTEDAAKRALLAERLHENLLGRLQGEERLLWLYEEVEKPLSRVLAHMEATGVKLDVAYLENLSLEVAAHMRRLEEEVFRLAGRSFRLNSRDQLERVLFDELGLPPIGKTEKTGKRSTSAAVLEALREVHPIVDKILQYREMAKLKGTYIDRLPALVHPKTGRLHTRFNQTATATGRLSSSDPNLQNIPVRTPLGQKIRRAFVAEEGWRLVALDYRQIELRVLAHLSGDENLIRVFQEGKDIHTQTASWMFGLSAEAIDPLMRRAAKTINFGVLYGMSAFRLSQELGIPYEEAQAFIQKYFQSYPKVKAWIEKTLREGRTRGYVETLFGRRRYVPDLNARVKGKREAAERMAFNMPVQGTAADLMKLAMVRLFPQLREVGARMLLQVHDELLLEAPKERAEEVAASAKEVMEGVWPLAVPLEVEVGIGEDWLAAKG

SEQ ID NO: 5745 - DNA, 2523 bp, synthetic construct
  misc_feature 1..2523: note = Variant of DNA polymerase I from Thermus sp. strain 2.9
  source 1..2523: mol_type = other DNA
atgcaccatcatcatcatcatggcggtagcggcgtgttaccggtgttcgagcctaaaggtcgcgtgcttctggttgatggccatcatctcgcgtatcgtaacttctttgccctgaaaggattaaccaccagcctgggcgagccggtacagggtgtctacggctttgcaaagtcgctcctgaaagctctgaaagaagacggtgatgtggtgattgttgtctttgatgcgaaagcgccaagttttcgccacgaagcgtacgaagcttacaaagccgggcgtgctccaacgccggaagactttcctcgccaattggcgcttatgaaggaattagtggatttgcttggcctcgaacgcttggaagttcccggtttcgaggcagacgacgtattagcgactctcgcaaagaaagccgaacgtgagggctatgaagtccagatcttgacagcagatcgcgatcttttccagcttttatctccgcgcatctcggtgttacacccggaagggcatcgtatcaccccggaatggctctgggagaaatatggtttgcgtcccgaacaatgggtggattttcgcgccttagcaggcgatccgagcgacaatattccgggagttaaaggtatcggcgagaagacggcgctcaagctccttaaagaatgggggtcgttggagaacttgcttaagaatttagatcaggtcaaaccagagtcagtgcgtgagaagattcttgctcacctcgaagacctcaaattaagccgcgaattgtcccgtgtacgcaccgatttgccgctcgaagttgatttcggtcgccgccgcgaacctgactgggagggtcttaaagcgtttttagagcgtcttgaatttggttcgctcttgcatgaattcggccttttagaaagcccgttactggccgaagaagcaccttggccaccgcccgagggcgcgtttttaggttaccgtttgagtcgcccggaaccgatgtgggccgaattactggctcttgcagcgtctgcccagggacgtgtgtatcgcgcggaagaccctcatggtgcgctccgcggcctcttcgaagtccgtggactccttgccaaagacttagctgttgttgcattgcgcgaaggtcttgatttacctccgactgatgatccaatgcttcttgcgtacctcttggacccgtcaaacacgacgcccgaaggcgtagcccgtcgttacggcggcgagtggaccgaagatgcagcgaaacgcgcgttattggccgaacgtttgcacgaaaatttattaggacgtttgcaaggcgaggaacgtctcctctggctttacgaagaagtggagaaaccattgagtcgcgtgctcgcgcatatggaagctaccggtgtcaaattagacgtggcgtatttggagaatctcagccttgaagttgctgcccacatgcgccgcttggaggaagaagtattccgtttagcaggccgttcctttcgccttaactctcgcgatcagttagaacgtgtgttgttcgatgaacttggtctccctcctatcggcaagacagagaagaccggtaaacgtagcacttcagcggcggttttagaagctcttcgcgaagtccatcccattgtggacaagatcttgcagtaccgcgaaatggcgaaattgaaaggcacctatattgaccgtcttccggcattagtccacccgaaaacgggacgcctccatacccgcttcaaccaaacagccacggcgaccggtcgtttgcagtcctctgatccaaaccttcagaatattccagtacgtaccccattgggccagaagatccgccgtgcgtttgtagctgaggagggttggcgtttagtggccctcgattatcgtcaaattgaattacgtgtccttgcccatctttctggcgatgagaacctcatccgcgtgtttcaggaaggcaaagacattcacactcaaacggcaagctggatgtttggattatcagctgaagcgatcgatcctttgatgcgtcgtgcagcgaagaccatcaatttcggtgttctctacggtatgagtgcctttcgtttgtcgcaggaattaggcattccctatgaagaagctcaggcgttcattcagaaatactttcaaagctatcccaaagttaaagcatggatcgagaagactctccgtgaaggccgcacacgtggttacgtagagaccttatttggacgtcgccgctatgttcccgatttaaacgctcgcgtgaaaggcaagcgtgaagccgccgaacgcatggcgttcaacatgcctgtacagggcacggcagctgacctcatgaaacttgcaatggtgcgcctttttccacaattgcgtgaagttggtgcccgcatgctcttgcaggtccacgatgaactcttgttagaagcgccaaaagagcgtgcggaagaggtggcagccctcgcgaaagaagttatggaaggcgtgtggcccttagcggtgcctcttgaagtcgaagttggtattggcgaggattggctggctgccaaagga

SEQ ID NO: 5746 - protein, 841 aa, synthetic construct
  REGION 1..841: note = Variant of DNA polymerase I from Thermus sp. strain 2.9
MHHHHHHGGSGVLPVFEPKGRVLLVDGHHLAYRNFFALKGLTTSLGEPVQGVYGFAKSLLKALKEDGDVVIVVFDAKAPSFRHEAYEAYKAGRAPTPEDFPRQLALMKELVDLLGLERLEVPGFEADDVLATLAKKAEREGYEVQILTADRDLFQLLSPRISVLHPEGHRITPEWLWEKYGLRPEQWVDFRALAGDPSDNIPGVKGIGEKTALKLLKEWGSLENLLKNLDQVKPESVREKILAHLEDLKLSRELSRVRTDLPLEVDFGRRREPDWEGLKAFLERLEFGSLLHEFGLLESPLLAEEAPWPPPEGAFLGYRLSRPEPMWAELLALAASAQGRVYRAEDPHGALRGLFEVRGLLAKDLAVVALREGLDLPPTDDPMLLAYLLDPSNTTPEGVARRYGGEWTEDAAKRALLAERLHENLLGRLQGEERLLWLYEEVEKPLSRVLAHMEATGVKLDVAYLENLSLEVAAHMRRLEEEVFRLAGRSFRLNSRDQLERVLFDELGLPPIGKTEKTGKRSTSAAVLEALREVHPIVDKILQYREMAKLKGTYIDRLPALVHPKTGRLHTRFNQTATATGRLQSSDPNLQNIPVRTPLGQKIRRAFVAEEGWRLVALDYRQIELRVLAHLSGDENLIRVFQEGKDIHTQTASWMFGLSAEAIDPLMRRAAKTINFGVLYGMSAFRLSQELGIPYEEAQAFIQKYFQSYPKVKAWIEKTLREGRTRGYVETLFGRRRYVPDLNARVKGKREAAERMAFNMPVQGTAADLMKLAMVRLFPQLREVGARMLLQVHDELLLEAPKERAEEVAALAKEVMEGVWPLAVPLEVEVGIGEDWLAAKG

SEQ ID NO: 5747 - DNA, 2523 bp, synthetic construct
  misc_feature 1..2523: note = Variant of DNA polymerase I from Thermus sp. strain 2.9
  source 1..2523: mol_type = other DNA
atgcaccatcatcatcatcatggcggtagcggcgtgttaccggtgttcgagcctaaaggtcgcgtgcttctggttgatggccatcatctcgcgtatcgtaacttctttgccctgaaaggattaaccaccagcctgggcgagccggtacagggtgtctacggctttgcaaagtcgctcctgaaagctctgaaagaagacggtgatgtggtgattgttgtctttgatgcgaaagcgccaagttttcgccacgaagcgtacgaagcttacaaagccgggcgtgctccaacgccggaagactttcctcgccaattggcgcttatgaaggaattagtggatttgcttggcctcgaacgcttggaagttcccggtttcgaggcagacgacgtattagcgactctcgcaaagaaagccgaacgtgagggctatgaagtccagatcttgacagcagatcgcgatcttttccagcttttatctccgcgcatctcggtgttacacccggaagggcatcgtatcaccccggaatggctctgggagaaatatggtttgcgtcccgaacaatgggtggattttcgcgccttagcaggcgatccgagcgacaatattccgggagttaaaggtatcggcgagaagacggcgctcaagctccttaaagaatgggggtcgttggagaacttgcttaagaatttagatcaggtcaaaccagagtcagtgcgtgagaagattcttgctcacctcgaagacctcaaattaagccgcgaattgtcccgtgtacgcaccgatttgccgctcgaagttgatttcggtcgccgccgcgaacctgactgggagggtcttaaagcgtttttagagcgtcttgaatttggttcgctcttgcatgaattcggccttttagaaagcccgttactggccgaagaagcaccttggccaccgcccgagggcgcgtttttaggttaccgtttgagtcgcccggaaccgatgtgggccgaattactggctcttgcagcgtctgcccagggacgtgtgtatcgcgcggaagaccctcatggtgcgctccgcggcctcttcgaagtccgtggactccttgccaaagacttagctgttgttgcattgcgcgaaggtcttgatttacctccgactgatgatccaatgcttcttgcgtacctcttggacccgtcaaacacgacgcccgaaggcgtagcccgtcgttacggcggcgagtggaccgaagatgcagcgaaacgcgcgttattggccgaacgtttgcacgaaaatttattaggacgtttgcaaggcgaggaacgtctcctctggcttgctgaagaagtggagaaaccattgagtcgcgtgctcgcgcatatggaagctaccggtgtcaaattagacgtggcgtatttggagaatctcagccttgaagttgctgcccacatgcgccgcttggaggaagaagtattccgtttagcaggccgttcctttcgccttaactctcgcgatcagttagaacgtgtgttgttcgatgaacttggtctccctcctatcggcaagacagagaagaccggtaaacgtagcacttcagcggcggttttagaagctcttcgcgaagtccatcccattgtggacaagatcttgcagtaccgcgaaatggcgaaattgaaaggcacctatattgaccgtcttccggcattagtccacccgaaaacgggacgcctccatacccgcttcaaccaaacagccacggcgaccggtcgtttgtcctcctctgatccaaaccttcagaatattccagtacgtaccccattgggccagaagatccgccgtgcgtttgtagctgaggagggttggcgtttagtggccctcgattatcgtcaaattgaattacgtgtccttgcccatctttctggcgatgagaacctcatccgcgtgtttcaggaaggcaaagacattcacactcaaacggcaagctggatgtttggattatcagctgaagcgatcgatcctttgatgcgtcgtgcagcgaagaccatcaatttcggtgttctctacggtatgagtgcctttcgtttgtcgcaggaattaggcattccctatgaagaagctcaggcgttcattcagaaatactttcaaagctatcccaaagttaaagcatggatcgagaagactctccgtgaaggccgcacacgtggttacgtagagaccttatttggacgtcgccgctatgttcccgatttaaacgctcgcgtgaaaggcaagcgtgaagccgccgaacgcatggcgttcaacatgcctgtacagggcacggcagctgacctcatgaaacttgcaatggtgcgcctttttccacaattgcgtgaagttggtgcccgcatgctcttgcaggtccacgatgaactcttgttagaagcgccaaaagagcgtgcggaagaggtggcagccctcgcgaaagaagttatggaaggcgtgtggcccttagcggtgcctcttgaagtcgaagttggtattggcgaggattggctggctgccaaagga

SEQ ID NO: 5748 - protein, 841 aa, synthetic construct
  REGION 1..841: note = Variant of DNA polymerase I from Thermus sp. strain 2.9
MHHHHHHGGSGVLPVFEPKGRVLLVDGHHLAYRNFFALKGLTTSLGEPVQGVYGFAKSLLKALKEDGDVVIVVFDAKAPSFRHEAYEAYKAGRAPTPEDFPRQLALMKELVDLLGLERLEVPGFEADDVLATLAKKAEREGYEVQILTADRDLFQLLSPRISVLHPEGHRITPEWLWEKYGLRPEQWVDFRALAGDPSDNIPGVKGIGEKTALKLLKEWGSLENLLKNLDQVKPESVREKILAHLEDLKLSRELSRVRTDLPLEVDFGRRREPDWEGLKAFLERLEFGSLLHEFGLLESPLLAEEAPWPPPEGAFLGYRLSRPEPMWAELLALAASAQGRVYRAEDPHGALRGLFEVRGLLAKDLAVVALREGLDLPPTDDPMLLAYLLDPSNTTPEGVARRYGGEWTEDAAKRALLAERLHENLLGRLQGEERLLWLAEEVEKPLSRVLAHMEATGVKLDVAYLENLSLEVAAHMRRLEEEVFRLAGRSFRLNSRDQLERVLFDELGLPPIGKTEKTGKRSTSAAVLEALREVHPIVDKILQYREMAKLKGTYIDRLPALVHPKTGRLHTRFNQTATATGRLSSSDPNLQNIPVRTPLGQKIRRAFVAEEGWRLVALDYRQIELRVLAHLSGDENLIRVFQEGKDIHTQTASWMFGLSAEAIDPLMRRAAKTINFGVLYGMSAFRLSQELGIPYEEAQAFIQKYFQSYPKVKAWIEKTLREGRTRGYVETLFGRRRYVPDLNARVKGKREAAERMAFNMPVQGTAADLMKLAMVRLFPQLREVGARMLLQVHDELLLEAPKERAEEVAALAKEVMEGVWPLAVPLEVEVGIGEDWLAAKG

SEQ ID NO: 5749 - DNA, 2523 bp, synthetic construct
  misc_feature 1..2523: note = Variant of DNA polymerase I from Thermus sp. strain 2.9
  source 1..2523: mol_type = other DNA
atgcaccatcatcatcatcatggcggtagcggcgtgttaccggtgttcgagcctaaaggtcgcgtgcttctggttgatggccatcatctcgcgtatcgtaacttctttgccctgaaaggattaaccaccagcctgggcgagccggtacagggtgtctacggctttgcaaagtcgctcctgaaagctctgaaagaagacggtgatgtggtgattgttgtctttgatgcgaaagcgccaagttttcgccacgaagcgtacgaagcttacaaagccgggcgtgctccaacgccggaagactttcctcgccaattggcgcttatgaaggaattagtggatttgcttggcctcgaacgcttggaagttcccggtttcgaggcagacgacgtattagcgactctcgcaaagaaagccgaacgtgagggctatgaagtccagatcttgacagcagatcgcgatcttttccagcttttatctccgcgcatctcggtgttacacccggaagggcatcgtatcaccccggaatggctctgggagaaatatggtttgcgtcccgaacaatgggtggattttcgcgccttagcaggcgatccgagcgacaatattccgggagttaaaggtatcggcgagaagacggcgctcaagctccttaaagaatgggggtcgttggagaacttgcttaagaatttagatcaggtcaaaccagagtcagtgcgtgagaagattcttgctcacctcgaagacctcaaattaagccgcgaattgtcccgtgtacgcaccgatttgccgctcgaagttgatttcggtcgccgccgcgaacctgactgggagggtcttaaagcgtttttagagcgtcttgaatttggttcgctcttgcatgaattcggccttttagaaagcccgttactggccgaagaagcaccttggccaccgcccgagggcgcgtttttaggttaccgtttgagtcgcccggaaccgatgtgggccgaattactggctcttgcagcgtctgcccagggacgtgtgtatcgcgcggaagaccctcatggtgcgctccgcggcctcttcgaagtccgtaccctccttgccaaagacttagctgttgttgcattgcgcgaaggtcttgatttacctccgactgatgatccaatgcttcttgcgtacctcttggacccgtcaaacacgacgcccgaaggcgtagcccgtcgttacggcggcgagtggaccgaagatgcaggcaaacgcgcgttattggccgaacgtttgcacgaaaatttattaggacgtttgcaaggcgaggagcgtctcctgtggctttacgaagaagtggagaaaccattgagtcgcgtgctcgcgcatatggaagctaccggtgtcaaattagacgtggcgtatttggagaatctcctgcttgaagttgctgcccacatgcgccgcttggaggaagaagtattccgtttagcaggccgttcctttcgccttaactctcgcgatcagttagaacgtgtgttgttcgatgaacttggtctccctcctatcggcaagacagagaagaccggtaaacgtagcacttcagcggcggttttagaagctcttcgcgaagtccatcccattgtggacaagatcttgcagtaccgcgaaatggcgaaattgaaaggcacctatattgaccgtcttccggcattagtccacccgaaaacgggacgcctccatacccgcttcaaccaaacagccacggcgaccggtcgtttgtcctcctctgatccaaaccttcagaatattccagtacgtaccccattgggccagaagatccgccgtgcgtttgtagctgagccgggttggcgtttagtggccctcgattatcgtcaaattgaattacgtgtccttgcccatctttctggcgatgagaacctcatccgcgtgtttcaggaaggcaaagacattcacactcaaacggcaagctggatgtttggattatcagctgaagcgatcgatcctttgatgcgtcgtgcagcgaagaccatcaatttcggtgttctctacggtatgagtgcctttcgtttgtcgcaggaattaggcattcccctggaagaagctcaggctttcattcagaaatactttcaaggctatcccaaagttaaagcatggatcgagaagactctccgtgaaggccgcacacgtggttacgtagagaccttatttggacgtcgccgctatgttcccgatttaaactcgcgcgtgaaaggcaagcgtgaagccgccgaacgcatggcgttcaacatgcctgtacagggcacggcagctgacctcatgaaacttgcaatggtgcgcctttttccacaattgcgtgaagttggtgcccgcatgctgttgcaggtccacgatgaactcttgttagaagcgccaaaagagcgtgcggaagaggtggcagccctcgcgaaagaagttatggaaggcgtgtggcccttagcggtgcctcttgaagtcgaagttggtattggcgaggattggctggctgccaaagga

SEQ ID NO: 5750 - protein, 841 aa, synthetic construct
  REGION 1..841: note = Variant of DNA polymerase I from Thermus sp. strain 2.9
MHHHHHHGGSGVLPVFEPKGRVLLVDGHHLAYRNFFALKGLTTSLGEPVQGVYGFAKSLLKALKEDGDVVIVVFDAKAPSFRHEAYEAYKAGRAPTPEDFPRQLALMKELVDLLGLERLEVPGFEADDVLATLAKKAEREGYEVQILTADRDLFQLLSPRISVLHPEGHRITPEWLWEKYGLRPEQWVDFRALAGDPSDNIPGVKGIGEKTALKLLKEWGSLENLLKNLDQVKPESVREKILAHLEDLKLSRELSRVRTDLPLEVDFGRRREPDWEGLKAFLERLEFGSLLHEFGLLESPLLAEEAPWPPPEGAFLGYRLSRPEPMWAELLALAASAQGRVYRAEDPHGALRGLFEVRTLLAKDLAVVALREGLDLPPTDDPMLLAYLLDPSNTTPEGVARRYGGEWTEDAGKRALLAERLHENLLGRLQGEERLLWLYEEVEKPLSRVLAHMEATGVKLDVAYLENLLLEVAAHMRRLEEEVFRLAGRSFRLNSRDQLERVLFDELGLPPIGKTEKTGKRSTSAAVLEALREVHPIVDKILQYREMAKLKGTYIDRLPALVHPKTGRLHTRFNQTATATGRLSSSDPNLQNIPVRTPLGQKIRRAFVAEPGWRLVALDYRQIELRVLAHLSGDENLIRVFQEGKDIHTQTASWMFGLSAEAIDPLMRRAAKTINFGVLYGMSAFRLSQELGIPLEEAQAFIQKYFQGYPKVKAWIEKTLREGRTRGYVETLFGRRRYVPDLNSRVKGKREAAERMAFNMPVQGTAADLMKLAMVRLFPQLREVGARMLLQVHDELLLEAPKERAEEVAALAKEVMEGVWPLAVPLEVEVGIGEDWLAAKG

SEQ ID NO: 5751 - DNA, 2523 bp, synthetic construct
  misc_feature 1..2523: note = Variant of DNA polymerase I from Thermus sp. strain 2.9
  source 1..2523: mol_type = other DNA
atgcaccatcatcatcatcatggcggtagcggcgtgttaccggtgttcgagcctaaaggtcgcgtgcttctggttgatggccatcatctcgcgtatcgtaacttctttgccctgaaaggattaaccaccagcctgggcgagccggtacagggtgtctacggctttgcaaagtcgctcctgaaagctctgaaagaagacggtgatgtggtgattgttgtctttgatgcgaaagcgccaagttttcgccacgaagcgtacgaagcttacaaagccgggcgtgctccaacgccggaagactttcctcgccaattggcgcttatgaaggaattagtggatttgcttggcctcgaacgcttggaagttcccggtttcgaggcagacgacgtattagcgactctcgcaaagaaagccgaacgtgagggctatgaagtccagatcttgacagcagatcgcgatcttttccagcttttatctccgcgcatctcggtgttacacccggaagggcatcgtatcaccccggaatggctctgggagaaatatggtttgcgtcccgaacaatgggtggattttcgcgccttagcaggcgatccgagcgacaatattccgggagttaaaggtatcggcgagaagacggcgctcaagctccttaaagaatgggggtcgttggagaacttgcttaagaatttagatcaggtcaaaccagagtcagtgcgtgagaagattcttgctcacctcgaagacctcaaattaagccgcgaattgtcccgtgtacgcaccgatttgccgctcgaagttgatttcggtcgccgccgcgaacctgactgggagggtcttaaagcgtttttagagcgtcttgaatttggttcgctcttgcatgaattcggccttttagaaagcccgttactggccgaagaagcaccttggccaccgcccgagggcgcgtttttaggttaccgtttgagtcgcccggaaccgatgtgggccgaattactggctcttgcagcgtctgcccagggacgtgtgtatcgcgcggaagaccctcatggtgcgctccgcggcctcttcgaagtccgtggcctccttgccaaagacttagctgttgttgcattgcgcgaaggtcttgatttacctccgactgatgatccaatgcttcttgcgtacctcttggacccgtcaaacacgacgcccgaaggcgtagcccgtcgttacggcggcgagtggtgggaagatgcaggcaaacgcgcgttattggccgaacgtttgcacgaaaatttattaggacgtttgcaaggcgaggagcgtctcctgtggctttacgaagaagtggagaaaccattgagtcgcgtgctcgcgcatatggaagctaccggtgtcaaattagacgtggcgtatttggagaatctcagccttgaagttgctgcccacatgcgccgcttggaggaagaagtattccgtttagcaggccgttcctttcgccttaactctcgcgatcagttagaacgtgtgttgttcgatgaacttggtctccctcctatcggcaagacagagaagaccggtaaacgtagcacttcagcggcggttttagaagctcttcgcgaagtccatcccattgtggacaagatcttgcagtaccgcgaaatggcgaaattgaaaggcacctatattgaccgtcttccggcattagtccacccgaaaacgggacgcctccatacccgcttcaaccaaacagccacggcgaccggtcgtttgtcctcctctgatccaaaccttcagaatattccagtacgtaccccattgggccagaagatccgccgtgcgtttgtagctgagccgggttggcgtttagtggccctcgattatcgtcaaattgaattacgtgtccttgcccatctttctggcgatgagaacctcatccgcgtgtttcaggaaggcaaagacattcacactcaaacggcaagctggatgtttggattatcagctgaagcgatcgatcctttgatgcgtcgtgcagcgaagaccatcaatttcggtgttctctacggtatgagtgcctttcgtttgtcgcaggaattaggcattcccctggaagaagctcaggctttcattcagaaatactttcaaggctatcccaaagttaaagcatggatcgagaagactctccgtgaaggccgcacacgtggttacgtagagaccttatttggacgtcgccgctatgttcccgatttaaacgctcgcgtgaaaggcaagcgtgaagccgccgaacgcatggcgttcaacatgcctgtacagggcacggcagctgacctcatgaaacttgcaatggtgcgcctttttccacaattgcgtgaagttggtgcccgcatgctgttgcaggtccacgatgaactcttgttagaagcgccaaaagagcgtgcggaagaggtggcagccctcgcgaaagaagttatggaaggcgtgtggcccttagcggtgcctcttgaagtcgaagttggtattggcgaggattggctggctgccaaagga

SEQ ID NO: 5752 - protein, 841 aa, synthetic construct
  REGION 1..841: note = Variant of DNA polymerase I from Thermus sp. strain 2.9
MHHHHHHGGSGVLPVFEPKGRVLLVDGHHLAYRNFFALKGLTTSLGEPVQGVYGFAKSLLKALKEDGDVVIVVFDAKAPSFRHEAYEAYKAGRAPTPEDFPRQLALMKELVDLLGLERLEVPGFEADDVLATLAKKAEREGYEVQILTADRDLFQLLSPRISVLHPEGHRITPEWLWEKYGLRPEQWVDFRALAGDPSDNIPGVKGIGEKTALKLLKEWGSLENLLKNLDQVKPESVREKILAHLEDLKLSRELSRVRTDLPLEVDFGRRREPDWEGLKAFLERLEFGSLLHEFGLLESPLLAEEAPWPPPEGAFLGYRLSRPEPMWAELLALAASAQGRVYRAEDPHGALRGLFEVRGLLAKDLAVVALREGLDLPPTDDPMLLAYLLDPSNTTPEGVARRYGGEWWEDAGKRALLAERLHENLLGRLQGEERLLWLYEEVEKPLSRVLAHMEATGVKLDVAYLENLSLEVAAHMRRLEEEVFRLAGRSFRLNSRDQLERVLFDELGLPPIGKTEKTGKRSTSAAVLEALREVHPIVDKILQYREMAKLKGTYIDRLPALVHPKTGRLHTRFNQTATATGRLSSSDPNLQNIPVRTPLGQKIRRAFVAEPGWRLVALDYRQIELRVLAHLSGDENLIRVFQEGKDIHTQTASWMFGLSAEAIDPLMRRAAKTINFGVLYGMSAFRLSQELGIPLEEAQAFIQKYFQGYPKVKAWIEKTLREGRTRGYVETLFGRRRYVPDLNARVKGKREAAERMAFNMPVQGTAADLMKLAMVRLFPQLREVGARMLLQVHDELLLEAPKERAEEVAALAKEVMEGVWPLAVPLEVEVGIGEDWLAAKG

SEQ ID NO: 5753 - DNA, 2523 bp, synthetic construct
  misc_feature 1..2523: note = Variant of DNA polymerase I from Thermus sp. strain 2.9
  source 1..2523: mol_type = other DNA
atgcaccatcatcatcatcatggcggtagcggcgtgttaccggtgttcgagcctaaaggtcgcgtgcttctggttgatggccatcatctcgcgtatcgtaacttctttgccctgaaaggattaaccaccagcctgggcgagccggtacagggtgtctacggctttgcaaagtcgctcctgaaagctctgaaagaagacggtgatgtggtgattgttgtctttgatgcgaaagcgccaagttttcgccacgaagcgtacgaagcttacaaagccgggcgtgctccaacgccggaagactttcctcgccaattggcgcttatgaaggaattagtggatttgcttggcctcgaacgcttggaagttcccggtttcgaggcagacgacgtattagcgactctcgcaaagaaagccgaacgtgagggctatgaagtccagatcttgacagcagatcgcgatcttttccagcttttatctccgcgcatctcggtgttacacccggaagggcatcgtatcaccccggaatggctctgggagaaatatggtttgcgtcccgaacaatgggtggattttcgcgccttagcaggcgatccgagcgacaatattccgggagttaaaggtatcggcgagaagacggcgctcaagctccttaaagaatgggggtcgttggagaacttgcttaagaatttagatcaggtcaaaccagagtcagtgcgtgagaagattcttgctcacctcgaagacctcaaattaagccgcgaattgtcccgtgtacgcaccgatttgccgctcgaagttgatttcggtcgccgccgcgaacctgactgggagggtcttaaagcgtttttagagcgtcttgaatttggttcgctcttgcatgaattcggccttttagaaagcccgttactggccgaagaagcaccttggccaccgcccgagggcgcgtttttaggttaccgtttgagtcgcccggaaccgatgtgggccgaattactggctcttgcagcgtctgcccagggacgtgtgtatcgcgcggaagaccctcatggtgcgctccgcggcctcttcgaagtccgtaccctccttgccaaagacttagctgttgttgcattgcgcgaaggtcttgatttacctccgactgatgatccaatgcttcttgcgtacctcttggacccgtcaaacacgacgcccgaaggcgtagcccgtcgttacggcggcgagtggaccgaagatgcaggcaaacgcgcgttattggccgaacgtttgcacgaaaatttattaggacgtttgcaaggcgaggaacgtctcctctggctttacgaagaagtggagaaaccattgagtcgcgtgctcgcgcatatggaagctaccggtgtcaaattagacgtggcgtatttggagaatctcagccttgaagttgctgcccacatgcgccgcttggaggaagaagtattccgtttagcaggccgttcctttcgccttaactctcgcgatcagttagaacgtgtgttgttcgatgaacttggtctccctcctatcggcaagacagagaagaccggtaaacgtagcacttcagcggcggttttagaagctcttcgcgaagtccatcccattgtggacaagatcttgcagtaccgcgaaatggcgaaattgaaaggcacctatattgaccgtcttccggcattagtccacccgaaaacgggacgcctccatacccgcttcaaccaaacagccacggcgaccggtcgtttgtcctcctctgatccaaaccttcagaatattccagtacgtacctttttgggccagaagatccgccgtgcgtttgtagctgaggagggttggcgtttagtggccctcgattatcgtcaaattgaattacgtgtccttgcccatctttctggcgatgagaacctcatccgcgtgtttcaggaaggcaaagacattcacactcaaacggcaagctggatgtttggattatcagctgaagcgatcgatcctttgatgcgtcgtgcagcgaagaccatcaatttcggtgttctctacggtatgagtgcctttcgtttgtcgcaggaattaggcattccctatgaagaagctcaggcgttcattcagaaatactttcaaagctatcccaaagttaaagcatggatcgagaagactctccgtgaaggccgcacacgtggttacgtagagaccttatttggacgtcgccgctatgttcccgatttaaacgctcgcgtgaaaggcaagcgtgaagccgccgaacgcatggcgttcaacatgcctgtacagggcacggcagctgacctcatgaaacttgcaatggtgcgcctttttccacaattgcgtgaagttggtgcccgcatgctcttgcaggtccacgatgaactcttgttagaagcgccaaaagagcgtgcggaagaggtggcagccctcgcgaaagaagttatggaaggcgtgtggcccttagcggtgcctcttgaagtcgaagttggtattggcgaggattggctggctgccaaagga

SEQ ID NO: 5754 - protein, 841 aa, synthetic construct
  REGION 1..841: note = Variant of DNA polymerase I from Thermus sp. strain 2.9
MHHHHHHGGSGVLPVFEPKGRVLLVDGHHLAYRNFFALKGLTTSLGEPVQGVYGFAKSLLKALKEDGDVVIVVFDAKAPSFRHEAYEAYKAGRAPTPEDFPRQLALMKELVDLLGLERLEVPGFEADDVLATLAKKAEREGYEVQILTADRDLFQLLSPRISVLHPEGHRITPEWLWEKYGLRPEQWVDFRALAGDPSDNIPGVKGIGEKTALKLLKEWGSLENLLKNLDQVKPESVREKILAHLEDLKLSRELSRVRTDLPLEVDFGRRREPDWEGLKAFLERLEFGSLLHEFGLLESPLLAEEAPWPPPEGAFLGYRLSRPEPMWAELLALAASAQGRVYRAEDPHGALRGLFEVRTLLAKDLAVVALREGLDLPPTDDPMLLAYLLDPSNTTPEGVARRYGGEWTEDAGKRALLAERLHENLLGRLQGEERLLWLYEEVEKPLSRVLAHMEATGVKLDVAYLENLSLEVAAHMRRLEEEVFRLAGRSFRLNSRDQLERVLFDELGLPPIGKTEKTGKRSTSAAVLEALREVHPIVDKILQYREMAKLKGTYIDRLPALVHPKTGRLHTRFNQTATATGRLSSSDPNLQNIPVRTFLGQKIRRAFVAEEGWRLVALDYRQIELRVLAHLSGDENLIRVFQEGKDIHTQTASWMFGLSAEAIDPLMRRAAKTINFGVLYGMSAFRLSQELGIPYEEAQAFIQKYFQSYPKVKAWIEKTLREGRTRGYVETLFGRRRYVPDLNARVKGKREAAERMAFNMPVQGTAADLMKLAMVRLFPQLREVGARMLLQVHDELLLEAPKERAEEVAALAKEVMEGVWPLAVPLEVEVGIGEDWLAAKG

SEQ ID NO: 5755 - DNA, 2523 bp, synthetic construct
  misc_feature 1..2523: note = Variant of DNA polymerase I from Thermus sp. strain 2.9
  source 1..2523: mol_type = other DNA
atgcaccatcatcatcatcatggcggtagcggcgtgttaccggtgttcgagcctaaaggtcgcgtgcttctggttgatggccatcatctcgcgtatcgtaacttctttgccctgaaaggattaaccaccagcctgggcgagccggtacagggtgtctacggctttgcaaagtcgctcctgaaagctctgaaagaagacggtgatgtggtgattgttgtctttgatgcgaaagcgccaagttttcgccacgaagcgtacgaagcttacaaagccgggcgtgctccaacgccggaagactttcctcgccaattggcgcttatgaaggaattagtggatttgcttggcctcgaacgcttggaagttcccggtttcgaggcagacgacgtattagcgactctcgcaaagaaagccgaacgtgagggctatgaagtccagatcttgacagcagatcgcgatcttttccagcttttatctccgcgcatctcggtgttacacccggaagggcatcgtatcaccccggaatggctctgggagaaatatggtttgcgtcccgaacaatgggtggattttcgcgccttagcaggcgatccgagcgacaatattccgggagttaaaggtatcggcgagaagacggcgctcaagctccttaaagaatgggggtcgttggagaacttgcttaagaatttagatcaggtcaaaccagagtcagtgcgtgagaagattcttgctcacctcgaagacctcaaattaagccgcgaattgtcccgtgtacgcaccgatttgccgctcgaagttgatttcggtcgccgccgcgaacctgactgggagggtcttaaagcgtttttagagcgtcttgaatttggttcgctcttgcatgaattcggccttttagaaagcccgttactggccgaagaagcaccttggccaccgcccgagggcgcgtttttaggttaccgtttgagtcgcccggaaccgatgtgggccgaattactggctcttgcagcgtctgcccagggacgtgtgtatcgcgcggaagaccctcatggtgcgctccgcggcctcttcgaagtccgtggactccttgccaaagacttagctgttgttgcattgcgcgaaggtcttgatttacctccgactgatgatccaatgcttcttgcgtacctcttggacccgtcaaacacgacgcccgaaggcgtagcccgtcgttacggcggcgagtggaccgaagatgcagcgaaacgcgcgttattggccgaacgtttgcacgaaaatttattaggacgtttgcaaggcgaggaacgtctcctctggctttacgaagaagtggagaaaccattgagtcgcgtgctcgcgcatatggaagctaccggtgtcaaattagacgtggcgtatttggagaatctcagccttgaagttgctgcccacatgcgccgcttggaggaagaagtattccgtttagcaggccgttcctttcgccttaactctcgcgatcagttagaacgtgtgttgttcgatgaacttggtctccctcctatcggcaagacagagaagaccggtaaacgtagcacttcagcggcggttttagaagctcttcgcgaagtccatcccattgtggacaagatctctcagtaccgcgaaatggcgaaattgaaaggcacctatattgaccgtcttccggcattagtccacccgaaaacgggacgcctccatacccgcttcaaccaaacagccacggcgaccggtcgtttgtcctcctctgatccaaaccttcagaatattccagtacgtaccccattgggccagaagatccgccgtgcgtttgtagctgaggagggttggcgtttagtggccctcgattatcgtcaaattgaattacgtgtccttgcccatctttctggcgatgagaacctcatccgcgtgtttcaggaaggcaaagacattcacactcaaacggcaagctggatgtttggattatcagctgaagcgatcgatcctttgatgcgtcgtgcagcgaagaccatcaatttcggtgttctctacggtatgagtgcctttcgtttgtcgcaggaattaggcattccctatgaagaagctcaggcgttcattcagaaatactttcaaagctatcccaaagttaaagcatggatcgagaagactctccgtgaaggccgcacacgtggttacgtagagaccttatttggacgtcgccgctatgttcccgatttaaacgctcgcgtgaaaggcaagcgtgaagccgccgaacgcatggcgttcaacatgcctgtacagggcacggcagctgacctcatgaaacttgcaatggtgcgcctttttccacaattgcgtgaagttggtgcccgcatgctcttgcaggtccacgatgaactcttgttagaagcgccaaaagagcgtgcggaagaggtggcagccctcgcgaaagaagttatggaaggcgtgtggcccttagcggtgcctcttgaagtcgaagttggtattggcgaggattggctggctgccaaagga

SEQ ID NO: 5756 - protein, 841 aa, synthetic construct
  REGION 1..841: note = Variant of DNA polymerase I from Thermus sp. strain 2.9
MHHHHHHGGSGVLPVFEPKGRVLLVDGHHLAYRNFFALKGLTTSLGEPVQGVYGFAKSLLKALKEDGDVVIVVFDAKAPSFRHEAYEAYKAGRAPTPEDFPRQLALMKELVDLLGLERLEVPGFEADDVLATLAKKAEREGYEVQILTADRDLFQLLSPRISVLHPEGHRITPEWLWEKYGLRPEQWVDFRALAGDPSDNIPGVKGIGEKTALKLLKEWGSLENLLKNLDQVKPESVREKILAHLEDLKLSRELSRVRTDLPLEVDFGRRREPDWEGLKAFLERLEFGSLLHEFGLLESPLLAEEAPWPPPEGAFLGYRLSRPEPMWAELLALAASAQGRVYRAEDPHGALRGLFEVRGLLAKDLAVVALREGLDLPPTDDPMLLAYLLDPSNTTPEGVARRYGGEWTEDAAKRALLAERLHENLLGRLQGEERLLWLYEEVEKPLSRVLAHMEATGVKLDVAYLENLSLEVAAHMRRLEEEVFRLAGRSFRLNSRDQLERVLFDELGLPPIGKTEKTGKRSTSAAVLEALREVHPIVDKISQYREMAKLKGTYIDRLPALVHPKTGRLHTRFNQTATATGRLSSSDPNLQNIPVRTPLGQKIRRAFVAEEGWRLVALDYRQIELRVLAHLSGDENLIRVFQEGKDIHTQTASWMFGLSAEAIDPLMRRAAKTINFGVLYGMSAFRLSQELGIPYEEAQAFIQKYFQSYPKVKAWIEKTLREGRTRGYVETLFGRRRYVPDLNARVKGKREAAERMAFNMPVQGTAADLMKLAMVRLFPQLREVGARMLLQVHDELLLEAPKERAEEVAALAKEVMEGVWPLAVPLEVEVGIGEDWLAAKG

SEQ ID NO: 5757 - DNA, 2523 bp, synthetic construct
  misc_feature 1..2523: note = Variant of DNA polymerase I from Thermus sp. strain 2.9
  source 1..2523: mol_type = other DNA
atgcaccatcatcatcatcatggcggtagcggcgtgttaccggtgttcgagcctaaaggtcgcgtgcttctggttgatggccatcatctcgcgtatcgtaacttctttgccctgaaaggattaaccaccagcctgggcgagccggtacagggtgtctacggctttgcaaagtcgctcctgaaagctctgaaagaagacggtgatgtggtgattgttgtctttgatgcgaaagcgccaagttttcgccacgaagcgtacgaagcttacaaagccgggcgtgctccaacgccggaagactttcctcgccaattggcgcttatgaaggaattagtggatttgcttggcctcgaacgcttggaagttcccggtttcgaggcagacgacgtattagcgactctcgcaaagaaagccgaacgtgagggctatgaagtccagatcttgacagcagatcgcgatcttttccagcttttatctccgcgcatctcggtgttacacccggaagggcatcgtatcaccccggaatggctctgggagaaatatggtttgcgtcccgaacaatgggtggattttcgcgccttagcaggcgatccgagcgacaatattccgggagttaaaggtatcggcgagaagacggcgctcaagctccttaaagaatgggggtcgttggagaacttgcttaagaatttagatcaggtcaaaccagagtcagtgcgtgagaagattcttgctcacctcgaagacctcaaattaagccgcgaattgtcccgtgtacgcaccgatttgccgctcgaagttgatttcggtcgccgccgcgaacctgactgggagggtcttaaagcgtttttagagcgtcttgaatttggttcgctcttgcatgaattcggccttttagaaagcccgttactggccgaagaagcaccttggccaccgcccgagggcgcgtttttaggttaccgtttgagtcgcccggaaccgatgtgggccgaattactgctgcttgcagcgtctgcccagggacgtgtgtatcgcgcggaagaccctcatggtgcgctccgcggcctcttcgaagtccgtggactccttgccaaagacttagctgttgttgcattgcgcgaaggtcttgatttacctccgactgatgatccaatgcttcttgcgtacctcttggacccgtcaaacacgacgcccgaaggcgtagcccgtcgttacggcggcgagtggaccgaagatgcagcgaaacgcgcgttattggccgaacgtttgcacgaaaatttattaggacgtttgcaaggcgaggaacgtctcctctggctttacgaagaagtggagaaaccattgagtcgcgtgctcgcgcatatggaagctaccggtgtcaaattagacgtggcgtatttggagaatctcagccttgaagttgctgcccacatgcgccgcttggaggaagaagtattccgtttagcaggccgttcctttcgccttaactctcgcgatcagttagaacgtgtgttgttcgatgaacttggtctccctcctatcggcaagacagagaagaccggtaaacgtagcacttcagcggcggttttagaagctcttcgcgaagtccatcccattgtggacaagatcttgcagtaccgcgaaatggcgaaattgaaaggcacctatattgaccgtcttccggcattagtccacccgaaaacgggacgcctccatacccgcttcaaccaaacagccacggcgaccggtcgtttgtcctcctctgatccaaaccttcagaatattccagtacgtaccccattgggccagaagatccgccgtgcgtttgtagctgaggagggttggcgtttagtggccctcgattatcgtcaaattgaattacgtgtccttgcccatctttctggcgatgagaacctcatccgcgtgtttcaggaaggcaaagacattcacactcaaacggcaagctggatgtttggattatcagctgaagcgatcgatcctttgatgcgtcgtgcagcgaagaccatcaatttcggtgttctctacggtatgagtgcctttcgtttgtcgcaggaattaggcattccctatgaagaagctcaggcgttcattcagaaatactttcaaagctatcccaaagttaaagcatggatcgagaagactctccgtgaaggccgcacacgtggttacgtagagaccttatttggacgtcgccgctatgttcccgatttaaacgctcgcgtgaaaggcaagcgtgaagccgccgaacgcatggcgttcaacatgcctgtacagggcacggcagctgacctcatgaaacttgcaatggtgcgcctttttccacaattgcgtgaagttggtgcccgcatgctcttgcaggtccacgatgaactcttgttagaagcgccaaaagagcgtgcggaagaggtggcagccctcgcgaaagaagttatggaaggcgtgtggcccttagcggtgcctcttgaagtcgaagttggtattggcgaggattggctggctgccaaagga

SEQ ID NO: 5758 - protein, 841 aa, synthetic construct
  REGION 1..841: note = Variant of DNA polymerase I from Thermus sp. strain 2.9
MHHHHHHGGSGVLPVFEPKGRVLLVDGHHLAYRNFFALKGLTTSLGEPVQGVYGFAKSLLKALKEDGDVVIVVFDAKAPSFRHEAYEAYKAGRAPTPEDFPRQLALMKELVDLLGLERLEVPGFEADDVLATLAKKAEREGYEVQILTADRDLFQLLSPRISVLHPEGHRITPEWLWEKYGLRPEQWVDFRALAGDPSDNIPGVKGIGEKTALKLLKEWGSLENLLKNLDQVKPESVREKILAHLEDLKLSRELSRVRTDLPLEVDFGRRREPDWEGLKAFLERLEFGSLLHEFGLLESPLLAEEAPWPPPEGAFLGYRLSRPEPMWAELLLLAASAQGRVYRAEDPHGALRGLFEVRGLLAKDLAVVALREGLDLPPTDDPMLLAYLLDPSNTTPEGVARRYGGEWTEDAAKRALLAERLHENLLGRLQGEERLLWLYEEVEKPLSRVLAHMEATGVKLDVAYLENLSLEVAAHMRRLEEEVFRLAGRSFRLNSRDQLERVLFDELGLPPIGKTEKTGKRSTSAAVLEALREVHPIVDKILQYREMAKLKGTYIDRLPALVHPKTGRLHTRFNQTATATGRLSSSDPNLQNIPVRTPLGQKIRRAFVAEEGWRLVALDYRQIELRVLAHLSGDENLIRVFQEGKDIHTQTASWMFGLSAEAIDPLMRRAAKTINFGVLYGMSAFRLSQELGIPYEEAQAFIQKYFQSYPKVKAWIEKTLREGRTRGYVETLFGRRRYVPDLNARVKGKREAAERMAFNMPVQGTAADLMKLAMVRLFPQLREVGARMLLQVHDELLLEAPKERAEEVAALAKEVMEGVWPLAVPLEVEVGIGEDWLAAKG

SEQ ID NO: 5759 - DNA, 2523 bp, synthetic construct
  misc_feature 1..2523: note = Variant of DNA polymerase I from Thermus sp. strain 2.9
  source 1..2523: mol_type = other DNA
atgcaccatcatcatcatcatggcggtagcggcgtgttaccggtgttcgagcctaaaggtcgcgtgcttctggttgatggccatcatctcgcgtatcgtaacttctttgccctgaaaggattaaccaccagcctgggcgagccggtacagggtgtctacggctttgcaaagtcgctcctgaaagctctgaaagaagacggtgatgtggtgattgttgtctttgatgcgaaagcgccaagttttcgccacgaagcgtacgaagcttacaaagccgggcgtgctccaacgccggaagactttcctcgccaattggcgcttatgaaggaattagtggatttgcttggcctcgaacgcttggaagttcccggtttcgaggcagacgacgtattagcgactctcgcaaagaaagccgaacgtgagggctatgaagtccagatcttgacagcagatcgcgatcttttccagcttttatctccgcgcatctcggtgttacacccggaagggcatcgtatcaccccggaatggctctgggagaaatatggtttgcgtcccgaacaatgggtggattttcgcgccttagcaggcgatccgagcgacaatattccgggagttaaaggtatcggcgagaagacggcgctcaagctccttaaagaatgggggtcgttggagaacttgcttaagaatttagatcaggtcaaaccagagtcagtgcgtgagaagattcttgctcacctcgaagacctcaaattaagccgcgaattgtcccgtgtacgcaccgatttgccgctcgaagttgatttcggtcgccgccgcgaacctgactgggagggtcttaaagcgtttttagagcgtcttgaatttggttcgctcttgcatgaattcggccttttagaaagcccgttactggccgaagaatcgccttggccaccgcccgagggcgcgtttttaggttaccgtttgagtcgcccggaaccgatgtgggccgaattactggctcttgcagcgtctgcccagggacgtgtgtatcgcgcggaagaccctcatggtgcgctccgcggcctcttcgaagtccgtggactccttgccaaagacttagctgttgttgcattgcgcgaaggtcttgatttacctccgactgatgatccaatgcttcttgcgtacctcttggacccgtcaaacacgacgcccgaaggcgtagcccgtcgttacggcggcgagtggaccgaagatgcagcgaaacgcgcgttattggccgaacgtttgcacgaaaatttattaggacgtttgcaaggcgaggaacgtctcctctggctttacgaagaagtggagaaaccattgagtcgcgtgctcgcgcatatggaagctaccggtgtcaaattagacgtggcgtatttggagaatctcagccttgaagttgctgcccacatgcgccgcttggaggaagaagtattccgtttagcaggccgttcctttcgccttaactctcgcgatcagttagaacgtgtgttgttcgatgaacttggtctccctcctatcggcaagacagagaagaccggtaaacgtagcacttcagcggcggttttagaagctcttcgcgaagtccatcccattgtggacaagatcttgcagtaccgcgaaatggcgaaattgaaaggcacctatattgaccgtcttccggcattagtccacccgaaaacgggacgcctccatacccgcttcaaccaaacagccacggcgaccggtcgtttgtcctcctctgatccaaaccttcagaatattccagtacgtaccccattgggccagaagatccgccgtgcgtttgtagctgaggagggttggcgtttagtggccctcgattatcgtcaaattgaattacgtgtccttgcccatctttctggcgatgagaacctcatccgcgtgtttcaggaaggcaaagacattcacactcaaacggcaagctggatgtttggattatcagctgaagcgatcgatcctttgatgcgtcgtgcagcgaagaccatcaatttcggtgttctctacggtatgagtgcctttcgtttgtcgcaggaattaggcattccctatgaagaagctcaggcgttcattcagaaatactttcaaagctatcccaaagttaaagcatggatcgagaagactctccgtgaaggccgcacacgtggttacgtagagaccttatttggacgtcgccgctatgttcccgatttaaacgctcgcgtgaaaggcaagcgtgaagccgccgaacgcatggcgttcaacatgcctgtacagggcacggcagctgacctcatgaaacttgcaatggtgcgcctttttccacaattgcgtgaagttggtgcccgcatgctcttgcaggtccacgatgaactcttgttagaagcgccaaaagagcgtgcggaagaggtggcagccctcgcgaaagaagttatggaaggcgtgtggcccttagcggtgcctcttgaagtcgaagttggtattggcgaggattggctggctgccaaagga

SEQ ID NO: 5760 - protein, 841 aa, synthetic construct
  REGION 1..841: note = Variant of DNA polymerase I from Thermus sp. strain 2.9
MHHHHHHGGSGVLPVFEPKGRVLLVDGHHLAYRNFFALKGLTTSLGEPVQGVYGFAKSLLKALKEDGDVVIVVFDAKAPSFRHEAYEAYKAGRAPTPEDFPRQLALMKELVDLLGLERLEVPGFEADDVLATLAKKAEREGYEVQILTADRDLFQLLSPRISVLHPEGHRITPEWLWEKYGLRPEQWVDFRALAGDPSDNIPGVKGIGEKTALKLLKEWGSLENLLKNLDQVKPESVREKILAHLEDLKLSRELSRVRTDLPLEVDFGRRREPDWEGLKAFLERLEFGSLLHEFGLLESPLLAEESPWPPPEGAFLGYRLSRPEPMWAELLALAASAQGRVYRAEDPHGALRGLFEVRGLLAKDLAVVALREGLDLPPTDDPMLLAYLLDPSNTTPEGVARRYGGEWTEDAAKRALLAERLHENLLGRLQGEERLLWLYEEVEKPLSRVLAHMEATGVKLDVAYLENLSLEVAAHMRRLEEEVFRLAGRSFRLNSRDQLERVLFDELGLPPIGKTEKTGKRSTSAAVLEALREVHPIVDKILQYREMAKLKGTYIDRLPALVHPKTGRLHTRFNQTATATGRLSSSDPNLQNIPVRTPLGQKIRRAFVAEEGWRLVALDYRQIELRVLAHLSGDENLIRVFQEGKDIHTQTASWMFGLSAEAIDPLMRRAAKTINFGVLYGMSAFRLSQELGIPYEEAQAFIQKYFQSYPKVKAWIEKTLREGRTRGYVETLFGRRRYVPDLNARVKGKREAAERMAFNMPVQGTAADLMKLAMVRLFPQLREVGARMLLQVHDELLLEAPKERAEEVAALAKEVMEGVWPLAVPLEVEVGIGEDWLAAKG

SEQ ID NO: 5761 - DNA, 2523 bp, synthetic construct
  misc_feature 1..2523: note = Variant of DNA polymerase I from Thermus sp. strain 2.9
  source 1..2523: mol_type = other DNA
atgcaccatcatcatcatcatggcggtagcggcgtgttaccggtgttcgagcctaaaggtcgcgtgcttctggttgatggccatcatctcgcgtatcgtaacttctttgccctgaaaggattaaccaccagcctgggcgagccggtacagggtgtctacggctttgcaaagtcgctcctgaaagctctgaaagaagacggtgatgtggtgattgttgtctttgatgcgaaagcgccaagttttcgccacgaagcgtacgaagcttacaaagccgggcgtgctccaacgccggaagactttcctcgccaattggcgcttatgaaggaattagtggatttgcttggcctcgaacgcttggaagttcccggtttcgaggcagacgacgtattagcgactctcgcaaagaaagccgaacgtgagggctatgaagtccagatcttgacagcagatcgcgatcttttccagcttttatctccgcgcatctcggtgttacacccggaagggcatcgtatcaccccggaatggctctgggagaaatatggtttgcgtcccgaacaatgggtggattttcgcgccttagcaggcgatccgagcgacaatattccgggagttaaaggtatcggcgagaagacggcgctcaagctccttaaagaatgggggtcgttggagaacttgcttaagaatttagatcaggtcaaaccagagtcagtgcgtgagaagattcttgctcacctcgaagacctcaaattaagccgcgaattgtcccgtgtacgcaccgatttgccgctcgaagttgatttcggtcgccgccgcgaacctgactgggagggtcttaaagcgtttttagagcgtcttgaatttggttcgctcttgcatgaattcggccttttagaaagcccgttactggccgaagaagcaccttggccaccgcccgagggcgcgtttttaggttaccgtttgagtcgcccggaaccgatgtgggccgaattactggctcttgcagcgtctgcccagggacgtgtgtatcgcgcggaagaccctcatggtgcgctccgcggcctcttcgaagtccgtggactccttgccaaagacttagctgttgttgcattgcgcgaaggtcttgatttacctccgactgatgatccaatgcttcttgcgtacctcttggacccgtcaaacacgacgcccgaaggcgtagcccgtcgttacggcggcgagtggaccgaagatgcagcgaaacgcgcgttattggccgaacgtttgcacgaaaatttattaggacgtttgcaaggcgaggaacgtctcctctggctttacgaagaagtggagaaaccattgagtcgcgtgctcgcgcatatggaagctaccggtgtcaaattagacgtggcgtatttggagaatctcagccttgaagttgctgcccacatgcgccgcttggaggaagaaactttccgtttagcaggccgttcctttcgccttaactctcgcgatcagttagaacgtgtgttgttcgatgaacttggtctccctcctatcggcaagacagagaagaccggtaaacgtagcacttcagcggcggttttagaagctcttcgcgaagtccatcccattgtggacaagatcttgcagtaccgcgaaatggcgaaattgaaaggcacctatattgaccgtcttccggcattagtccacccgaaaacgggacgcctccatacccgcttcaaccaaacagccacggcgaccggtcgtttgtcctcctctgatccaaaccttcagaatattccagtacgtaccccattgggccagaagatccgccgtgcgtttgtagctgaggagggttggcgtttagtggccctcgattatcgtcaaattgaattacgtgtccttgcccatctttctggcgatgagaacctcatccgcgtgtttcaggaaggcaaagacattcacactcaaacggcaagctggatgtttggattatcagctgaagcgatcgatcctttgatgcgtcgtgcagcgaagaccatcaatttcggtgttctctacggtatgagtgcctttcgtttgtcgcaggaattaggcattccctatgaagaagctcaggcgttcattcagaaatactttcaaagctatcccaaagttaaagcatggatcgagaagactctccgtgaaggccgcacacgtggttacgtagagaccttatttggacgtcgccgctatgttcccgatttaaacgctcgcgtgaaaggcaagcgtgaagccgccgaacgcatggcgttcaacatgcctgtacagggcacggcagctgacctcatgaaacttgcaatggtgcgcctttttccacaattgcgtgaagttggtgcccgcatgctcttgcaggtccacgatgaactcttgttagaagcgccaaaagagcgtgcggaagaggtggcagccctcgcgaaagaagttatggaaggcgtgtggcccttagcggtgcctcttgaagtcgaagttggtattggcgaggattggctggctgccaaagga

SEQ ID NO: 5762 - protein, 841 aa, synthetic construct
  REGION 1..841: note = Variant of DNA polymerase I from Thermus sp. strain 2.9
MHHHHHHGGSGVLPVFEPKGRVLLVDGHHLAYRNFFALKGLTTSLGEPVQGVYGFAKSLLKALKEDGDVVIVVFDAKAPSFRHEAYEAYKAGRAPTPEDFPRQLALMKELVDLLGLERLEVPGFEADDVLATLAKKAEREGYEVQILTADRDLFQLLSPRISVLHPEGHRITPEWLWEKYGLRPEQWVDFRALAGDPSDNIPGVKGIGEKTALKLLKEWGSLENLLKNLDQVKPESVREKILAHLEDLKLSRELSRVRTDLPLEVDFGRRREPDWEGLKAFLERLEFGSLLHEFGLLESPLLAEEAPWPPPEGAFLGYRLSRPEPMWAELLALAASAQGRVYRAEDPHGALRGLFEVRGLLAKDLAVVALREGLDLPPTDDPMLLAYLLDPSNTTPEGVARRYGGEWTEDAAKRALLAERLHENLLGRLQGEERLLWLYEEVEKPLSRVLAHMEATGVKLDVAYLENLSLEVAAHMRRLEEETFRLAGRSFRLNSRDQLERVLFDELGLPPIGKTEKTGKRSTSAAVLEALREVHPIVDKILQYREMAKLKGTYIDRLPALVHPKTGRLHTRFNQTATATGRLSSSDPNLQNIPVRTPLGQKIRRAFVAEEGWRLVALDYRQIELRVLAHLSGDENLIRVFQEGKDIHTQTASWMFGLSAEAIDPLMRRAAKTINFGVLYGMSAFRLSQELGIPYEEAQAFIQKYFQSYPKVKAWIEKTLREGRTRGYVETLFGRRRYVPDLNARVKGKREAAERMAFNMPVQGTAADLMKLAMVRLFPQLREVGARMLLQVHDELLLEAPKERAEEVAALAKEVMEGVWPLAVPLEVEVGIGEDWLAAKG

SEQ ID NO: 5763 - DNA, 2523 bp, synthetic construct
  misc_feature 1..2523: note = Variant of DNA polymerase I from Thermus sp. strain 2.9
  source 1..2523: mol_type = other DNA
atgcaccatcatcatcatcatggcggtagcggcgtgttaccggtgttcgagcctaaaggtcgcgtgcttctggttgatggccatcatctcgcgtatcgtaacttctttgccctgaaaggattaaccaccagcctgggcgagccggtacagggtgtctacggctttgcaaagtcgctcctgaaagctctgaaagaagacggtgatgtggtgattgttgtctttgatgcgaaagcgccaagttttcgccacgaagcgtacgaagcttacaaagccgggcgtgctccaacgccggaagactttcctcgccaattggcgcttatgaaggaattagtggatttgcttggcctcgaacgcttggaagttcccggtttcgaggcagacgacgtattagcgactctcgcaaagaaagccgaacgtgagggctatgaagtccagatcttgacagcagatcgcgatcttttccagcttttatctccgcgcatctcggtgttacacccggaagggcatcgtatcaccccggaatggctctgggagaaatatggtttgcgtcccgaacaatgggtggattttcgcgccttagcaggcgatccgagcgacaatattccgggagttaaaggtatcggcgagaagacggcgctcaagctccttaaagaatgggggtcgttggagaacttgcttaagaatttagatcaggtcaaaccagagtcagtgcgtgagaagattcttgctcacctcgaagacctcaaattaagccgcgaattgtcccgtgtacgcaccgatttgccgctcgaagttgatttcggccgccgccgcgaacctgactgggagggtcttaaagcgtttttagagcgtcttgaatttggttcgctcttgcatgaattcggccttttagaaagcccgttactggccgaagaagcaccttggccaccgcccgagggcgcgtttttaggttaccgtttgagtcgcccggaaccgatgtgggccgaattactggctcttgcagcgtctgcccagggacgtgtgtatcgcgcggaagaccctcatggtgcgctccgcggcctcttcgaagtccgtggactccttgccaaagacttagctgttgttgcattgcgcgaaggtcttgatttacctccgactgatgatccaatgcttcttgcgtacctcttggacccgtcaaacacgacgcccgaaggcgtagcccgtcgttacggcggcgagtggaccgaagatgcagcgaaacgcgcgttattggccgaacgtttgcacgcaaatttattaggacgtttgcaaggcgaggaacgtctcctctggctttacgaagaagtggagaaaccattgagtcgcgtgctcgcgcatatggaagctaccggtgtcaaattagacgtggcgtatttggagaatctcagccttgaagttgctgcccacatgcgccgcttggaggaagaagtattccgtttagcaggccgttcctttcgccttaactctcgcgatcagttagaacgtgtgttgttcgatgaacttggtctccctcctatcggcaagacagagaagaccggtaaacgtagcacttcagcggcggttttagaagctcttcgcgaagtccatcccattgtggacaagatcttgcagtaccgcgaaatggcgaaattgaaaggcacctatattgaccgtcttccggcattagtccacccgaaaacgggacgcctccatacccgcttcaaccaaacagccacggcgaccggtcgtttgtcctcctctgatccaaaccttcagaatattccagtacgtaccccattgggccagaagatccgccgtgcgtttgtagctgaggagggttggcgtttagtggccctcgattatcgtcaaattgaattacgtgtccttgcccatctttctggcgatgagaacctcatccgcgtgtttcaggaaggcaaagacattcacactcaaacggcaagctggatgtttggattatcagctgaagcgatcgatcctttgatgcgtcgtgcagcgaagaccatcaatttcggtgttctctacggtatgagtgcctttcgtttgtcgcaggaattaggcattccctatgaagaagctcaggcgttcattcagaaatactttcaaagctatcccaaagttaaagcatggatcgagaagactctcgaggaaggccgcacacgtggttacgtagagaccttatttggacgtcgccgctatgttcccgatttaaacgctcgcgtgaaaggcaagcgtgaagccgccgaacgcatggcgttcaacatgcctgtacagggcacggcagctgacctcatgaaacttgcaatggtgcgcctttttccacaattgcgtgaagttggtgcccgcatgctcttgcaggtccacgatgaactcttgttagaagcgccaaaagagcgtgcggaagaggtggcagccctcgcgaaagaagttatggaaggcgtgtggcccttagcggtgcctcttgaagtcgaagttggtattggcgaggattggctggctgccaaagga

SEQ ID NO: 5764 - protein, 841 aa, synthetic construct
  REGION 1..841: note = Variant of DNA polymerase I from Thermus sp. strain 2.9
MHHHHHHGGSGVLPVFEPKGRVLLVDGHHLAYRNFFALKGLTTSLGEPVQGVYGFAKSLLKALKEDGDVVIVVFDAKAPSFRHEAYEAYKAGRAPTPEDFPRQLALMKELVDLLGLERLEVPGFEADDVLATLAKKAEREGYEVQILTADRDLFQLLSPRISVLHPEGHRITPEWLWEKYGLRPEQWVDFRALAGDPSDNIPGVKGIGEKTALKLLKEWGSLENLLKNLDQVKPESVREKILAHLEDLKLSRELSRVRTDLPLEVDFGRRREPDWEGLKAFLERLEFGSLLHEFGLLESPLLAEEAPWPPPEGAFLGYRLSRPEPMWAELLALAASAQGRVYRAEDPHGALRGLFEVRGLLAKDLAVVALREGLDLPPTDDPMLLAYLLDPSNTTPEGVARRYGGEWTEDAAKRALLAERLHANLLGRLQGEERLLWLYEEVEKPLSRVLAHMEATGVKLDVAYLENLSLEVAAHMRRLEEEVFRLAGRSFRLNSRDQLERVLFDELGLPPIGKTEKTGKRSTSAAVLEALREVHPIVDKILQYREMAKLKGTYIDRLPALVHPKTGRLHTRFNQTATATGRLSSSDPNLQNIPVRTPLGQKIRRAFVAEEGWRLVALDYRQIELRVLAHLSGDENLIRVFQEGKDIHTQTASWMFGLSAEAIDPLMRRAAKTINFGVLYGMSAFRLSQELGIPYEEAQAFIQKYFQSYPKVKAWIEKTLEEGRTRGYVETLFGRRRYVPDLNARVKGKREAAERMAFNMPVQGTAADLMKLAMVRLFPQLREVGARMLLQVHDELLLEAPKERAEEVAALAKEVMEGVWPLAVPLEVEVGIGEDWLAAKG

SEQ ID NO: 5765 - DNA, 2523 bp, synthetic construct
  misc_feature 1..2523: note = Variant of DNA polymerase I from Thermus sp. strain 2.9
  source 1..2523: mol_type = other DNA
atgcaccatcatcatcatcatggcggtagcggcgtgttaccggtgttcgagcctaaaggtcgcgtgcttctggttgatggccatcatctcgcgtatcgtaacttctttgccctgaaaggattaaccaccagcctgggcgagccggtacagggtgtctacggctttgcaaagtcgctcctgaaagctctgaaagaagacggtgatgtggtgattgttgtctttgatgcgaaagcgccaagttttcgccacgaagcgtacgaagcttacaaagccgggcgtgctccaacgccggaagactttcctcgccaattggcgcttatgaaggaattagtggatttgcttggcctcgaacgcttggaagttcccggtttcgaggcagacgacgtattagcgactctcgcaaagaaagccgaacgtgagggctatgaagtccagatcttgacagcagatcgcgatcttttccagcttttatctccgcgcatctcggtgttacacccggaagggcatcgtatcaccccggaatggctctgggagaaatatggtttgcgtcccgaacaatgggtggattttcgcgccttagcaggcgatccgagcgacaatattccgggagttaaaggtatcggcgagaagacggcgctcaagctccttaaagaatgggggtcgttggagaacttgcttaagaatttagatcaggtcaaaccagagtcagtgcgtgagaagattcttgctcacctcgaagacctcaaattaagccgcgaattgtcccgtgtacgcaccgatttgccgctcgaagttgatttcggtcgccgccgcgaacctgactgggagggtcttaaagcgtttttagagcgtcttgaatttggttcgctcttgcatgaattcggccttttagaaagcccgttactggccgaagaagcaccttggccaccgcccgagggcgcgtttttaggttaccgtttgagtcgcccggaaccgatgtgggccgaattactggctcttgcagcgtctgcccagggacgtgtgtatcgcgcggaagaccctcatggtgcgctccgcggcctcttcgaagtccgtaccctccttgccaaagacttagctgttgttgcattgcgcgaaggtcttgatttacctccgactgatgatccaatgcttcttgcgtacctcttggacccgtcaaacacgacgcccgaaggcgtagcccgtcgttacggcggcgagtggtgggaagatgcaggcaaacgcgcgttattggccgaacgtttgcacgaaaatttattaggacgtttgcaaggcgaggaacgtctcctctggctttacgaagaagtggagaaaccattgagtcgcgtgctcgcgcatatggaagctaccggtgtcaaattagacgtggcgtatttggagaatctcagccttgaagttgctgcccacatgcgccgcttggaggaagaagtattccgtttagcaggccgttcctttcgccttaactctcgcgatcagttagaacgtgtgttgttcgatgaacttggtctccctcctatcggcaagacagagaagaccggtaaacgtagcacttcagcggcggttttagaagctcttcgcgaagtccatcccattgtggacaagatcttgcagtaccgcgaaatggcgaaattgaaaggcacctatattgaccgtcttccggcattagtccacccgaaaacgggacgcctccatacccgcttcaaccaaacagccacggcgaccggtcgtttgtcctcctctgatccaaaccttcagaatattccagtacgtaccccattgggccagaagatccgccgtgcgtttgtagctgaggagggttggcgtttagtggccctcgattatcgtcaaattgaattacgtgtccttgcccatctttctggcgatgagaacctcatccgcgtgtttcaggaaggcaaagacattcacactcaaacggcaagctggatgtttggattatcagctgaagcgatcgatcctttgatgcgtcgtgcagcgaagaccatcaatttcggtgttctctacggtatgagtgcctttcgtttgtcgcaggaattaggcattccctatgaagaagctcaggcgttcattcagaaatactttcaaagctatcccaaagttaaagcatggatcgagaagactctccgtgaaggccgcacacgtggttacgtagagaccttatttggacgtcgccgctatgttcccgatttaaactcgcgcgtgaaaggcaagcgtgaagccgccgaacgcatggcgttcaacatgcctgtacagggcacggcagctgacctcatgaaacttgcaatggtgcgcctttttccacaattgcgtgaagttggtgcccgcatgctgttgcaggtccacgatgaactcttgttagaagcgccaaaagagcgtgcggaagaggtggcagccctcgcgaaagaagttatggaaggcgtgtggcccttagcggtgcctcttgaagtcgaagttggtattggcgaggattggctggctgccaaagga

SEQ ID NO: 5766 - protein, 841 aa, synthetic construct
  REGION 1..841: note = Variant of DNA polymerase I from Thermus sp. strain 2.9
MHHHHHHGGSGVLPVFEPKGRVLLVDGHHLAYRNFFALKGLTTSLGEPVQGVYGFAKSLLKALKEDGDVVIVVFDAKAPSFRHEAYEAYKAGRAPTPEDFPRQLALMKELVDLLGLERLEVPGFEADDVLATLAKKAEREGYEVQILTADRDLFQLLSPRISVLHPEGHRITPEWLWEKYGLRPEQWVDFRALAGDPSDNIPGVKGIGEKTALKLLKEWGSLENLLKNLDQVKPESVREKILAHLEDLKLSRELSRVRTDLPLEVDFGRRREPDWEGLKAFLERLEFGSLLHEFGLLESPLLAEEAPWPPPEGAFLGYRLSRPEPMWAELLALAASAQGRVYRAEDPHGALRGLFEVRTLLAKDLAVVALREGLDLPPTDDPMLLAYLLDPSNTTPEGVARRYGGEWWEDAGKRALLAERLHENLLGRLQGEERLLWLYEEVEKPLSRVLAHMEATGVKLDVAYLENLSLEVAAHMRRLEEEVFRLAGRSFRLNSRDQLERVLFDELGLPPIGKTEKTGKRSTSAAVLEALREVHPIVDKILQYREMAKLKGTYIDRLPALVHPKTGRLHTRFNQTATATGRLSSSDPNLQNIPVRTPLGQKIRRAFVAEEGWRLVALDYRQIELRVLAHLSGDENLIRVFQEGKDIHTQTASWMFGLSAEAIDPLMRRAAKTINFGVLYGMSAFRLSQELGIPYEEAQAFIQKYFQSYPKVKAWIEKTLREGRTRGYVETLFGRRRYVPDLNSRVKGKREAAERMAFNMPVQGTAADLMKLAMVRLFPQLREVGARMLLQVHDELLLEAPKERAEEVAALAKEVMEGVWPLAVPLEVEVGIGEDWLAAKG

SEQ ID NO: 5767 - DNA, 2523 bp, synthetic construct
  misc_feature 1..2523: note = Variant of DNA polymerase I from Thermus sp. strain 2.9
  source 1..2523: mol_type = other DNA
atgcaccatcatcatcatcatggcggtagcggcgtgttaccggtgttcgagcctaaaggtcgcgtgcttctggttgatggccatcatctcgcgtatcgtaacttctttgccctgaaaggattaaccaccagcctgggcgagccggtacagggtgtctacggctttgcaaagtcgctcctgaaagctctgaaagaagacggtgatgtggtgattgttgtctttgatgcgaaagcgccaagttttcgccacgaagcgtacgaagcttacaaagccgggcgtgctccaacgccggaagactttcctcgccaattggcgcttatgaaggaattagtggatttgcttggcctcgaacgcttggaagttcccggtttcgaggcagacgacgtattagcgactctcgcaaagaaagccgaacgtgagggctatgaagtccagatcttgacagcagatcgcgatcttttccagcttttatctccgcgcatctcggtgttacacccggaagggcatcgtatcaccccggaatggctctgggagaaatatggtttgcgtcccgaacaatgggtggattttcgcgccttagcaggcgatccgagcgacaatattccgggagttaaaggtatcggcgagaagacggcgctcaagctccttaaagaatgggggtcgttggagaacttgcttaagaatttagatcaggtcaaaccagagtcagtgcgtgagaagattcttgctcacctcgaagacctcaaattaagccgcgaattgtcccgtgtacgcaccgatttgccgctcgaagttgatttcggtcgccgccgcgaacctgactgggagggtcttaaagcgtttttagagcgtcttgaatttggttcgctcttgcatgaattcggccttttagaaagcccgttactggccgaagaagcaccttggccaccgcccgagggcgcgtttttaggttaccgtttgagtcgcccggaaccgatgtgggccgaattactggctcttgcagcgtctgcccagggacgtgtgtatcgcgcggaagaccctcatggtgcgctccgcggcctcttcgaagtccgtaccctccttgccaaagacttagctgttgttgcattgcgcgaaggtcttgatttacctccgactgatgatccaatgcttcttgcgtacctcttggacccgtcaaacacgacgcccgaaggcgtagcccgtcgttacggcggcgagtggtgggaagatgcagccaaacgcgcgttattggccgaacgtttgcacgaaaatttattaggacgtttgcaaggcgaggcgcgtctcctgtggctttacgaagaagtggagaaaccattgagtcgcgtgctcgcgcatatggaagctaccggtgtcaaattagacgtggcgtatttggagaatctcagccttgaagttgctgcccacatgcgccgcttggaggaagaagtattccgtttagcaggccgttcctttcgccttaactctcgcgatcagttagaacgtgtgttgttcgatgaacttggtctccctcctatcggcaagacagagaagaccggtaaacgtagcacttcagcggcggttttagaagctcttcgcgaagtccatcccattgtggacaagatcttgcagtaccgcgaaatggcgaaattgaaaggcacctatattgaccgtcttccggcattagtccacccgaaaacgggacgcctccatacccgcttcaaccaaacagccacggcgaccggtcgtttgtcctcctctgatccaaaccttcagaatattccagtacgtaccccattgggccagaagatccgccgtgcgtttgtagctgaggagggttgggcgttagtggccctcgattatcgtcaaattgaattacgtgtccttgcccatctttctggcgatgagaacctcatccgcgtgtttcaggaaggcaaagacattcacactcaaacggcaagctggatgtttggattatcagctgaagcgatcgatcctttgatgcgtcgtgcagcgaagaccatcaatttcggtgttctctacggtatgagtgcctttcgtttgtcgcaggaattaggcattccctatgaagaagctcaggcgttcattcagaaatactttcaaggctatcccaaagttaaagcatggatcgagaagactctccgtgaaggccgcacacgtggttacgtagagaccttatttggacgtcgccgctatgttcccgatttaaacgctcgcgtgaaaggcaagcgtgaagccgccgaacgcatggcgttcaacatgcctgtacagggcacggcagctgacctcatgaaacttgcaatggtgcgcctttttccacaattgcgtgaagttggtgcccgcatgctgttgcaggtccacgatgaactcttgttagaagcgccaaaagagcgtgcggaagaggtggcagccctcgcgaaagaagttatggaaggcgtgtggcccttagcggtgcctcttgaagtcgaagttggtattggcgaggattggctggctgccaaagga

SEQ ID NO: 5768 - protein, 841 aa, synthetic construct
  REGION 1..841: note = Variant of DNA polymerase I from Thermus sp. strain 2.9
MHHHHHHGGSGVLPVFEPKGRVLLVDGHHLAYRNFFALKGLTTSLGEPVQGVYGFAKSLLKALKEDGDVVIVVFDAKAPSFRHEAYEAYKAGRAPTPEDFPRQLALMKELVDLLGLERLEVPGFEADDVLATLAKKAEREGYEVQILTADRDLFQLLSPRISVLHPEGHRITPEWLWEKYGLRPEQWVDFRALAGDPSDNIPGVKGIGEKTALKLLKEWGSLENLLKNLDQVKPESVREKILAHLEDLKLSRELSRVRTDLPLEVDFGRRREPDWEGLKAFLERLEFGSLLHEFGLLESPLLAEEAPWPPPEGAFLGYRLSRPEPMWAELLALAASAQGRVYRAEDPHGALRGLFEVRTLLAKDLAVVALREGLDLPPTDDPMLLAYLLDPSNTTPEGVARRYGGEWWEDAAKRALLAERLHENLLGRLQGEARLLWLYEEVEKPLSRVLAHMEATGVKLDVAYLENLSLEVAAHMRRLEEEVFRLAGRSFRLNSRDQLERVLFDELGLPPIGKTEKTGKRSTSAAVLEALREVHPIVDKILQYREMAKLKGTYIDRLPALVHPKTGRLHTRFNQTATATGRLSSSDPNLQNIPVRTPLGQKIRRAFVAEEGWALVALDYRQIELRVLAHLSGDENLIRVFQEGKDIHTQTASWMFGLSAEAIDPLMRRAAKTINFGVLYGMSAFRLSQELGIPYEEAQAFIQKYFQGYPKVKAWIEKTLREGRTRGYVETLFGRRRYVPDLNARVKGKREAAERMAFNMPVQGTAADLMKLAMVRLFPQLREVGARMLLQVHDELLLEAPKERAEEVAALAKEVMEGVWPLAVPLEVEVGIGEDWLAAKG

SEQ ID NO: 5769 - DNA, 2523 bp, synthetic construct
  misc_feature 1..2523: note = Variant of DNA polymerase I from Thermus sp. strain 2.9
  source 1..2523: mol_type = other DNA
atgcaccatcatcatcatcatggcggtagcggcgtgttaccggtgttcgagcctaaaggtcgcgtgcttctggttgatggccatcatctcgcgtatcgtaacttctttgccctgaaaggattaaccaccagcctgggcgagccggtacagggtgtctacggctttgcaaagtcgctcctgaaagctctgaaagaagacggtgatgtggtgattgttgtctttgatgcgaaagcgccaagttttcgccacgaagcgtacgaagcttacaaagccgggcgtgctccaacgccggaagactttcctcgccaattggcgcttatgaaggaattagtggatttgcttggcctcgaacgcttggaagttcccggtttcgaggcagacgacgtattagcgactctcgcaaagaaagccgaacgtgagggctatgaagtccagatcttgacagcagatcgcgatcttttccagcttttatctccgcgcatctcggtgttacacccggaagggcatcgtatcaccccggaatggctctgggagaaatatggtttgcgtcccgaacaatgggtggattttcgcgccttagcaggcgatccgagcgacaatattccgggagttaaaggtatcggcgagaagacggcgctcaagctccttaaagaatgggggtcgttggagaacttgcttaagaatttagatcaggtcaaaccagagtcagtgcgtgagaagattcttgctcacctcgaagacctcaaattaagccgcgaattgtcccgtgtacgcaccgatttgccgctcgaagttgatttcggtcgccgccgcgaacctgactgggagggtcttaaagcgtttttagagcgtcttgaatttggttcgctcttgcatgaattcggccttttagaaagcccgttactggccgaagaagcaccttggccaccgcccgagggcgcgtttttaggttaccgtttgagtcgcccggaaccgatgtgggccgaattactggctcttgcagcgtctgcccagggacgtgtgtatcgcgcggaagaccctcatggtgcgctccgcggcctcttcgaagtccgtggactccttgccaaagacttagctgttgttgcattgcgcgaaggtcttgatttacctccgactgatgatccaatgcttcttgcgtacctcttggacccgtcaaacacgacgcccgaaggcgtagcccgtcgttacggcggcgagtggaccgaagatgcagcgaaacgcgcgttattggccgaacgtttgcacgaaaatttattaggacgtttgcaaggcgaggaacgtctcctctggctttacgaagaagtggagaaaccattgagtcgcgtgctcgcgcatatggaagctaccggtgtcaaattagacgtggcgtatttggagaatctcagccttgaagttgctgcccacatgcgccgcttggaggaagaagtattccgtttagcaggccgttcctttcgccttaactctcgcgatcagttagaacgtgtgttgttcgatgaacttggtctccctcctatcggcaagacagagaagaccggtaaacgtagcacttcagcggcggttttagaagctcttcgcgaagtccatcccattgtggacaagatcttgcagtaccgcgaaatggcgaaattgaaaggcacctatattgaccgtcttccggcattagtccacccgaaaacgggacgcctccatacccgcttcaaccaaacagccacggcgaccggtcgtttgtcctcctctgatccaaaccttcagaatattccagtacgtaccccattgggccagaagatccgccgtgcgtttgtagctgaggagggttggcgtttagtggccctcgattatcgtcaaattgaattacgtgtccttgcccatctttctggcgatgagaacctcatccgcgtgtttcaggaaggcaaagacattcacactcaaacggcaagctggatgtttggattatcagctgaagcgatcgatcctttgatgcgtcgtgcagcgaagaccatcaatttcggtgttctctacggtatgagtgcctttcgtttgtcgcaggaattaggcattcccctggaagaagctcaggctttcattcagaaatactttcaaagctatcccaaagttaaagcatggatcgagaagactctccgtgaaggccgcacacgtggttacgtagagaccttatttggacgtcgccgctatgttcccgatttaaacggtcgcgtgaaaggcaagcgtgaagccgccgaacgcatggcgttcaacatgcctgtacagggcacggcagctgacctcatgaaacttgcaatggtgcgcctttttccacaattgcgtgaagttggtgcccgcatgctgttgcaggtccacgatgaactcttgttagaagcgccaaaagagcgtgcggaagaggtggcagccctcgcgaaagaagttatggaaggcgtgtggcccttagcggtgcctcttgaagtcgaagttggtattggcgaggattggctggctgccaaagga

SEQ ID NO: 5770 - protein, 841 aa, synthetic construct
  REGION 1..841: note = Variant of DNA polymerase I from Thermus sp. strain 2.9
MHHHHHHGGSGVLPVFEPKGRVLLVDGHHLAYRNFFALKGLTTSLGEPVQGVYGFAKSLLKALKEDGDVVIVVFDAKAPSFRHEAYEAYKAGRAPTPEDFPRQLALMKELVDLLGLERLEVPGFEADDVLATLAKKAEREGYEVQILTADRDLFQLLSPRISVLHPEGHRITPEWLWEKYGLRPEQWVDFRALAGDPSDNIPGVKGIGEKTALKLLKEWGSLENLLKNLDQVKPESVREKILAHLEDLKLSRELSRVRTDLPLEVDFGRRREPDWEGLKAFLERLEFGSLLHEFGLLESPLLAEEAPWPPPEGAFLGYRLSRPEPMWAELLALAASAQGRVYRAEDPHGALRGLFEVRGLLAKDLAVVALREGLDLPPTDDPMLLAYLLDPSNTTPEGVARRYGGEWTEDAAKRALLAERLHENLLGRLQGEERLLWLYEEVEKPLSRVLAHMEATGVKLDVAYLENLSLEVAAHMRRLEEEVFRLAGRSFRLNSRDQLERVLFDELGLPPIGKTEKTGKRSTSAAVLEALREVHPIVDKILQYREMAKLKGTYIDRLPALVHPKTGRLHTRFNQTATATGRLSSSDPNLQNIPVRTPLGQKIRRAFVAEEGWRLVALDYRQIELRVLAHLSGDENLIRVFQEGKDIHTQTASWMFGLSAEAIDPLMRRAAKTINFGVLYGMSAFRLSQELGIPLEEAQAFIQKYFQSYPKVKAWIEKTLREGRTRGYVETLFGRRRYVPDLNGRVKGKREAAERMAFNMPVQGTAADLMKLAMVRLFPQLREVGARMLLQVHDELLLEAPKERAEEVAALAKEVMEGVWPLAVPLEVEVGIGEDWLAAKG

SEQ ID NO: 5771 - DNA, 2523 bp, synthetic construct
  misc_feature 1..2523: note = Variant of DNA polymerase I from Thermus sp. strain 2.9
  source 1..2523: mol_type = other DNA
atgcaccatcatcatcatcatggcggtagcggcgtgttaccggtgttcgagcctaaaggtcgcgtgcttctggttgatggccatcatctcgcgtatcgtaacttctttgccctgaaaggattaaccaccagcctgggcgagccggtacagggtgtctacggctttgcaaagtcgctcctgaaagctctgaaagaagacggtgatgtggtgattgttgtctttgatgcgaaagcgccaagttttcgccacgaagcgtacgaagcttacaaagccgggcgtgctccaacgccggaagactttcctcgccaattggcgcttatgaaggaattagtggatttgcttggcctcgaacgcttggaagttcccggtttcgaggcagacgacgtattagcgactctcgcaaagaaagccgaacgtgagggctatgaagtccagatcttgacagcagatcgcgatcttttccagcttttatctccgcgcatctcggtgttacacccggaagggcatcgtatcaccccggaatggctctgggagaaatatggtttgcgtcccgaacaatgggtggattttcgcgccttagcaggcgatccgagcgacaatattccgggagttaaaggtatcggcgagaagacggcgctcaagctccttaaagaatgggggtcgttggagaacttgcttaagaatttagatcaggtcaaaccagagtcagtgcgtgagaagattcttgctcacctcgaagacctcaaattaagccgcgaattgtcccgtgtacgcaccgatttgccgctcgaagttgatttcggtcgccgccgcgaacctgactgggagggtcttaaagcgtttttagagcgtcttgaatttggttcgctcttgcatgaattcggccttttagaaagcccgttactggccgaagaaacgccttggccaccgcccgagggcgcgtttttaggttaccgtttgagtcgcccggaaccgatgtgggccgaattactggctcttgcagcgtctgcccagggacgtgtgtatcgcgcggaagaccctcatggtgcgctccgcggcctcttcgaagtccgtggactccttgccaaagacttagctgttgttgcattgcgcgaaggtcttgatttacctccgactgatgatccaatgcttcttgcgtacctcttggacccgtcaaacacgacgcccgaaggcgtagcccgtcgttacggcggcgagtggaccgaagatgcagcgaaacgcgcgttattggccgaacgtttgcacgaaaatttattaggacgtttgcaaggcgaggaacgtctcctctggctttacgaagaagtggagaaaccattgagtcgcgtgctcgcgcatatggaagctaccggtgtcaaattagacgtggcgtatttggagaatctcagccttgaagttgctgcccacatgcgccgcttggaggaagaagtattccgtttagcaggccgttcctttcgccttaactctcgcgatcagttagaacgtgtgttgttcgatgaacttggtctccctcctatcggcaagacagagaagaccggtaaacgtagcacttcagcggcggttttagaagctcttcgcgaagtccatcccattgtggacaagatcttgcagtaccgcgaaatggcgaaattgaaaggcacctatattgaccgtcttccggcattagtccacccgaaaacgggacgcctccatacccgcttcaaccaaacagccacggcgaccggtcgtttgtcctcctctgatccaaaccttcagaatattccagtacgtaccccattgggccagaagatccgccgtgcgtttgtagctgaggagggttggcgtttagtggccctcgattatcgtcaaattgaattacgtgtccttgcccatctttctggcgatgagaacctcatccgcgtgtttcaggaaggcaaagacattcacactcaaacggcaagctggatgtttggattatcagctgaagcgatcgatcctttgatgcgtcgtgcagcgaagaccatcaatttcggtgttctctacggtatgagtgcctttcgtttgtcgcaggaattaggcattccctatgaagaagctcaggcgttcattcagaaatactttcaaagctatcccaaagttaaagcatggatcgagaagactctccgtgaaggccgcacacgtggttacgtagagaccttatttggacgtcgccgctatgttcccgatttaaacgctcgcgtgaaaggcaagcgtgaagccgccgaacgcatggcgttcaacatgcctgtacagggcacggcagctgacctcatgaaacttgcaatggtgcgcctttttccacaattgcgtgaagttggtgcccgcatgctcttgcaggtccacgatgaactcttgttagaagcgccaaaagagcgtgcggaagaggtggcagccctcgcgaaagaagttatggaaggcgtgtggcccttagcggtgcctcttgaagtcgaagttggtattggcgaggattggctggctgccaaagga

SEQ ID NO: 5772 - protein, 841 aa, synthetic construct
  REGION 1..841: note = Variant of DNA polymerase I from Thermus sp. strain 2.9
MHHHHHHGGSGVLPVFEPKGRVLLVDGHHLAYRNFFALKGLTTSLGEPVQGVYGFAKSLLKALKEDGDVVIVVFDAKAPSFRHEAYEAYKAGRAPTPEDFPRQLALMKELVDLLGLERLEVPGFEADDVLATLAKKAEREGYEVQILTADRDLFQLLSPRISVLHPEGHRITPEWLWEKYGLRPEQWVDFRALAGDPSDNIPGVKGIGEKTALKLLKEWGSLENLLKNLDQVKPESVREKILAHLEDLKLSRELSRVRTDLPLEVDFGRRREPDWEGLKAFLERLEFGSLLHEFGLLESPLLAEETPWPPPEGAFLGYRLSRPEPMWAELLALAASAQGRVYRAEDPHGALRGLFEVRGLLAKDLAVVALREGLDLPPTDDPMLLAYLLDPSNTTPEGVARRYGGEWTEDAAKRALLAERLHENLLGRLQGEERLLWLYEEVEKPLSRVLAHMEATGVKLDVAYLENLSLEVAAHMRRLEEEVFRLAGRSFRLNSRDQLERVLFDELGLPPIGKTEKTGKRSTSAAVLEALREVHPIVDKILQYREMAKLKGTYIDRLPALVHPKTGRLHTRFNQTATATGRLSSSDPNLQNIPVRTPLGQKIRRAFVAEEGWRLVALDYRQIELRVLAHLSGDENLIRVFQEGKDIHTQTASWMFGLSAEAIDPLMRRAAKTINFGVLYGMSAFRLSQELGIPYEEAQAFIQKYFQSYPKVKAWIEKTLREGRTRGYVETLFGRRRYVPDLNARVKGKREAAERMAFNMPVQGTAADLMKLAMVRLFPQLREVGARMLLQVHDELLLEAPKERAEEVAALAKEVMEGVWPLAVPLEVEVGIGEDWLAAKG

SEQ ID NO: 5773 - DNA, 2523 bp, synthetic construct
  misc_feature 1..2523: note = Variant of DNA polymerase I from Thermus sp. strain 2.9
  source 1..2523: mol_type = other DNA
atgcaccatcatcatcatcatggcggtagcggcgtgttaccggtgttcgagcctaaaggtcgcgtgcttctggttgatggccatcatctcgcgtatcgtaacttctttgccctgaaaggattaaccaccagcctgggcgagccggtacagggtgtctacggctttgcaaagtcgctcctgaaagctctgaaagaagacggtgatgtggtgattgttgtctttgatgcgaaagcgccaagttttcgtcacgaagcgtacgaagcttacaaagccgggcgtgctccaacgccggaagactttcctcgccaattggcgcttatgaaggaattagtggatttgcttggcctcgaacgcttggaagttcccggtttcgaggcagacgacgtattagcgactctcgcaaagaaagccgaacgtgagggctatgaagtccagatcttgacagcagatcgcgatcttttccagcttttatctccgcgcatctcggtgttacacccggaagggcatcgtatcaccccggaatggctctgggagaaatatggtttgcgtcccgaacaatgggtggattttcgcgccttagcaggcgatccgagcgacaatattccgggagttaaaggtatcggcgagaagacggcgctcaagctccttaaagaatgggggtcgttggagaacttgcttaagaatttagatcaggtcaaaccagagtcagtgcgtgagaagattcttgctcacctcgaagacctcaaattaagccgcgaattgtcccgtgtacgcaccgatttgccgctcgaagttgatttcggtcgccgccgcgaacctgactgggagggtcttaaagcgtttttagagcgtcttgaatttggttcgctcttgcatgaattcggccttttagaaagcccgttactggccgaagaagcaccttggccaccgcccgagggcgcgtttttaggttaccgtttgagtcgcccggaaccgatgtgggccgaattactggctcttgcagcgtctgcccagggacgtgtgtatcgcgcggaagaccctcatggtgcgctccgcggcctcttcgaagtccgtggactccttgccaaagacttagctgttgttgcattgcgcgaaggtcttgatttacctccgactgatgatccaatgcttcttgcgtacctcttggacccgtcaaacacgacgcccgaaggcgtagcccgtcgttacggcggcgagtggaccgaagatgcagcgaaacgcgcgttattggccgaacgtttgcacgaaaattatttaggacgtttgcaaggcgaggaacgtctcctctggctttacgaagaagtggagaaaccattgagtcgcgtgctcgcgcatatggaagctaccggtgtcaaattagacgtggcgtatttggagaatctcagccttgaagttgctgcccacatgcgccgcttggaggaagaagtattccgtttagcaggccgttcctttcgccttaactctcgcgatcagttagaacgtgtgttgttcgatgaacttggtctccctcctatcggcaagacagagaagaccggtaaacgtagcacttcagcggcggttttagaagctcttcgcgaagtccatcccattgtggacaagatcttgcagtaccgcgaaatggcgaaattgaaaggcacctatattgaccgtcttccggcattagtccacccgaaaacgggacgcctccatacccgcttcaaccaaacagccacggcgaccggtcgtttgtcctcctctgatccaaaccttcagaatattccagtacgtaccccattgggccagaagatccgccgtgcgtttgtagctgaggagggttggcgtttagtggccctcgattatcgtcaaattgaattacgtgtccttgcccatctttctggcgatgagaacctcatccgcgtgtttcaggaaggcaaagacattcacactcaaacggcaagctggatgtttggattatcagctgaagcgatcgatcctttgatgcgtcgtgcagcgaagaccatcaatttcggtgttctctacggtatgagtgcctttcgtttgtcgcaggaattaggcattccctatgaagaagctcaggcgttcattcagaaatactttcaaagctatcccaaagttaaagcatggatcgagaagactctccgtgaaggccgcacacgtggttacgtagagaccttatttggacgtcgccgctatgttcccgatttaaacgctcgcgtgaaaggcaagcgtgaagccgccgaacgcatggcgttcaacatgcctgtacagggcacggcagctgacctcatgaaacttgcaatggtgcgcctttttccacaattgcgtgaagttggtgcccgcatgctcttgcaggtccacgatgaactcttgttagaagcgccaaaagagcgtgcggaagaggtggcagccctcgcgaaagaagttatggaaggcgtgtggcccttagcggtgcctcttgaagtcgaagttggtattggcgaggattggctggctgccaaagga

SEQ ID NO: 5774 - protein, 841 aa, synthetic construct
  REGION 1..841: note = Variant of DNA polymerase I from Thermus sp. strain 2.9
MHHHHHHGGSGVLPVFEPKGRVLLVDGHHLAYRNFFALKGLTTSLGEPVQGVYGFAKSLLKALKEDGDVVIVVFDAKAPSFRHEAYEAYKAGRAPTPEDFPRQLALMKELVDLLGLERLEVPGFEADDVLATLAKKAEREGYEVQILTADRDLFQLLSPRISVLHPEGHRITPEWLWEKYGLRPEQWVDFRALAGDPSDNIPGVKGIGEKTALKLLKEWGSLENLLKNLDQVKPESVREKILAHLEDLKLSRELSRVRTDLPLEVDFGRRREPDWEGLKAFLERLEFGSLLHEFGLLESPLLAEEAPWPPPEGAFLGYRLSRPEPMWAELLALAASAQGRVYRAEDPHGALRGLFEVRGLLAKDLAVVALREGLDLPPTDDPMLLAYLLDPSNTTPEGVARRYGGEWTEDAAKRALLAERLHENYLGRLQGEERLLWLYEEVEKPLSRVLAHMEATGVKLDVAYLENLSLEVAAHMRRLEEEVFRLAGRSFRLNSRDQLERVLFDELGLPPIGKTEKTGKRSTSAAVLEALREVHPIVDKILQYREMAKLKGTYIDRLPALVHPKTGRLHTRFNQTATATGRLSSSDPNLQNIPVRTPLGQKIRRAFVAEEGWRLVALDYRQIELRVLAHLSGDENLIRVFQEGKDIHTQTASWMFGLSAEAIDPLMRRAAKTINFGVLYGMSAFRLSQELGIPYEEAQAFIQKYFQSYPKVKAWIEKTLREGRTRGYVETLFGRRRYVPDLNARVKGKREAAERMAFNMPVQGTAADLMKLAMVRLFPQLREVGARMLLQVHDELLLEAPKERAEEVAALAKEVMEGVWPLAVPLEVEVGIGEDWLAAKG

SEQ ID NO: 5775 - DNA, 2523 bp, synthetic construct
  misc_feature 1..2523: note = Variant of DNA polymerase I from Thermus sp. strain 2.9
  source 1..2523: mol_type = other DNA
atgcaccatcatcatcatcatggcggtagcggcgtgttaccggtgttcgagcctaaaggtcgcgtgcttctggttgatggccatcatctcgcgtatcgtaacttctttgccctgaaaggattaaccaccagcctgggcgagccggtacagggtgtctacggctttgcaaagtcgctcctgaaagctctgaaagaagacggtgatgtggtgattgttgtctttgatgcgaaagcgccaagttttcgccacgaagcgtacgaagcttacaaagccgggcgtgctccaacgccggaagactttcctcgccaattggcgcttatgaaggaattagtggatttgcttggcctcgaacgcttggaagttcccggtttcgaggcagacgacgtattagcgactctcgcaaagaaagccgaacgtgagggctatgaagtccagatcttgacagcagatcgcgatcttttccagcttttatctccgcgcatctcggtgttacacccggaagggcatcgtatcaccccggaatggctctgggagaaatatggtttgcgtcccgaacaatgggtggattttcgcgccttagcaggcgatccgagcgacaatattccgggagttaaaggtatcggcgagaagacggcgctcaagctccttaaagaatgggggtcgttggagaacttgcttaagaatttagatcaggtcaaaccagagtcagtgcgtgagaagattcttgctcacctcgaagacctcaaattaagccgcgaattgtcccgtgtacgcaccgatttgccgctcgaagttgatttcggtcgccgccgcgaacctgactgggagggtcttaaagcgtttttagagcgtcttgaatttggttcgctcttgcatgaattcggccttttagaaagcccgttactggccgaagaagcaccttggccaccgcccgagggcgcgtttttaggttaccgtttgagtcgcccggaaccgatgtgggccgaattactggctcttgcagcgtctgcccagggacgtgtgtatcgcgcggaagaccctcatggtgcgctccgcggcctcttcgaagtccgtggactccttgccaaagacttagctgttgttgcattgcgcgaaggtcttgatttacctccgactgatgatccaatgcttcttgcgtacctcttggacccgtcaaacacgacgcccgaaggcgtagcccgtcgttacggcggcgagtggaccgaagatgcagcgaaacgcgcgttattggccgaacgtttgcacgaaaatttattaggacgtttgcaaggcgaggaacgtctcctctggctttacgaagaagtggagaaaccattgagtcgcgtgctcgcgcatatggaagctaccggtgtcaaattagacgtggcgtatttggagaatctttatcttgaagttgctgcccacatgcgccgcttggaggaagaagtattccgtttagcaggccgttcctttcgccttaactctcgcgatcagttagaacgtgtgttgttcgatgaacttggtctccctcctatcggcaagacagagaagaccggtaaacgtagcacttcagcggcggttttagaagctcttcgcgaagtccatcccattgtggacaagatcttgcagtaccgcgaaatggcgaaattgaaaggcacctatattgaccgtcttccggcattagtccacccgaaaacgggacgcctccatacccgcttcaaccaaacagccacggcgaccggtcgtttgtcctcctctgatccaaaccttcagaatattccagtacgtaccccattgggccagaagatccgccgtgcgtttgtagctgaggagggttggcgtttagtggccctcgattatcgtcaaattgaattacgtgtccttgcccatctttctggcgatgagaacctcatccgcgtgtttcaggaaggcaaagacattcacactcaaacggcaagctggatgtttggattatcagctgaagcgatcgatcctttgatgcgtcgtgcagcgaagaccatcaatttcggtgttctctacggtatgagtgcctttcgtttgtcgcaggaattaggcattccctatgaagaagctcaggcgttcattcagaaatactttcaaagctatcccaaagttaaagcatggatcgagaagactctccgtgaaggccgcacacgtggttacgtagagaccttatttggacgtcgccgctatgttcccgatttaaacgctcgcgtgaaaggcaagcgtgaagccgccgaacgcatggcgttcaacatgcctgtacagggcacggcagctgacctcatgaaacttgcaatggtgcgcctttttccacaattgcgtgaagttggtgcccgcatgctcttgcaggtccacgatgaactcttgttagaagcgccaaaagagcgtgcggaagaggtggcagccctcgcgaaagaagttatggaaggcgtgtggcccttagcggtgcctcttgaagtcgaagttggtattggcgaggattggctggctgccaaagga

SEQ ID NO: 5776 - protein, 841 aa, synthetic construct
  REGION 1..841: note = Variant of DNA polymerase I from Thermus sp. strain 2.9
MHHHHHHGGSGVLPVFEPKGRVLLVDGHHLAYRNFFALKGLTTSLGEPVQGVYGFAKSLLKALKEDGDVVIVVFDAKAPSFRHEAYEAYKAGRAPTPEDFPRQLALMKELVDLLGLERLEVPGFEADDVLATLAKKAEREGYEVQILTADRDLFQLLSPRISVLHPEGHRITPEWLWEKYGLRPEQWVDFRALAGDPSDNIPGVKGIGEKTALKLLKEWGSLENLLKNLDQVKPESVREKILAHLEDLKLSRELSRVRTDLPLEVDFGRRREPDWEGLKAFLERLEFGSLLHEFGLLESPLLAEEAPWPPPEGAFLGYRLSRPEPMWAELLALAASAQGRVYRAEDPHGALRGLFEVRGLLAKDLAVVALREGLDLPPTDDPMLLAYLLDPSNTTPEGVARRYGGEWTEDAAKRALLAERLHENLLGRLQGEERLLWLYEEVEKPLSRVLAHMEATGVKLDVAYLENLYLEVAAHMRRLEEEVFRLAGRSFRLNSRDQLERVLFDELGLPPIGKTEKTGKRSTSAAVLEALREVHPIVDKILQYREMAKLKGTYIDRLPALVHPKTGRLHTRFNQTATATGRLSSSDPNLQNIPVRTPLGQKIRRAFVAEEGWRLVALDYRQIELRVLAHLSGDENLIRVFQEGKDIHTQTASWMFGLSAEAIDPLMRRAAKTINFGVLYGMSAFRLSQELGIPYEEAQAFIQKYFQSYPKVKAWIEKTLREGRTRGYVETLFGRRRYVPDLNARVKGKREAAERMAFNMPVQGTAADLMKLAMVRLFPQLREVGARMLLQVHDELLLEAPKERAEEVAALAKEVMEGVWPLAVPLEVEVGIGEDWLAAKG

SEQ ID NO: 5777 - DNA, 2523 bp, synthetic construct
  misc_feature 1..2523: note = Variant of DNA polymerase I from Thermus sp. strain 2.9
  source 1..2523: mol_type = other DNA
atgcaccatcatcatcatcatggcggtagcggcgtgttaccggtgttcgagcctaaaggtcgcgtgcttctggttgatggccatcatctcgcgtatcgtaacttctttgccctgaaaggattaaccaccagcctgggcgagccggtacagggtgtctacggctttgcaaagtcgctcctgaaagctctgaaagaagacggtgatgtggtgattgttgtctttgatgcgaaagcgccaagttttcgccacgaagcgtacgaagcttacaaagccgggcgtgctccaacgccggaagactttcctcgccaattggcgcttatgaaggaattagtggatttgcttggcctcgaacgcttggaagttcccggtttcgaggcagacgacgtattagcgactctcgcaaagaaagccgaacgtgagggctatgaagtccagatcttgacagcagatcgcgatcttttccagcttttatctccgcgcatctcggtgttacacccggaagggcatcgtatcaccccggaatggctctgggagaaatatggtttgcgtcccgaacaatgggtggattttcgcgccttagcaggcgatccgagcgacaatattccgggagttaaaggtatcggcgagaagacggcgctcaagctccttaaagaatgggggtcgttggagaacttgcttaagaatttagatcaggtcaaaccagagtcagtgcgtgagaagattcttgctcacctcgaagacctcaaattaagccgcgaattgtcccgtgtacgcaccgatttgccgctcgaagttgatttcggtcgccgccgcgaacctgactgggagggtcttaaagcgtttttagagcgtcttgaatttggttcgctcttgcatgaattcggccttttagaaagcccgttactggccgaagaagcaccttggccaccgcccgagggcgcgtttttaggttaccgtttgagtcgcccggaaccgatgtgggccgaattactggctcttgcagcgtctgcccagggacgtgtgtatcgcgcggaagaccctcatggtgcgctccgcggcctcttcgaagtccgtggactccttgccaaagacttagctgttgttgcattgcgcgaagtgcttgatttacctccgactgatgatccaatgcttcttgcgtacctcttggacccgtcaaacacgacgcccgaaggcgtagcccgtcgttacggcggcgagtggaccgaagatgcagcgaaacgcgcgttattggccgaacgtttgcacgaaaatttattaggacgtttgcaaggcgaggaacgtctcctctggctttacgaagaagtggagaaaccattgagtcgcgtgctcgcgcatatggaagctaccggtgtcaaattagacgtggcgtatttggagaatctcagccttgaagttgctgcccacatgcgccgcttggaggaagaagtattccgtttagcaggccgttcctttcgccttaactctcgcgatcagttagaacgtgtgttgttcgatgaacttggtctccctcctatcggcaagacagagaagaccggtaaacgtagcacttcagcggcggttttagaagctcttcgcgaagtccatcccattgtggacaagatcttgcagtaccgcgaaatggcgaaattgaaaggcacctatattgaccgtcttccggcattagtccacccgaaaacgggacgcctccatacccgcttcaaccaaacagccacggcgaccggtcgtttgtcctcctctgatccaaaccttcagaatattccagtacgtaccccattgggccagaagatccgccgtgcgtttgtagctgaggagggttggcgtttagtggccctcgattatcgtcaaattgaattacgtgtccttgcccatctttctggcgatgagaacctcatccgcgtgtttcaggaaggcaaagacattcacactcaaacggcaagctggatgtttggattatcagctgaagcgatcgatcctttgatgcgtcgtgcagcgaagaccatcaatttcggtgttctctacggtatgagtgcctttcgtttgtcgcaggaattaggcattccctatgaagaagctcaggcgttcattcagaaatactttcaaagctatcccaaagttaaagcatggatcgagaagactctccgtgaaggccgcacacgtggttacgtagagaccttatttggacgtcgccgctatgttcccgatttaaacgctcgcgtgaaaggcaagcgtgaagccgccgaacgcatggcgttcaacatgcctgtacagggcacggcagctgacctcatgaaacttgcaatggtgcgcctttttccacaattgcgtgaagttggtgcccgcatgctcttgcaggtccacgatgaactcttgttagaagcgccaaaagagcgtgcggaagaggtggcagccctcgcgaaagaagttatggaaggcgtgtggcccttagcggtgcctcttgaagtcgaagttggtattggcgaggattggctggctgccaaagga

SEQ ID NO: 5778 - protein, 841 aa, synthetic construct
  REGION 1..841: note = Variant of DNA polymerase I from Thermus sp. strain 2.9
MHHHHHHGGSGVLPVFEPKGRVLLVDGHHLAYRNFFALKGLTTSLGEPVQGVYGFAKSLLKALKEDGDVVIVVFDAKAPSFRHEAYEAYKAGRAPTPEDFPRQLALMKELVDLLGLERLEVPGFEADDVLATLAKKAEREGYEVQILTADRDLFQLLSPRISVLHPEGHRITPEWLWEKYGLRPEQWVDFRALAGDPSDNIPGVKGIGEKTALKLLKEWGSLENLLKNLDQVKPESVREKILAHLEDLKLSRELSRVRTDLPLEVDFGRRREPDWEGLKAFLERLEFGSLLHEFGLLESPLLAEEAPWPPPEGAFLGYRLSRPEPMWAELLALAASAQGRVYRAEDPHGALRGLFEVRGLLAKDLAVVALREVLDLPPTDDPMLLAYLLDPSNTTPEGVARRYGGEWTEDAAKRALLAERLHENLLGRLQGEERLLWLYEEVEKPLSRVLAHMEATGVKLDVAYLENLSLEVAAHMRRLEEEVFRLAGRSFRLNSRDQLERVLFDELGLPPIGKTEKTGKRSTSAAVLEALREVHPIVDKILQYREMAKLKGTYIDRLPALVHPKTGRLHTRFNQTATATGRLSSSDPNLQNIPVRTPLGQKIRRAFVAEEGWRLVALDYRQIELRVLAHLSGDENLIRVFQEGKDIHTQTASWMFGLSAEAIDPLMRRAAKTINFGVLYGMSAFRLSQELGIPYEEAQAFIQKYFQSYPKVKAWIEKTLREGRTRGYVETLFGRRRYVPDLNARVKGKREAAERMAFNMPVQGTAADLMKLAMVRLFPQLREVGARMLLQVHDELLLEAPKERAEEVAALAKEVMEGVWPLAVPLEVEVGIGEDWLAAKG

SEQ ID NO: 5779 - DNA, 2523 bp, synthetic construct
  misc_feature 1..2523: note = Variant of DNA polymerase I from Thermus sp. strain 2.9
  source 1..2523: mol_type = other DNA
atgcaccatcatcatcatcatggcggtagcggcgtgttaccggtgttcgagcctaaaggtcgcgtgcttctggttgatggccatcatctcgcgtatcgtaacttctttgccctgaaaggattaaccaccagcctgggcgagccggtacagggtgtctacggctttgcaaagtcgctcctgaaagctctgaaagaagacggtgatgtggtgattgttgtctttgatgcgaaagcgccaagttttcgccacgaagcgtacgaagcttacaaagccgggcgtgctccaacgccggaagactttcctcgccaattggcgcttatgaaggaattagtggatttgcttggcctcgaacgcttggaagttcccggtttcgaggcagacgacgtattagcgactctcgcaaagaaagccgaacgtgagggctatgaagtccagatcttgacagcagatcgcgatcttttccagcttttatctccgcgcatctcggtgttacacccggaagggcatcgtatcaccccggaatggctctgggagaaatatggtttgcgtcccgaacaatgggtggattttcgcgccttagcaggcgatccgagcgacaatattccgggagttaaaggtatcggcgagaagacggcgctcaagctccttaaagaatgggggtcgttggagaacttgcttaagaatttagatcaggtcaaaccagagtcagtgcgtgagaagattcttgctcacctcgaagacctcaaattaagccgcgaattgtcccgtgtacgcaccgatttgccgctcgaagttgatttcggtcgccgccgcgaacctgactgggagggtcttaaagcgtttttagagcgtcttgaatttggttcgctcttgcatgaattcggccttttagaaagcccgttactggccgaagaagcaccttggccaccgcccgagggcgcgtttttaggttaccgtttgagtcgcccggaaccgatgtgggccgaattactggctcttgcagcgtctgcccagggacgtgtgtatcgcgcggaagaccctcatggtgcgctccgcggcctcttcgaagtccgtggactccttgccaaagacttagctgttgttgcattgcgcgaaggtcttgatttacctccgactgatgatccaatgcttcttgcgtacctcttggacccgtcaaacacgacgcccgaaggcgtagcccgtcgttacggcggcgagtggaccgaagatgcagcgaaacgcgcgttattggccgaacgtttgcacgaaaatttattaggacgtttgcaaggcgaggaacgtctcctctggctttacgaagaagtggagaaaccattgagtcgcgtgctcgcgcatatggaagctaccggtgtcaaattagacgtggcgtatttggagaatctcagccttgaagttgctgcccacatgcgccgcttggaggaagaagtattccgtttagcaggccgttcctttcgccttaactctcgcgatcagttagaacgtgtgttgttcgatgaacttggtctccctcctatcggcaagacagagaagaccggtaaacgtagcacttcagcggcggttttagaagctcttcgcgaagtccatcccattgtggacaagatcttgcagtaccgcgaaatggcgaaattgaaaggcacctatattgaccgtcttccggcattagtccacccgaaaacgggacgcctccatacccgcttcaaccaaacagccacggcgaccggtcgtttgtcctcctctgatccaaaccttcagaatattccagtacgtaccccattgggccagaagatccgccgtgcgtttgtagctgaggagggttggcgtttagtggccctcgattatcgtcaaattgaattacgtgtccttgcccatctttctggcgatgagaacctcatccgcgtgtttcaggaaggcaaagacattcacactcaaacggcaagctggatgtttggattatcagctgaagcgatcgatcctttgatgcgtcgtgcagcgaagaccatcaatttcggtgttctctacggtatgagtgcctttcgtttgtcgcaggaattaggcattccctatgaagaagctcaggcgttcattcagaaatactttcaaagctatcccaaagttaaagcatggatcgagaagactctccgtgaaggccgcacacgtggttacgtagagaccttatttggacgtcgccgctatgttcccgatttaaacgctcgcgtgaaaggcaagcgtgaagccgccgaacgcatggcgttcaacatgcctgtacagggcacggcagctgacctcatgaaacttgcaatggtgcgcctttttccacaattgcgtgaagttggtgcccgcatgctcttgcaggtccacgatgaactcttgttagaagcgccaaaagagcgtgcggaagaggtggcagccctcgcgaaagaagttatggaaggcgtgtggcccttagcggtgcctcttgaagtcgaagttggtattggcgaggattggctggctttgaaagga

SEQ ID NO: 5780 - protein, 841 aa, synthetic construct
  REGION 1..841: note = Variant of DNA polymerase I from Thermus sp. strain 2.9
MHHHHHHGGSGVLPVFEPKGRVLLVDGHHLAYRNFFALKGLTTSLGEPVQGVYGFAKSLLKALKEDGDVVIVVFDAKAPSFRHEAYEAYKAGRAPTPEDFPRQLALMKELVDLLGLERLEVPGFEADDVLATLAKKAEREGYEVQILTADRDLFQLLSPRISVLHPEGHRITPEWLWEKYGLRPEQWVDFRALAGDPSDNIPGVKGIGEKTALKLLKEWGSLENLLKNLDQVKPESVREKILAHLEDLKLSRELSRVRTDLPLEVDFGRRREPDWEGLKAFLERLEFGSLLHEFGLLESPLLAEEAPWPPPEGAFLGYRLSRPEPMWAELLALAASAQGRVYRAEDPHGALRGLFEVRGLLAKDLAVVALREGLDLPPTDDPMLLAYLLDPSNTTPEGVARRYGGEWTEDAAKRALLAERLHENLLGRLQGEERLLWLYEEVEKPLSRVLAHMEATGVKLDVAYLENLSLEVAAHMRRLEEEVFRLAGRSFRLNSRDQLERVLFDELGLPPIGKTEKTGKRSTSAAVLEALREVHPIVDKILQYREMAKLKGTYIDRLPALVHPKTGRLHTRFNQTATATGRLSSSDPNLQNIPVRTPLGQKIRRAFVAEEGWRLVALDYRQIELRVLAHLSGDENLIRVFQEGKDIHTQTASWMFGLSAEAIDPLMRRAAKTINFGVLYGMSAFRLSQELGIPYEEAQAFIQKYFQSYPKVKAWIEKTLREGRTRGYVETLFGRRRYVPDLNARVKGKREAAERMAFNMPVQGTAADLMKLAMVRLFPQLREVGARMLLQVHDELLLEAPKERAEEVAALAKEVMEGVWPLAVPLEVEVGIGEDWLALKG

SEQ ID NO: 5781 - DNA, 2523 bp, synthetic construct
  misc_feature 1..2523: note = Variant of DNA polymerase I from Thermus sp. strain 2.9
  source 1..2523: mol_type = other DNA
atgcaccatcatcatcatcatggcggtagcggcgtgttaccggtgttcgagcctaaaggtcgcgtgcttctggttgatggccatcatctcgcgtatcgtaacttctttgccctgaaaggattaaccaccagcctgggcgagccggtacagggtgtctacggctttgcaaagtcgctcctgaaagctctgaaagaagacggtgatgtggtgattgttgtctttgatgcgaaagcgccaagttttcgccacgaagcgtacgaagcttacaaagccgggcgtgctccaacgccggaagactttcctcgccaattggcgcttatgaaggaattagtggatttgcttggcctcgaacgcttggaagttcccggtttcgaggcagacgacgtattagcgactctcgcaaagaaagccgaacgtgagggctatgaagtccagatcttgacagcagatcgcgatcttttccagcttttatctccgcgcatctcggtgttacacccggaagggcatcgtatcaccccggaatggctctgggagaaatatggtttgcgtcccgaacaatgggtggattttcgcgccttagcaggcgatccgagcgacaatattccgggagttaaaggtatcggcgagaagacggcgctcaagctccttaaagaatgggggtcgttggagaacttgcttaagaatttagatcaggtcaaaccagagtcagtgcgtgagaagattcttgctcacctcgaagacctcaaattaagccgcgaattgtcccgtgtacgcaccgatttgccgctcgaagttgatttcggtcgccgccgcgaacctgactgggagggtcttaaagcgtttttagagcgtcttgaatttggttcgctcttgcatgaattcggccttttagaaagcccgttaccggccgaagaagcaccttggccaccgcccgagggcgcgtttttaggttaccgtttgagtcgcccggaaccgatgtgggccgaattactggctcttgcagcgtctgcccagggacgtgtgtatcgcgcggaagaccctcatggtgcgctccgcggcctcttcgaagtccgtggactccttgccaaagacttagctgttgttgcattgcgcgaaggtcttgatttacctccgactgatgatccaatgcttcttgcgtacctcttggacccgtcaaacacgacgcccgaaggcgtagcccgtcgttacggcggcgagtggaccgaagatgcagcgaaacgcgcgttattggccgaacgtttgcacgaaaatttattaggacgtttgcaaggcgaggaacgtctcctctggctttacgaagaagtggagaaaccattgagtcgcgtgctcgcgcatatggaagctaccggtgtcaaattagacgtggcgtatttggagaatcttagccttgaagttgctgcccacatgcgccgcttggaggaagaagtattccgtttagcaggccgttcctttcgccttaactctcgcgatcagttagaacgtgtgttgttcgatgaacttggtctccctcctatcggcaagacagagaagaccggtaaacgtagcacttcagcggcggttttagaagctcttcgcgaagtccatcccattgtggacaagatcttgcagtaccgcgaaatggcgaaattgaaaggcacctatattgaccgtcttccggcattagtccacccgaaaacgggacgcctccatacccgcttcaaccaaacagccacggcgaccggtcgtttgtcctcctctgatccaaaccttcagaatattccagtacgtaccccattgggccagaagatccgccgtgcgtttgtagctgaggagggttggcgtttagtggccctcgattatagtcaaattgaattacgtgtccttgcccatctttctggcgatgagaacctcatccgcgtgtttcaggaaggcaaagacattcacactcaaacggcaagctggatgtttggattatcagctgaagcgatcgatcctttgatgcgtcgtgcagcgaagaccatcaatttcggtgttctctacggtatgagtgcctttcgtttgtcgcaggaattaggcattccctatgaagaagctcaggcgttcattcagaaatactttcaaagctatcccaaagttaaagcatggatcgagaagactctccgtgaaggccgcacacgtggttacgtagagaccttatttggacgtcgccgctatgttcccgatttaaacgctcgcgtgaaaggcaagcgtgaagccgccgaacgcatggcgttcaacatgcctgtacagggcacggcagctgacctcatgaaacttgcaatggtgcgcctttttccacaattgcgtgaagttggtgcccgcatgctcttgcaggtccacgatgaactcttgttagaagcgccaaaagagcgtgcggaagaggtggcagccctcgcgaaagaagttatggaaggcgtgtggcccttagcggtgcctcttgaagtcgaagttggtattggcgaggattggctggctgccaaagga

SEQ ID NO: 5782 - protein, 841 aa, synthetic construct
  REGION 1..841: note = Variant of DNA polymerase I from Thermus sp. strain 2.9
MHHHHHHGGSGVLPVFEPKGRVLLVDGHHLAYRNFFALKGLTTSLGEPVQGVYGFAKSLLKALKEDGDVVIVVFDAKAPSFRHEAYEAYKAGRAPTPEDFPRQLALMKELVDLLGLERLEVPGFEADDVLATLAKKAEREGYEVQILTADRDLFQLLSPRISVLHPEGHRITPEWLWEKYGLRPEQWVDFRALAGDPSDNIPGVKGIGEKTALKLLKEWGSLENLLKNLDQVKPESVREKILAHLEDLKLSRELSRVRTDLPLEVDFGRRREPDWEGLKAFLERLEFGSLLHEFGLLESPLPAEEAPWPPPEGAFLGYRLSRPEPMWAELLALAASAQGRVYRAEDPHGALRGLFEVRGLLAKDLAVVALREGLDLPPTDDPMLLAYLLDPSNTTPEGVARRYGGEWTEDAAKRALLAERLHENLLGRLQGEERLLWLYEEVEKPLSRVLAHMEATGVKLDVAYLENLSLEVAAHMRRLEEEVFRLAGRSFRLNSRDQLERVLFDELGLPPIGKTEKTGKRSTSAAVLEALREVHPIVDKILQYREMAKLKGTYIDRLPALVHPKTGRLHTRFNQTATATGRLSSSDPNLQNIPVRTPLGQKIRRAFVAEEGWRLVALDYSQIELRVLAHLSGDENLIRVFQEGKDIHTQTASWMFGLSAEAIDPLMRRAAKTINFGVLYGMSAFRLSQELGIPYEEAQAFIQKYFQSYPKVKAWIEKTLREGRTRGYVETLFGRRRYVPDLNARVKGKREAAERMAFNMPVQGTAADLMKLAMVRLFPQLREVGARMLLQVHDELLLEAPKERAEEVAALAKEVMEGVWPLAVPLEVEVGIGEDWLAAKG

SEQ ID NO: 5783 - DNA, 2523 bp, synthetic construct
  misc_feature 1..2523: note = Variant of DNA polymerase I from Thermus sp. strain 2.9
  source 1..2523: mol_type = other DNA
atgcaccatcatcatcatcatggcggtagcggcgtgttaccggtgttcgagcctaaaggtcgcgtgcttctggttgatggccatcatctcgcgtatcgtaacttctttgccctgaaaggattaaccaccagcctgggcgagccggtacagggtgtctacggctttgcaaagtcgctcctgaaagctctgaaagaagacggtgatgtggtgattgttgtctttgatgcgaaagcgccaagttttcgccacgaagcgtacgaagcttacaaagccgggcgtgctccaacgccggaagactttcctcgccaattggcgcttatgaaggaattagtggatttgcttggcctcgaacgcttggaagttcccggtttcgaggcagacgacgtattagcgactctcgcaaagaaagccgaacgtgagggctatgaagtccagatcttgacagcagatcgcgatcttttccagcttttatctccgcgcatctcggtgttacacccggaagggcatcgtatcaccccggaatggctctgggagaaatatggtttgcgtcccgaacaatgggtggattttcgcgccttagcaggcgatccgagcgacaatattccgggagttaaaggtatcggcgagaagacggcgctcaagctccttaaagaatgggggtcgttggagaacttgcttaagaatttagatcaggtcaaaccagagtcagtgcgtgagaagattcttgctcacctcgaagacctcaaattaagccgcgaattgtcccgtgtacgcaccgatttgccgctcgaagttgatttcggtcgccgccgcgaacctgactgggagggtcttaaagcgtttttagagcgtcttgaatttggttcgctcttgcatgaattcggccttttagaaagcccgttactggccgaagaagcaccttggccaccgcccgagggcgcgtttttaggttaccgtttgagtcgcccggaaccgatgtgggccgaattactggctcttgcagcgtctgcccagggacgtgtgtatcgcgcggaagaccctcatggtgcgctccgcggcctcttcgaagtccgtggactccttgccaaagacttagctgttgttgcattgcgcgaaggtcttgatttacctccgactgatgatccaatgcttcttgcgtacctcttggacccgtcaaacacgacgcccgaaggcgtagcccgtcgttacggcggcgagtggaccgaagatgcagcgaaacgcgcgttattggccgaacgtttgcacgaaaatttattaggacgtttgcaaggcgaggaacgtctcctctggctttacgaagaagtggagaaaccattgagtcgcgtgctcgcgcatatggaagctaccggtgtcaaattagacgtggcgtatttggagaatctcagccttgaagttgctgcccacatgcgccgcttggaggaagaagtattccgtttagcaggccgttcctttcgccttaactctcgcgatcagttagaacgtgtgttgttcgatgaacttggtctccctcctatcggcaagacagagaagaccggtaaacgtagcacttcagcggcggttttagaagctcttcgcgaagtccatcccattgtggacaagatcttgcagtaccgcgaaatggcgaaattgaaaggcacctatattgaccgtcttccggcattagtccacccgaaaacgggacgcctccatacccgcttcaaccaaacagccacggcgaccggtcgtttgtcctcctctgatccaaaccttcagaatattccagtacgtaccccattgggccagaagatccgccgtgcgtttgtagctgaggagggttggcgtttagtggccctcgattatcgtcaaattgaattacgtgtccttgcccatctttctggcgatgagaacctcatccgcgtgtttcaggaaggcaaagacattcacactcaaacggcaagctggatgtttggattatcagctgaagcgatcgatcctttgatgcgtcgtgcagcgaagaccatcaatttcggtgttctctacggtatgagtgcctttcgtttgtcgcaggaattaggcattccctatgaagaagctcaggcgttcattcagaaatactttcaaagctatcccaaagttaaagcatggatcgagaagactctccgtgaaggccgcacacgtggttacgtagagaccttatttggacgtcgccgctatgttcccgatttaaacgctcgcgtgaaagtgaagcgtgaagccgccgaacgcatggcgttcaacatgcctgtacagggcacggcagctgacctcatgaaacttgcaatggtgcgcctttttccacaattgcgtgaagttggtgcccgcatgctcttgcaggtccacgatgaactcttgttagaagcgccaaaagagcgtgcggaagaggtggcagccctcgcgaaagaagttatggaaggcgtgtggcccttagcggtgcctcttgaagtcgaagttggtattggcgaggattggctggctgccaaagga

SEQ ID NO: 5784 - protein, 841 aa, synthetic construct
  REGION 1..841: note = Variant of DNA polymerase I from Thermus sp. strain 2.9
MHHHHHHGGSGVLPVFEPKGRVLLVDGHHLAYRNFFALKGLTTSLGEPVQGVYGFAKSLLKALKEDGDVVIVVFDAKAPSFRHEAYEAYKAGRAPTPEDFPRQLALMKELVDLLGLERLEVPGFEADDVLATLAKKAEREGYEVQILTADRDLFQLLSPRISVLHPEGHRITPEWLWEKYGLRPEQWVDFRALAGDPSDNIPGVKGIGEKTALKLLKEWGSLENLLKNLDQVKPESVREKILAHLEDLKLSRELSRVRTDLPLEVDFGRRREPDWEGLKAFLERLEFGSLLHEFGLLESPLLAEEAPWPPPEGAFLGYRLSRPEPMWAELLALAASAQGRVYRAEDPHGALRGLFEVRGLLAKDLAVVALREGLDLPPTDDPMLLAYLLDPSNTTPEGVARRYGGEWTEDAAKRALLAERLHENLLGRLQGEERLLWLYEEVEKPLSRVLAHMEATGVKLDVAYLENLSLEVAAHMRRLEEEVFRLAGRSFRLNSRDQLERVLFDELGLPPIGKTEKTGKRSTSAAVLEALREVHPIVDKILQYREMAKLKGTYIDRLPALVHPKTGRLHTRFNQTATATGRLSSSDPNLQNIPVRTPLGQKIRRAFVAEEGWRLVALDYRQIELRVLAHLSGDENLIRVFQEGKDIHTQTASWMFGLSAEAIDPLMRRAAKTINFGVLYGMSAFRLSQELGIPYEEAQAFIQKYFQSYPKVKAWIEKTLREGRTRGYVETLFGRRRYVPDLNARVKVKREAAERMAFNMPVQGTAADLMKLAMVRLFPQLREVGARMLLQVHDELLLEAPKERAEEVAALAKEVMEGVWPLAVPLEVEVGIGEDWLAAKG

SEQ ID NO: 5785 - DNA, 2523 bp, synthetic construct
  misc_feature 1..2523: note = Variant of DNA polymerase I from Thermus sp. strain 2.9
  source 1..2523: mol_type = other DNA
atgcaccatcatcatcatcatggcggtagcggcgtgttaccggtgttcgagcctaaaggtcgcgtgcttctggttgatggccatcatctcgcgtatcgtaacttctttgccctgaaaggattaaccaccagcctgggcgagccggtacagggtgtctacggctttgcaaagtcgctcctgaaagctctgaaagaagacggtgatgtggtgattgttgtctttgatgcgaaagcgccaagttttcgccacgaagcgtacgaagcttacaaagccgggcgtgctccaacgccggaagactttcctcgccaattggcgcttatgaaggaattagtggatttgcttggcctcgaacgcttggaagttcccggtttcgaggcagacgacgtattagcgactctcgcaaagaaagccgaacgtgagggctatgaagtccagatcttgacagcagatcgcgatcttttccagcttttatctccgcgcatctcggtgttacacccggaagggcatcgtatcaccccggaatggctctgggagaaatatggtttgcgtcccgaacaatgggtggattttcgcgccttagcaggcgatccgagcgacaatattccgggagttaaaggtatcggcgagaagacggcgctcaagctccttaaagaatgggggtcgttggagaacttgcttaagaatttagatcaggtcaaaccagagtcagtgcgtgagaagattcttgctcacctcgaagacctcaaattaagccgcgaattgtcccgtgtacgcaccgatttgccgctcgaagttgatttcggtcgccgccgcgaacctgactgggagggtcttaaagcgtttttagagcgtcttgaatttggttcgctcttgcatgaattcggccttttagaaagcccgttactggccgaagaagcaccttggccaccgcccgagggcgcgtttttaggttaccgtttgagtcgcccggaaccgatgtgggccgaattactggctcttgcagcgtctgcccagggacgtgtgtatcgcgcggaagaccctcatggtgcgctccgcggcctcttcgaagtccgtggactccttgccaaagacttagctgttgttgcattgcgcgaaggtcttgatttacctccgactgatgatccaatgcttcttgcgtacctcttggacccgtcaaacacgacgcccgaaggcgtagcccgtcgttacggcggcgagtggaccgaagatgcagcgaaacgcgcgttattggccgaacgtttgcacgaaaatttattaggacgtttgcaaggcgaggaacgtctcctctggctttacgaagaagtggagaaaccattgagtcgcgtgctcgcgcatatggaagctaccggtgtcaaattagacgtggcgtatttggagaatctcagccttgaagttgctgcccacatgcgccgcttggaggaagaagtattccgtttagcaggccgttcctttcgccttaactctcgcgatcagttagaacgtgtgttgttcgatgaacttggtctccctcctatcggcaagacagagaagaccggtaaacgtagcacttcagcggcggttttagaagctcttcgcgaagtccatcccattgtggacaagatcttgcagtaccgcgaaatggcgaaattgaaaggcacctatattgaccgtcttccggcattagtccacccgaaaacgggacgcctccatacccgcttcaaccaaacagccacggcgaccggtcgtttgtcctcctctgatccaaaccttcagaatattccagtacgtaccccattgggccagaagatccgccgtgcgtttgtagctgaggagggttggcgtttagtggccctcgattatcgtcaaattgaattacgtgtccttgcccatctttctggcgatgagaacctcatccgcgtgtttcaggaaggcaaagacattcacactcaaacggcaagctggatgtttggattatcagctgaagcgatcgatcctttgatgcgtcgtgcagcgaagaccatcaatttcggtgttctctacggtatgagtgcctttcgtttgtcgcaggaattaggcattccctatgaagaagctcaggcgttcattcagaaatactttcaaagctatcccaaagttaaagcatggatcgagaagactctccgtgaaggccgcttgcgtggttacgtagagaccttatttggacgtcgccgctatgttcccgatttaaacgctcgcgtgaaaggcaagcgtgaagccgccgaacgcatggcgttcaacatgcctgtacagggcacggcagctgacctcatgaaacttgcaatggtgcgcctttttccacaattgcgtgaagttggtgcccgcatgctcttgcaggtccacgatgaactcttgttagaagcgccaaaagagcgtgcggaagaggtggcagccctcgcgaaagaagttatggaaggcgtgtggcccttagcggtgcctcttgaagtcgaagttggtattggcgaggattggctggctgccaaagga

SEQ ID NO: 5786 - protein, 841 aa, synthetic construct
  REGION 1..841: note = Variant of DNA polymerase I from Thermus sp. strain 2.9
MHHHHHHGGSGVLPVFEPKGRVLLVDGHHLAYRNFFALKGLTTSLGEPVQGVYGFAKSLLKALKEDGDVVIVVFDAKAPSFRHEAYEAYKAGRAPTPEDFPRQLALMKELVDLLGLERLEVPGFEADDVLATLAKKAEREGYEVQILTADRDLFQLLSPRISVLHPEGHRITPEWLWEKYGLRPEQWVDFRALAGDPSDNIPGVKGIGEKTALKLLKEWGSLENLLKNLDQVKPESVREKILAHLEDLKLSRELSRVRTDLPLEVDFGRRREPDWEGLKAFLERLEFGSLLHEFGLLESPLLAEEAPWPPPEGAFLGYRLSRPEPMWAELLALAASAQGRVYRAEDPHGALRGLFEVRGLLAKDLAVVALREGLDLPPTDDPMLLAYLLDPSNTTPEGVARRYGGEWTEDAAKRALLAERLHENLLGRLQGEERLLWLYEEVEKPLSRVLAHMEATGVKLDVAYLENLSLEVAAHMRRLEEEVFRLAGRSFRLNSRDQLERVLFDELGLPPIGKTEKTGKRSTSAAVLEALREVHPIVDKILQYREMAKLKGTYIDRLPALVHPKTGRLHTRFNQTATATGRLSSSDPNLQNIPVRTPLGQKIRRAFVAEEGWRLVALDYRQIELRVLAHLSGDENLIRVFQEGKDIHTQTASWMFGLSAEAIDPLMRRAAKTINFGVLYGMSAFRLSQELGIPYEEAQAFIQKYFQSYPKVKAWIEKTLREGRLRGYVETLFGRRRYVPDLNARVKGKREAAERMAFNMPVQGTAADLMKLAMVRLFPQLREVGARMLLQVHDELLLEAPKERAEEVAALAKEVMEGVWPLAVPLEVEVGIGEDWLAAKG

SEQ ID NO: 5787 - DNA, 2523 bp, synthetic construct
  misc_feature 1..2523: note = Variant of DNA polymerase I from Thermus sp. strain 2.9
  source 1..2523: mol_type = other DNA
atgcaccatcatcatcatcatggcggtagcggcgtgttaccggtgttcgagcctaaaggtcgcgtgcttctggttgatggccatcatctcgcgtatcgtaacttctttgccctgaaaggattaaccaccagcctgggcgagccggtacagggtgtctacggctttgcaaagtcgctcctgaaagctctgaaagaagacggtgatgtggtgattgttgtctttgatgcgaaagcgccaagttttcgccacgaagcgtacgaagcttacaaagccgggcgtgctccaacgccggaagactttcctcgccaattggcgcttatgaaggaattagtggatttgcttggcctcgaacgcttggaagttcccggtttcgaggcagacgacgtattagcgactctcgcaaagaaagccgaacgtgagggctatgaagtccagatcttgacagcagatcgcgatcttttccagcttttatctccgcgcatctcggtgttacacccggaagggcatcgtatcaccccggaatggctctgggagaaatatggtttgcgtcccgaacaatgggtggattttcgcgccttagcaggcgatccgagcgacaatattccgggagttaaaggtatcggcgagaagacggcgctcaagctccttaaagaatgggggtcgttggagaacttgcttaagaatttagatcaggtcaaaccagagtcagtgcgtgagaagattcttgctcacctcgaagacctcaaattaagccgcgaattgtcccgtgtacgcaccgatttgccgctcgaagttgatttcggtcgccgccgcgaacctgactgggagggtcttaaagcgtttttagagcgtcttgaatttggttcgctcttgcatgaattcggccttttagaaagcccgttactggccgaagaagcaccttggccaccgcccgagggcgcgtttttaggttaccgtttgagtcgcccggaaccgatgtgggccgaattactggctcttgcagcgtctgcccagggacgtgtgtatcgcgcggaagaccctcatggtgcgctccgcggcctcttcgaagtccgtggactccttgccaaagacttagctgttgttgcattgcgcgaaggtcttgatttacctccgactgatgatccaatgcttcttgcgtacctcttggacccgtcaaacacgacgcccgaaggcgtagcccgtcgttacggcggcgagtggaccgaagatgcagcgaaacgcgcgttattggccgaacgtttgcacgaaaatttattaggacgtttgcaaggcgaggaacgtctcctctggctttacgaagaagtggagaaaccattgagtcgcgtgctcgcgcatatggaagctaccggtgtcaaattagacgtggcgtatttggagaatctcagccttgaagttgctgcccacatgcgccgcttggaggaagaagtattccgtttagcaggccgttcctttcgccttaactctcgcgatcagttagaacgtgtgttgttcgatgaacttggtctccctcctatcggcaagacagagaagaccggtaaacgtagcacttcagcggcggttttagaagctcttcgcgaagtccatcccattgtggacaagatcttgcagtaccgcgaaatggcgaaattgaaaggcacctatattgaccgtcttccggcattagtccacccgaaaacgggacgcctccatacccgcttcaaccaaacagccacggcgaccggtcgtttgtcctcctctgatccaaaccttcagaatattccagtacgtaccccattgggccagaagatccgccgtgcgtttgtagctgaggagggttggcgtttagtggccctcgattatcgtcaaattgaattacgtgtccttgcccatctttctggcgatgagaacctcatccgcgtgtttcaggaaggcaaagacattcacactcaaacggcaagctggatgtttggattatcagctgaagcgatcgatcctttgatgcgtcgtgcagcgaagaccatcaatttcggtgttctctacggtatgagtgcctttcgtttgtcgcaggaattaggcattccctatgaagaagctcaggcgttcattcagaaatactttcaaagctatcccaaagttaaagcatggatcgagaagactctccgtgaaggccgcacacgtggttacgtagagaccttatttggacgtcgccgctatgttcccgatttaaacgctcgcgtgaaaggcaagcgtgaagccgccgaacgcatggcgttcaacatgcctgtacagggcacggcagctgacctcatgaaacttgcaatggtgcgcctttttccacaattgcgtgaagttggtgcccgcatgctcttgcaggtccacgatgaactcttgttagaagcgccaaaagagcgtgcggaagaggtggcagccctcgcgaaagaagttatgtttggcgtgtggcccttagcggtgcctcttgaagtcgaagttggtattggcgaggattggctggctgccaaagga

SEQ ID NO: 5788 - protein, 841 aa, synthetic construct
  REGION 1..841: note = Variant of DNA polymerase I from Thermus sp. strain 2.9
MHHHHHHGGSGVLPVFEPKGRVLLVDGHHLAYRNFFALKGLTTSLGEPVQGVYGFAKSLLKALKEDGDVVIVVFDAKAPSFRHEAYEAYKAGRAPTPEDFPRQLALMKELVDLLGLERLEVPGFEADDVLATLAKKAEREGYEVQILTADRDLFQLLSPRISVLHPEGHRITPEWLWEKYGLRPEQWVDFRALAGDPSDNIPGVKGIGEKTALKLLKEWGSLENLLKNLDQVKPESVREKILAHLEDLKLSRELSRVRTDLPLEVDFGRRREPDWEGLKAFLERLEFGSLLHEFGLLESPLLAEEAPWPPPEGAFLGYRLSRPEPMWAELLALAASAQGRVYRAEDPHGALRGLFEVRGLLAKDLAVVALREGLDLPPTDDPMLLAYLLDPSNTTPEGVARRYGGEWTEDAAKRALLAERLHENLLGRLQGEERLLWLYEEVEKPLSRVLAHMEATGVKLDVAYLENLSLEVAAHMRRLEEEVFRLAGRSFRLNSRDQLERVLFDELGLPPIGKTEKTGKRSTSAAVLEALREVHPIVDKILQYREMAKLKGTYIDRLPALVHPKTGRLHTRFNQTATATGRLSSSDPNLQNIPVRTPLGQKIRRAFVAEEGWRLVALDYRQIELRVLAHLSGDENLIRVFQEGKDIHTQTASWMFGLSAEAIDPLMRRAAKTINFGVLYGMSAFRLSQELGIPYEEAQAFIQKYFQSYPKVKAWIEKTLREGRTRGYVETLFGRRRYVPDLNARVKGKREAAERMAFNMPVQGTAADLMKLAMVRLFPQLREVGARMLLQVHDELLLEAPKERAEEVAALAKEVMFGVWPLAVPLEVEVGIGEDWLAAKG

SEQ ID NO: 5789 - DNA, 2523 bp, synthetic construct
  misc_feature 1..2523: note = Variant of DNA polymerase I from Thermus sp. strain 2.9
  source 1..2523: mol_type = other DNA
atgcaccatcatcatcatcatggcggtagcggcgtgttaccggtgttcgagcctaaaggtcgcgtgcttctggttgatggccatcatctcgcgtatcgtaacttctttgccctgaaaggattaaccaccagcctgggcgagccggtacagggtgtctacggctttgcaaagtcgctcctgaaagctctgaaagaagacggtgatgtggtgattgttgtctttgatgcgaaagcgccaagttttcgccacgaagcgtacgaagcttacaaagccgggcgtgctccaacgccggaagactttcctcgccaattggcgcttatgaaggaattagtggatttgcttggcctcgaacgcttggaagttcccggtttcgaggcagacgacgtattagcgactctcgcaaagaaagccgaacgtgagggctatgaagtccagatcttgacagcagatcgcgatcttttccagcttttatctccgcgcatctcggtgttacacccggaagggcatcgtatcaccccggaatggctctgggagaaatatggtttgcgtcccgaacaatgggtggattttcgcgccttagcaggcgatccgagcgacaatattccgggagttaaaggtatcggcgagaagacggcgctcaagctccttaaagaatgggggtcgttggagaacttgcttaagaatttagatcaggtcaaaccagagtcagtgcgtgagaagattcttgctcacctcgaagacctcaaattaagccgcgaattgtcccgtgtacgcaccgatttgccgctcgaagttgatttcggtcgccgccgcgaacctgactgggagggtcttaaagcgtttttagagcgtcttgaatttggttcgctcttgcatgaattcggccttttagaaagcccgttactggccgaagaagcaccttggccaccgcccgagggcgcgtttttaggttaccgtttgagtcgcccggaaccgatgtgggccgaattactggctcttgcagcgtctgcccagggacgtgtgtatcgcgcggaagaccctcatggtgcgctccgcggcctcttcgaagtccgtggactccttgccaaagacttagctgttgttgcattgcgcgaaggtcttgatttacctccgactgatgatccaatgcttcttgcgtacctcttggacccgtcaaacacgacgcccgaaggcgtagcccgtcgttacggcggcgagtggaccgaagatgcagcgaaacgcgcgttattggccgaacgtttgcacgaaaatttattaggacgtttgcaaggcgaggaacgtctcctctggctttacgaagaagtggagaaaccattgagtcgcgtgctcgcgcatatggaagctaccggtgtcaaattagacgtggcgtatttggagaatctcagccttgaagttgctgcccacatgcgccgcttggaggaagaagtattccgtttagcaggccgttcctttcgccttaactctcgcgatcagttagaacgtgtgttgttcgatgaacttggtctccctcctatcggcaagacagagaagaccggtaaacgtagcacttcagcggcggttttagaagctcttcgcgaagtccatcccattgtggacaagatcttgcagtaccgcgaaatggcgccgttgaaaggcacctatattgaccgtcttccggcattagtccacccgaaaacgggacgcctccatacccgcttcaaccaaacagccacggcgaccggtcgtttgtcctcctctgatccaaaccttcagaatattccagtacgtaccccattgggccagaagatccgccgtgcgtttgtagctgaggagggttggcgtttagtggccctcgattatcgtcaaattgaattacgtgtccttgcccatctttctggcgatgagaacctcatccgcgtgtttcaggaaggcaaagacattcacactcaaacggcaagctggatgtttggattatcagctgaagcgatcgatcctttgatgcgtcgtgcagcgaagaccatcaatttcggtgttctctacggtatgagtgcctttcgtttgtcgcaggaattaggcattccctatgaagaagctcaggcgttcattcagaaatactttcaaagctatcccaaagttaaagcatggatcgagaagactctccgtgaaggccgcacacgtggttacgtagagaccttatttggacgtcgccgctatgttcccgatttaaacgctcgcgtgaaaggcaagcgtgaagccgccgaacgcatggcgttcaacatgcctgtacagggcacggcagctgacctcatgaaacttgcaatggtgcgcctttttccacaattgcgtgaagttggtgcccgcatgctcttgcaggtccacgatgaactcttgttagaagcgccaaaagagcgtgcggaagaggtggcagccctcgcgaaagaagttatggaaggcgtgtggcccttagcggtgcctcttgaagtcgaagttggtattggcgaggattggctggctgccaaagga

SEQ ID NO: 5790 - protein, 841 aa, synthetic construct
  REGION 1..841: note = Variant of DNA polymerase I from Thermus sp. strain 2.9
MHHHHHHGGSGVLPVFEPKGRVLLVDGHHLAYRNFFALKGLTTSLGEPVQGVYGFAKSLLKALKEDGDVVIVVFDAKAPSFRHEAYEAYKAGRAPTPEDFPRQLALMKELVDLLGLERLEVPGFEADDVLATLAKKAEREGYEVQILTADRDLFQLLSPRISVLHPEGHRITPEWLWEKYGLRPEQWVDFRALAGDPSDNIPGVKGIGEKTALKLLKEWGSLENLLKNLDQVKPESVREKILAHLEDLKLSRELSRVRTDLPLEVDFGRRREPDWEGLKAFLERLEFGSLLHEFGLLESPLLAEEAPWPPPEGAFLGYRLSRPEPMWAELLALAASAQGRVYRAEDPHGALRGLFEVRGLLAKDLAVVALREGLDLPPTDDPMLLAYLLDPSNTTPEGVARRYGGEWTEDAAKRALLAERLHENLLGRLQGEERLLWLYEEVEKPLSRVLAHMEATGVKLDVAYLENLSLEVAAHMRRLEEEVFRLAGRSFRLNSRDQLERVLFDELGLPPIGKTEKTGKRSTSAAVLEALREVHPIVDKILQYREMAPLKGTYIDRLPALVHPKTGRLHTRFNQTATATGRLSSSDPNLQNIPVRTPLGQKIRRAFVAEEGWRLVALDYRQIELRVLAHLSGDENLIRVFQEGKDIHTQTASWMFGLSAEAIDPLMRRAAKTINFGVLYGMSAFRLSQELGIPYEEAQAFIQKYFQSYPKVKAWIEKTLREGRTRGYVETLFGRRRYVPDLNARVKGKREAAERMAFNMPVQGTAADLMKLAMVRLFPQLREVGARMLLQVHDELLLEAPKERAEEVAALAKEVMEGVWPLAVPLEVEVGIGEDWLAAKG

SEQ ID NO: 5791 - DNA, 2523 bp, synthetic construct
  misc_feature 1..2523: note = Variant of DNA polymerase I from Thermus sp. strain 2.9
  source 1..2523: mol_type = other DNA
atgcaccatcatcatcatcatggcggtagcggcgtgttaccggtgttcgagcctaaaggtcgcgtgcttctggttgatggccatcatctcgcgtatcgtaacttctttgccctgaaaggattaaccaccagcctgggcgagccggtacagggtgtctacggctttgcaaagtcgctcctgaaagctctgaaagaagacggtgatgtggtgattgttgtctttgatgcgaaagcgccaagttttcgccacgaagcgtacgaagcttacaaagccgggcgtgctccaacgccggaagactttcctcgccaattggcgcttatgaaggaattagtggatttgcttggcctcgaacgcttggaagttcccggtttcgaggcagacgacgtattagcgactctcgcaaagaaagccgaacgtgagggctatgaagtccagatcttgacagcagatcgcgatcttttccagcttttatctccgcgcatctcggtgttacacccggaagggcatcgtatcaccccggaatggctctgggagaaatatggtttgcgtcccgaacaatgggtggattttcgcgccttagcaggcgatccgagcgacaatattccgggagttaaaggtatcggcgagaagacggcgctcaagctccttaaagaatgggggtcgttggagaacttgcttaagaatttagatcaggtcaaaccagagtcagtgcgtgagaagattcttgctcacctcgaagacctcaaattaagccgcgaattgtcccgtgtacgcaccgatttgccgctcgaagttgatttcggtcgccgccgcgaacctgactgggagggtcttaaagcgtttttagagcgtcttgaatttggttcgctcttgcatgaattcggccttttagaaagcccgttactggccgaagaagcaccttggccaccgcccgagggcgcgtttttaggttaccgtttgagtcgcccggaaccgatgtgggccgaattactggctcttgcagcgtctgcccagggacgtgtgtatcgcgcggaagaccctcatggtgcgctccgcggcctcttcgaagtccgtggactccttgccaaagacttagctgttgttgcattgcgcgaaggtcttgatttacctccgactgatgatccaatgcttcttgcgtacctcttggacccgtcaaacacgacgcccgaaggcgtagcccgtcgttacggcggcgagtggaccgaagatgcagcgaaacgcgcgttattggccgaacgtttgcacgaaaatttattaggacgtttgcaaggcgaggaacgtctcctctggctttacgaagaagtggagaaaccattgagtcgcgtgctcgcgcatatggaagctaccggtgtcaaattagacgtggcgtatttggagaatctcagccttgaagttgctgcccacatgcgccgcttggaggaagaagtattccgtttagcaggccgttcctttcgccttaactctcgcgatcagttagaacgtgtgttgttcgatgaacttggtctccctcctatcggcaagacagagaagaccggtaaacgtagcacttcagcggcggttttagaagctcttcgcgaagtccatcccattgtggacaagatcttgcagtaccgcgaaatggcgaaattgaaaggcacctatattgaccgtcttccggcattagtccacccgaaaacgggacgcctccatacccgcttcaaccaaacagccacggcgaccggtcgtttgtcctcctctgatccaaaccttcagaatattccagtacgtaccccattgggccagaagatccgccgtgcgtttgtagctgaggagggttggcgtttagtggccctcgattatcgtcaaattgaattacgtgtccttgcccatctttctggcgatgagaacctcatccgcgtgtttcaggaaggcaaagacattcacactcaaacggcaagctggatgtttggattatcagctgaagcgatcgatcctttgatgcgtcgtgcagcgaagaccatcaatttcggtgttctctacggtatgagtgcctttcgtttgtcgcaggaattaggcattccctatgaagaagctcaggcgttcattcagaaatactttcaaagctatcccaaagttaaagcatggatcgagaagactctccgtgaaggccgcacacgtggttacgtagagaccttatttggacgtcgccgctatgttcccgatttaaacgctcgcgtgaaaggcaagcgtgaagccgccgaacgcatggcgttcaacatgcctgtacagggcacggcagctgacctcatgaaacttgcaatggtgcgcgcgtttccacaattgcgtgaagttggtgcccgcatgctcttgcaggtccacgatgaactcttgttagaagcgccaaaagagcgtgcggaagaggtggcagccctcgcgaaagaagttatggaaggcgtgtggcccttagcggtgcctcttgaagtcgaagttggtattggcgaggattggctggctgccaaagga

SEQ ID NO: 5792 - protein, 841 aa, synthetic construct
  REGION 1..841: note = Variant of DNA polymerase I from Thermus sp. strain 2.9
MHHHHHHGGSGVLPVFEPKGRVLLVDGHHLAYRNFFALKGLTTSLGEPVQGVYGFAKSLLKALKEDGDVVIVVFDAKAPSFRHEAYEAYKAGRAPTPEDFPRQLALMKELVDLLGLERLEVPGFEADDVLATLAKKAEREGYEVQILTADRDLFQLLSPRISVLHPEGHRITPEWLWEKYGLRPEQWVDFRALAGDPSDNIPGVKGIGEKTALKLLKEWGSLENLLKNLDQVKPESVREKILAHLEDLKLSRELSRVRTDLPLEVDFGRRREPDWEGLKAFLERLEFGSLLHEFGLLESPLLAEEAPWPPPEGAFLGYRLSRPEPMWAELLALAASAQGRVYRAEDPHGALRGLFEVRGLLAKDLAVVALREGLDLPPTDDPMLLAYLLDPSNTTPEGVARRYGGEWTEDAAKRALLAERLHENLLGRLQGEERLLWLYEEVEKPLSRVLAHMEATGVKLDVAYLENLSLEVAAHMRRLEEEVFRLAGRSFRLNSRDQLERVLFDELGLPPIGKTEKTGKRSTSAAVLEALREVHPIVDKILQYREMAKLKGTYIDRLPALVHPKTGRLHTRFNQTATATGRLSSSDPNLQNIPVRTPLGQKIRRAFVAEEGWRLVALDYRQIELRVLAHLSGDENLIRVFQEGKDIHTQTASWMFGLSAEAIDPLMRRAAKTINFGVLYGMSAFRLSQELGIPYEEAQAFIQKYFQSYPKVKAWIEKTLREGRTRGYVETLFGRRRYVPDLNARVKGKREAAERMAFNMPVQGTAADLMKLAMVRAFPQLREVGARMLLQVHDELLLEAPKERAEEVAALAKEVMEGVWPLAVPLEVEVGIGEDWLAAKG

SEQ ID NO: 5793 - DNA, 2523 bp, synthetic construct
  misc_feature 1..2523: note = Variant of DNA polymerase I from Thermus sp. strain 2.9
  source 1..2523: mol_type = other DNA
atgcaccatcatcatcatcatggcggtagcggcgtgttaccggtgttcgagcctaaaggtcgcgtgcttctggttgatggccatcatctcgcgtatcgtaacttctttgccctgaaaggattaaccaccagccgcggcgagccggtacagggtgtctacggctttgcaaagtcgctcctgaaagctctgaaagaagacggtgatgtggtgattgttgtctttgatgcgaaagcgccaagttttcgccacgaagcgtacgaagcttacaaagccgggcgtgctccaacgccggaagactttcctcgccaattggcgcttatgaaggaattagtggatttgcttggcctcgaacgcttggaagttcccggtttcgaggcagacgacgtattagcgactctcgcaaagaaagccgaacgtgagggctatgaagtccagatcttgacagcagatcgcgatcttttccagcttttatctccgcgcatctcggtgttacacccggaagggcatcgtatcaccccggaatggctctgggagaaatatggtttgcgtcccgaacaatgggtggattttcgcgccttagcaggcgatccgagcgacaatattccgggagttaaaggtatcggcgagaagacggcgctcaagctccttaaagaatgggggtcgttggagaacttgcttaagaatttagatcaggtcaaaccagagtcagtgcgtgagaagattcttgctcacctcgaagacctcaaattaagccgcgaattgtcccgtgtacgcaccgatttgccgctcgaagttgatttcggtcgccgccgcgaacctgactgggagggtcttaaagcgtttttagagcgtcttgaatttggttcgctcttgcatgaattcggccttttagaaagcccgttactggccgaagaagcaccttggccaccgcccgagggcgcgtttttaggttaccgtttgagtcgcccggaaccgatgtgggccgaattactggctcttgcagcgtctgcccagggacgtgtgtatcgcgcggaagaccctcatggtgcgctccgcggcctcttcgaagtccgtggactccttgccaaagacttagctgttgttgcattgcgcgaaggtcttgatttacctccgactgatgatccaatgcttcttgcgtacctcttggacccgtcaaacacgacgcccgaaggcgtagcccgtcgttacggcggcgagtggaccgaagatgcagcgaaacgcgcgttattggccgaacgtttgcacgcaaatttattaggacgtttgcaaggcgaggaacgtctcctctggctttacgaagaagtggagaaaccattgagtcgcgtgctcgcgcatatggaagctaccggtgtcaaattagacgtggcgtatttggaggcccttagccttgaagttgctgcccacatgcgccgcttggaggaagaagtattccgtttagcaggccgttcctttcgccttaactctcgcgatcagttagaacgtgtgttgttcgatgaacttggtctccctcctatcggcaagacagagaagaccggtaaacgtagcacttcagcggcggttttagaagctcttcgcgaagtccatcccattgtggacaagatcttgcagtaccgcgaaatggcgaaattgaaaggcacctatattgaccgtcttccggcattagtccacccgaaaacgggacgcctccatacccgcttcaaccaaacagccacggcgaccggtcgtttgtcctcctctgatccaaaccttcagaatattccagtacgtaccccattgggccagaagatccgccgtgcgtttgtagctgaggagggttggcgtttagtggccctcgattatcgtcaaattgaattacgtgtccttgcccatctttctggcgatgagaacctcatccgcgtgtttcaggaaggcaaagacattcacactcaaacggcaagctggatgtttggattatcagctgaagcgatcgatcctttgatgcgtcgtgcagcgaagaccatcaatttcggtgttctctacggtatgagtgcctttcgtttgtcgcaggaattaggcattccctatgaagaagctcaggcgttcattcagaaatactttcaaagctatcccaaagttaaagcatggatcgagaagactctccgcgaaggccgcacacgtggttacgtagagaccttatttggacgtcgccgctatgttcccgatttaaacgctcgcgtgaaaggcaagcgtgaagccgccgaacgcatggcgttcaacatgcctgtacagggcacggcagctgacctcatgaaacttgcaatggtgcgcctttttccacaattgcgtgaagttggtgcccgcatgctcttgcaggtccacgatgaactcttgttagaagcgccaaaagagcgtgcggaagaggtggcagccctcgcgaaagaagttatggaaggcgtgtggcccttagcggtgcctcttgaagtcgaagttggtattggcgaggattggctggctgccaaagga

SEQ ID NO: 5794 - protein, 841 aa, synthetic construct
  REGION 1..841: note = Variant of DNA polymerase I from Thermus sp. strain 2.9
MHHHHHHGGSGVLPVFEPKGRVLLVDGHHLAYRNFFALKGLTTSRGEPVQGVYGFAKSLLKALKEDGDVVIVVFDAKAPSFRHEAYEAYKAGRAPTPEDFPRQLALMKELVDLLGLERLEVPGFEADDVLATLAKKAEREGYEVQILTADRDLFQLLSPRISVLHPEGHRITPEWLWEKYGLRPEQWVDFRALAGDPSDNIPGVKGIGEKTALKLLKEWGSLENLLKNLDQVKPESVREKILAHLEDLKLSRELSRVRTDLPLEVDFGRRREPDWEGLKAFLERLEFGSLLHEFGLLESPLLAEEAPWPPPEGAFLGYRLSRPEPMWAELLALAASAQGRVYRAEDPHGALRGLFEVRGLLAKDLAVVALREGLDLPPTDDPMLLAYLLDPSNTTPEGVARRYGGEWTEDAAKRALLAERLHANLLGRLQGEERLLWLYEEVEKPLSRVLAHMEATGVKLDVAYLEALSLEVAAHMRRLEEEVFRLAGRSFRLNSRDQLERVLFDELGLPPIGKTEKTGKRSTSAAVLEALREVHPIVDKILQYREMAKLKGTYIDRLPALVHPKTGRLHTRFNQTATATGRLSSSDPNLQNIPVRTPLGQKIRRAFVAEEGWRLVALDYRQIELRVLAHLSGDENLIRVFQEGKDIHTQTASWMFGLSAEAIDPLMRRAAKTINFGVLYGMSAFRLSQELGIPYEEAQAFIQKYFQSYPKVKAWIEKTLREGRTRGYVETLFGRRRYVPDLNARVKGKREAAERMAFNMPVQGTAADLMKLAMVRLFPQLREVGARMLLQVHDELLLEAPKERAEEVAALAKEVMEGVWPLAVPLEVEVGIGEDWLAAKG

SEQ ID NO: 5795 - DNA, 2523 bp, synthetic construct
  misc_feature 1..2523: note = Variant of DNA polymerase I from Thermus sp. strain 2.9
  source 1..2523: mol_type = other DNA
atgcaccatcatcatcatcatggcggtagcggcgtgttaccggtgttcgagcctaaaggtcgcgtgcttctggttgatggccatcatctcgcgtatcgtaacttctttgccctgaaaggattaaccaccagcctgggcgagccggtacagggtgtctacggctttgcaaagtcgctcctgaaagctctgaaagaagacggtgatgtggtgattgttgtctttgatgcgaaagcgccaagttttcgccacgaagcgtacgaagcttacaaagccgggcgtgctccaacgccggaagactttcctcgccaattggcgcttatgaaggaattagtggatttgcttggcctcgaacgcttggaagttcccggtttcgaggcagacgacgtattagcgactctcgcaaagaaagccgaacgtgagggctatgaagtccagatcttgacagcagatcgcgatcttttccagcttttatctccgcgcatctcggtgttacacccggaagggcatcgtatcaccccggaatggctctgggagaaatatggtttgcgtcccgaacaatgggtggattttcgcgccttagcaggcgatccgagcgacaatattccgggagttaaaggtatcggcgagaagacggcgctcaagctccttaaagaatgggggtcgttggagaacttgcttaagaatttagatcaggtcaaaccagagtcagtgcgtgagaagattcttgctcacctcgaagacctcaaattaagccgcgaattgtcccgtgtacgcaccgatttgccgctcgaagttgatttcggtcgccgccgcgaacctgactgggagggtcttaaagcgtttttagagcgtcttgaatttggttcgctcttgcatgaattcggccttttagaaagcccgttactggccgaagaagcaccttggccaccgcccgagggcgcgtttttaggttaccgtttgagtcgcccggaaccgatgtgggccgaattactggctcttgcagcgtctgcccagggacgtgtgtatcgcgcggaagaccctcatggtgcgctccgcggcctcttcgaagtccgtaccctccttgccaaagacttagctgttgttgcattgcgcgaaggtcttgatttacctccgactgatgatccaatgcttcttgcgtacctcttggacccgtcaaacacgacgcccgaaggcgtagcccgtcgttacggcggcgagtggtgggaagatgcagccaaacgcgcgttattggccgaacgtttgcacgaaaatttattaggacgtttgcaaggcgaggaacgtctcctctggctttacgaagaagtggagaaaccattgagtcgcgtgctcgcgcatatggaagctaccggtgtcaaattagacgtggcgtatttggagaatctcagccttgaagttgctgcccacatgcgccgcttggaggaagaagtattccgtttagcaggccgttcctttcgccttaactctcgcgatcagttagaacgtgtgttgttcgatgaacttggtctccctcctatcggcaagacagagaagaccggtaaacgtagcacttcagcggcggttttagaagctcttcgcgaagtccatcccattgtggacaagatcttgcagtaccgcgaaatggcgaaattgaaaggcacctatattgaccgtcttccggcattagtccacccgaaaacgggacgcctccatacccgcttcaaccaaacagccacggcgaccggtcgtttgtcctcctctgatccaaaccttcagaatattccagtacgtaccccattgggccagaagatccgccgtgcgtttgtagctgagaagggttgggcgttagtggccctcgattatcgtcaaattgaattacgtgtccttgcccatctttctggcgatgagaacctcatccgcgtgtttcaggaaggcaaagacattcacactcaaacggcaagctggatgtttggattatcagctgaagcgatcgatcctttgatgcgtcgtgcagcgaagaccatcaatttcggtgttctctacggtatgagtgcctttcgtttgtcgcaggaattaggcattccctatgaagaagctcaggctttcattcagaaatactttcaaagctatcccaaagttaaagcatggatcgagaagactctccgtgaaggccgcacacgtggttacgtagagaccttatttggacgtcgccgctatgttcccgatttaaacggtcgcgtgaaaggcaagcgtgaagccgccgaacgcatggcgttcaacatgcctgtacagggcacggcagctgacctcatgaaacttgcaatggtgcgcctttttccacaattgcgtgaagttggtgcccgcatgctgttgcaggtccacgatgaactcttgttagaagcgccaaaagagcgtgcggaagaggtggcagccctcgcgaaagaagttatggaaggcgtgtggcccttagcggtgcctcttgaagtcgaagttggtattggcgaggattggctggctgccaaagga

SEQ ID NO: 5796 - protein, 841 aa, synthetic construct
  REGION 1..841: note = Variant of DNA polymerase I from Thermus sp. strain 2.9
MHHHHHHGGSGVLPVFEPKGRVLLVDGHHLAYRNFFALKGLTTSLGEPVQGVYGFAKSLLKALKEDGDVVIVVFDAKAPSFRHEAYEAYKAGRAPTPEDFPRQLALMKELVDLLGLERLEVPGFEADDVLATLAKKAEREGYEVQILTADRDLFQLLSPRISVLHPEGHRITPEWLWEKYGLRPEQWVDFRALAGDPSDNIPGVKGIGEKTALKLLKEWGSLENLLKNLDQVKPESVREKILAHLEDLKLSRELSRVRTDLPLEVDFGRRREPDWEGLKAFLERLEFGSLLHEFGLLESPLLAEEAPWPPPEGAFLGYRLSRPEPMWAELLALAASAQGRVYRAEDPHGALRGLFEVRTLLAKDLAVVALREGLDLPPTDDPMLLAYLLDPSNTTPEGVARRYGGEWWEDAAKRALLAERLHENLLGRLQGEERLLWLYEEVEKPLSRVLAHMEATGVKLDVAYLENLSLEVAAHMRRLEEEVFRLAGRSFRLNSRDQLERVLFDELGLPPIGKTEKTGKRSTSAAVLEALREVHPIVDKILQYREMAKLKGTYIDRLPALVHPKTGRLHTRFNQTATATGRLSSSDPNLQNIPVRTPLGQKIRRAFVAEKGWALVALDYRQIELRVLAHLSGDENLIRVFQEGKDIHTQTASWMFGLSAEAIDPLMRRAAKTINFGVLYGMSAFRLSQELGIPYEEAQAFIQKYFQSYPKVKAWIEKTLREGRTRGYVETLFGRRRYVPDLNGRVKGKREAAERMAFNMPVQGTAADLMKLAMVRLFPQLREVGARMLLQVHDELLLEAPKERAEEVAALAKEVMEGVWPLAVPLEVEVGIGEDWLAAKG

SEQ ID NO: 5797 - DNA, 2523 bp, synthetic construct
  misc_feature 1..2523: note = Variant of DNA polymerase I from Thermus sp. strain 2.9
  source 1..2523: mol_type = other DNA
atgcaccatcatcatcatcatggcggtagcggcgtgttaccggtgttcgagcctaaaggtcgcgtgcttctggttgatggccatcatctcgcgtatcgtaacttctttgccctgaaaggattaaccaccagcctgggcgagccggtacagggtgtctacggctttgcaaagtcgctcctgaaagctctgaaagaagacggtgatgtggtgattgttgtctttgatgcgaaagcgccaagttttcgccacgaagcgtacgaagcttacaaagccgggcgtgctccaacgccggaagactttcctcgccaattggcgcttatgaaggaattagtggatttgcttggcctcgaacgcttggaagttcccggtttcgaggcagacgacgtattagcgactctcgcaaagaaagccgaacgtgagggctatgaagtccagatcttgacagcagatcgcgatcttttccagcttttatctccgcgcatctcggtgttacacccggaagggcatcgtatcaccccggaatggctctgggagaaatatggtttgcgtcccgaacaatgggtggattttcgcgccttagcaggcgatccgagcgacaatattccgggagttaaaggtatcggcgagaagacggcgctcaagctccttaaagaatgggggtcgttggagaacttgcttaagaatttagatcaggtcaaaccagagtcagtgcgtgagaagattcttgctcacctcgaagacctcaaattaagccgcgaattgtcccgtgtacgcaccgatttgccgctcgaagttgatttcggtcgccgccgcgaacctgactgggagggtcttaaagcgtttttagagcgtcttgaatttggttcgctcttgcatgaattcggccttttagaaagcccgttactggccgaagaagcaccttggccaccgcccgagggcgcgtttttaggttaccgtttgagtcgcccggaaccgatgtgggccgaattactggctcttgcagcgtctgcccagggacgtgtgtatcgcgcggaagaccctcatggtgcgctccgcggcctcttcgaagtccgtggactccttgccaaagacttagctgttgttgcattgcgcgaaggtcttgatttacctccgactgatgatccaatgcttcttgcgtacctcttggacccgtcaaacacgacgcccgaaggcgtagcccgtcgttacggcggcgagtggtgggaagatgcagccaaacgcgcgttattggccgaacgtttgcacgaaaatttattaggacgtttgcaaggcgaggaacgtctcctctggctttacgaagaagtggagaaaccattgagtcgcgtgctcgcgcatatggaagctaccggtgtcaaattagacgtggcgtatttggagaatctcagccttgaagttgctgcccacatgcgccgcttggaggaagaagtattccgtttagcaggccgttcctttcgccttaactctcgcgatcagttagaacgtgtgttgttcgatgaacttggtctccctcctatcggcaagacagagaagaccggtaaacgtagcacttcagcggcggttttagaagctcttcgcgaagtccatcccattgtggacaagatcttgcagtaccgcgaaatggcgaaattgaaaggcacctatattgaccgtcttccggcattagtccacccgaaaacgggacgcctccatacccgcttcaaccaaacagccacggcgaccggtcgtttgtcctcctctgatccaaaccttcagaatattccagtacgtaccccattgggccagaagatccgccgtgcgtttgtagctgagaagggttgggcgttagtggccctcgattatcgtcaaattgaattacgtgtccttgcccatctttctggcgatgagaacctcatccgcgtgtttcaggaaggcaaagacattcacactcaaacggcaagctggatgtttggattatcagctgaagcgatcgatcctttgatgcgtcgtgcagcgaagaccatcaatttcggtgttctctacggtatgagtgcctttcgtttgtcgcaggaattaggcattccctatgaagaagctcaggcgttcattcagaaatactttcaaagctatcccaaagttaaagcatggatcgagaagactctccgtgaaggccgcacacgtggttacgtagagaccttatttggacgtcgccgctatgttcccgatttaaacggtcgcgtgaaaggcaagcgtgaagccgccgaacgcatggcgttcaacatgcctgtacagggcacggcagctgacctcatgaaacttgcaatggtgcgcctttttccacaattgcgtgaagttggtgcccgcatgctcttgcaggtccacgatgaactcttgttagaagcgccaaaagagcgtgcggaagaggtggcagccctcgcgaaagaagttatggaaggcgtgtggcccttagcggtgcctcttgaagtcgaagttggtattggcgaggattggctggctgccaaagga

SEQ ID NO: 5798 - protein, 841 aa, synthetic construct
  REGION 1..841: note = Variant of DNA polymerase I from Thermus sp. strain 2.9
MHHHHHHGGSGVLPVFEPKGRVLLVDGHHLAYRNFFALKGLTTSLGEPVQGVYGFAKSLLKALKEDGDVVIVVFDAKAPSFRHEAYEAYKAGRAPTPEDFPRQLALMKELVDLLGLERLEVPGFEADDVLATLAKKAEREGYEVQILTADRDLFQLLSPRISVLHPEGHRITPEWLWEKYGLRPEQWVDFRALAGDPSDNIPGVKGIGEKTALKLLKEWGSLENLLKNLDQVKPESVREKILAHLEDLKLSRELSRVRTDLPLEVDFGRRREPDWEGLKAFLERLEFGSLLHEFGLLESPLLAEEAPWPPPEGAFLGYRLSRPEPMWAELLALAASAQGRVYRAEDPHGALRGLFEVRGLLAKDLAVVALREGLDLPPTDDPMLLAYLLDPSNTTPEGVARRYGGEWWEDAAKRALLAERLHENLLGRLQGEERLLWLYEEVEKPLSRVLAHMEATGVKLDVAYLENLSLEVAAHMRRLEEEVFRLAGRSFRLNSRDQLERVLFDELGLPPIGKTEKTGKRSTSAAVLEALREVHPIVDKILQYREMAKLKGTYIDRLPALVHPKTGRLHTRFNQTATATGRLSSSDPNLQNIPVRTPLGQKIRRAFVAEKGWALVALDYRQIELRVLAHLSGDENLIRVFQEGKDIHTQTASWMFGLSAEAIDPLMRRAAKTINFGVLYGMSAFRLSQELGIPYEEAQAFIQKYFQSYPKVKAWIEKTLREGRTRGYVETLFGRRRYVPDLNGRVKGKREAAERMAFNMPVQGTAADLMKLAMVRLFPQLREVGARMLLQVHDELLLEAPKERAEEVAALAKEVMEGVWPLAVPLEVEVGIGEDWLAAKG

SEQ ID NO: 5799 - DNA, 2523 bp, synthetic construct
  misc_feature 1..2523: note = Variant of DNA polymerase I from Thermus sp. strain 2.9
  source 1..2523: mol_type = other DNA
atgcaccatcatcatcatcatggcggtagcggcgtgttaccggtgttcgagcctaaaggtcgcgtgcttctggttgatggccatcatctcgcgtatcgtaacttctttgccctgaaaggattaaccaccagcctgggcgagccggtacagggtgtctacggctttgcaaagtcgctcctgaaagctctgaaagaagacggtgatgtggtgattgttgtctttgatgcgaaagcgccaagttttcgccacgaagcgtacgaagcttacaaagccgggcgtgctccaacgccggaagactttcctcgccaattggcgcttatgaaggaattagtggatttgcttggcctcgaacgcttggaagttcccggtttcgaggcagacgacgtattagcgactctcgcaaagaaagccgaacgtgagggctatgaagtccagatcttgacagcagatcgcgatcttttccagcttttatctccgcgcatctcggtgttacacccggaagggcatcgtatcaccccggaatggctctgggagaaatatggtttgcgtcccgaacaatgggtggattttcgcgccttagcaggcgatccgagcgacaatattccgggagttaaaggtatcggcgagaagacggcgctcaagctccttaaagaatgggggtcgttggagaacttgcttaagaatttagatcaggtcaaaccagagtcagtgcgtgagaagattcttgctcacctcgaagacctcaaattaagccgcgaattgtcccgtgtacgcaccgatttgccgctcgaagttgatttcggtcgccgccgcgaacctgactgggagggtcttaaagcgtttttagagcgtcttgaatttggttcgctcttgcatgaattcggccttttagaaagcccgttactggccgaagaagcaccttggccaccgcccgagggcgcgtttttaggttaccgtttgagtcgcccggaaccgatgtgggccgaattactggctcttgcagcgtctgcccagggacgtgtgtatcgcgcggaagaccctcatggtgcgctccgcggcctcttcgaagtccgtggcctccttgccaaagacttagctgttgttgcattgcgcgaaggtcttgatttacctccgactgatgatccaatgcttcttgcgtacctcttggacccgtcaaacacgacgcccgaaggcgtagcccgtcgttacggcggcgagtggaccgaagatgcagccaaacgcgcgttattggccgaacgtttgcacgaaaatttattaggacgtttgcaaggcgaggaacgtctcctctggctttacgaagaagtggagaaaccattgagtcgcgtgctcgcgcatatggaagctaccggtgtcaaattagacgtggcgtatttggagaatctcagccttgaagttgctgcccacatgcgccgcttggaggaagaagtattccgtttagcaggccgttcctttcgccttaactctcgcgatcagttagaacgtgtgttgttcgatgaacttggtctccctcctatcggcaagacagagaagaccggtaaacgtagcacttcagcggcggttttagaagctcttcgcgaagtccatcccattgtggacaagatcttgcagtaccgcgaaatggcgaaattgaaaggcacctatattgaccgtcttccggcattagtccacccgaaaacgggacgcctccatacccgcttcaaccaaacagccacggcgaccggtcgtttgtcctcctctgatccaaaccttcagaatattccagtacgtaccccattgggccagaagatccgccgtgcgtttgtagctgagccgggttgggcgttagtggccctcgattatcgtcaaattgaattacgtgtccttgcccatctttctggcgatgagaacctcatccgcgtgtttcaggaaggcaaagacattcacactcaaacggcaagctggatgtttggattatcagctgaagcgatcgatcctttgatgcgtcgtgcagcgaagaccatcaatttcggtgttctctacggtatgagtgcctttcgtttgtcgcaggaattaggcattccctatgaagaagctcaggcgttcattcagaaatactttcaaggctatcccaaagttaaagcatggatcgagaagactctccgtgaaggccgcacacgtggttacgtagagaccttatttggacgtcgccgctatgttcccgatttaaactcgcgcgtgaaaggcaagcgtgaagccgccgaacgcatggcgttcaacatgcctgtacagggcacggcagctgacctcatgaaacttgcaatggtgcgcctttttccacaattgcgtgaagttggtgcccgcatggatttgcaggtccacgatgaactcttgttagaagcgccaaaagagcgtgcggaagaggtggcagccctcgcgaaagaagttatggaaggcgtgtggcccttagcggtgcctcttgaagtcgaagttggtattggcgaggattggctggctgccaaagga

SEQ ID NO: 5800 - protein, 841 aa, synthetic construct
  REGION 1..841: note = Variant of DNA polymerase I from Thermus sp. strain 2.9
MHHHHHHGGSGVLPVFEPKGRVLLVDGHHLAYRNFFALKGLTTSLGEPVQGVYGFAKSLLKALKEDGDVVIVVFDAKAPSFRHEAYEAYKAGRAPTPEDFPRQLALMKELVDLLGLERLEVPGFEADDVLATLAKKAEREGYEVQILTADRDLFQLLSPRISVLHPEGHRITPEWLWEKYGLRPEQWVDFRALAGDPSDNIPGVKGIGEKTALKLLKEWGSLENLLKNLDQVKPESVREKILAHLEDLKLSRELSRVRTDLPLEVDFGRRREPDWEGLKAFLERLEFGSLLHEFGLLESPLLAEEAPWPPPEGAFLGYRLSRPEPMWAELLALAASAQGRVYRAEDPHGALRGLFEVRGLLAKDLAVVALREGLDLPPTDDPMLLAYLLDPSNTTPEGVARRYGGEWTEDAAKRALLAERLHENLLGRLQGEERLLWLYEEVEKPLSRVLAHMEATGVKLDVAYLENLSLEVAAHMRRLEEEVFRLAGRSFRLNSRDQLERVLFDELGLPPIGKTEKTGKRSTSAAVLEALREVHPIVDKILQYREMAKLKGTYIDRLPALVHPKTGRLHTRFNQTATATGRLSSSDPNLQNIPVRTPLGQKIRRAFVAEPGWALVALDYRQIELRVLAHLSGDENLIRVFQEGKDIHTQTASWMFGLSAEAIDPLMRRAAKTINFGVLYGMSAFRLSQELGIPYEEAQAFIQKYFQGYPKVKAWIEKTLREGRTRGYVETLFGRRRYVPDLNSRVKGKREAAERMAFNMPVQGTAADLMKLAMVRLFPQLREVGARMDLQVHDELLLEAPKERAEEVAALAKEVMEGVWPLAVPLEVEVGIGEDWLAAKG

SEQ ID NO: 5801 - DNA, 2523 bp, synthetic construct
  misc_feature 1..2523: note = Variant of DNA polymerase I from Thermus sp. strain 2.9
  source 1..2523: mol_type = other DNA
atgcaccatcatcatcatcatggcggtagcggcgtgttaccggtgttcgagcctaaaggtcgcgtgcttctggttgatggccatcatctcgcgtatcgtaacttctttgccctgaaaggattaaccaccagcctgggcgagccggtacagggtgtctacggctttgcaaagtcgctcctgaaagctctgaaagaagacggtgatgtggtgattgttgtctttgatgcgaaagcgccaagttttcgccacgaagcgtacgaagcttacaaagccgggcgtgctccaacgccggaagactttcctcgccaattggcgcttatgaaggaattagtggatttgcttggcctcgaacgcttggaagttcccggtttcgaggcagacgacgtattagcgactctcgcaaagaaagccgaacgtgagggctatgaagtccagatcttgacagcagatcgcgatcttttccagcttttatctccgcgcatctcggtgttacacccggaagggcatcgtatcaccccggaatggctctgggagaaatatggtttgcgtcccgaacaatgggtggattttcgcgccttagcaggcgatccgagcgacaatattccgggagttaaaggtatcggcgagaagacggcgctcaagctccttaaagaatgggggtcgttggagaacttgcttaagaatttagatcaggtcaaaccagagtcagtgcgtgagaagattcttgctcacctcgaagacctcaaattaagccgcgaattgtcccgtgtacgcaccgatttgccgctcgaagttgatttcggtcgccgccgcgaacctgactgggagggtcttaaagcgtttttagagcgtcttgaatttggttcgctcttgcatgaattcggccttttagaaagcccgttactggccgaagaagcaccttggccaccgcccgagggcgcgtttttaggttaccgtttgagtcgcccggaaccgatgtgggccgaattactggctcttgcagcgtctgcccagggacgtgtgtatcgcgcggaagaccctcatggtgcgctccgcggcctcttcgaagtccgtggactccttgccaaagacttagctgttgttgcattgcgcgaaggtcttgatttacctccgactgatgatccaatgcttcttgcgtacctcttggacccgtcaaacacgacgcccgaaggcgtagcccgtcgttacggcggcgagtggaccgaagatgcagcgaaacgcgcgttattggccgaacgtttgcacgaaaatttattaggacgtttgcaaggcgaggaacgtctcctctggctttacgaagaagtggagaaaccattgagtcgcgtgctcgcgcatatggaagctaccggtgtcaaattagacgtggcgtatttggagaatctcagccttgaagttgctgcccacatgcgccgcttggaggaagaagtattccgtttagcaggccgttcctttcgccttaactctcgcgatcagttagaacgtgtgttgttcgatgaacttggtctccctcctatcggcaagacagagaagaccggtaaacgtagcacttcagcggcggttttagaagctcttcgcgaagtccatcccattgtggacaagatcttgcagtaccgcgaaatggcgaaattgaaaggcacctatattgaccgtcttccggcattagtccacccgaaaacgggacgcctccatacccgcttcaaccaaacagccacggcgaccggtcgtttgtcctcctctgatccaaaccttcagaatattccagtacgtaccccattgggccagaagatccgccgtgcgtttgtagctgaggagggttggcgtttagtggccctcgattatcgtcaaattgaattacgtgtccttgcccatctttctggcgatgagaacctcatccgcgtgtttcaggaaggcaaagacattcacactcaaacggcaagctggatgtttggattatcagctgaagcgatcgatcctttgatgcgtcgtgcagcgaagaccatcaatttcggtgttctctacggtatgagtgcctttcgtttgtcgcaggaattaggcattccctatgaagaagctcaggcgttcattcagaaatactttcaaagctatcccaaagttaaagcatggatcgagaagactctccgtgaaggccgcacacgtggttacgtagagaccttatttggacgtcgccgctatgttcccgatttaaacgctcgcgtgaaaggcaagcgtgaagccgccgaacgcatggcgttcaacatgcctgtacagggcacggcagctgacctcatgaaacttgcaatggtgcgcctttttccacaattgcgtgaagttggtgcccgcatgctcttgcaggtccacgatgaactcttgttagaagcgccaaaagagcgtgcggaagaggtggcagccctcgcgaaagaagttatggaaggcgtgtgggggttagcggtgcctcttgaagtcgaagttggtattggcgaggattggctggctgccaaagga

SEQ ID NO: 5802 - protein, 841 aa, synthetic construct
  REGION 1..841: note = Variant of DNA polymerase I from Thermus sp. strain 2.9
MHHHHHHGGSGVLPVFEPKGRVLLVDGHHLAYRNFFALKGLTTSLGEPVQGVYGFAKSLLKALKEDGDVVIVVFDAKAPSFRHEAYEAYKAGRAPTPEDFPRQLALMKELVDLLGLERLEVPGFEADDVLATLAKKAEREGYEVQILTADRDLFQLLSPRISVLHPEGHRITPEWLWEKYGLRPEQWVDFRALAGDPSDNIPGVKGIGEKTALKLLKEWGSLENLLKNLDQVKPESVREKILAHLEDLKLSRELSRVRTDLPLEVDFGRRREPDWEGLKAFLERLEFGSLLHEFGLLESPLLAEEAPWPPPEGAFLGYRLSRPEPMWAELLALAASAQGRVYRAEDPHGALRGLFEVRGLLAKDLAVVALREGLDLPPTDDPMLLAYLLDPSNTTPEGVARRYGGEWTEDAAKRALLAERLHENLLGRLQGEERLLWLYEEVEKPLSRVLAHMEATGVKLDVAYLENLSLEVAAHMRRLEEEVFRLAGRSFRLNSRDQLERVLFDELGLPPIGKTEKTGKRSTSAAVLEALREVHPIVDKILQYREMAKLKGTYIDRLPALVHPKTGRLHTRFNQTATATGRLSSSDPNLQNIPVRTPLGQKIRRAFVAEEGWRLVALDYRQIELRVLAHLSGDENLIRVFQEGKDIHTQTASWMFGLSAEAIDPLMRRAAKTINFGVLYGMSAFRLSQELGIPYEEAQAFIQKYFQSYPKVKAWIEKTLREGRTRGYVETLFGRRRYVPDLNARVKGKREAAERMAFNMPVQGTAADLMKLAMVRLFPQLREVGARMLLQVHDELLLEAPKERAEEVAALAKEVMEGVWGLAVPLEVEVGIGEDWLAAKG

SEQ ID NO: 5803 - DNA, 2523 bp, synthetic construct
  misc_feature 1..2523: note = Variant of DNA polymerase I from Thermus sp. strain 2.9
  source 1..2523: mol_type = other DNA
atgcaccatcatcatcatcatggcggtagcggcgtgttaccggtgttcgagcctaaaggtcgcgtgcttctggttgatggccatcatctcgcgtatcgtaacttctttgccctgaaaggattaaccaccagcctgggcgagccggtacagggtgtctacggctttgcaaagtcgctcctgaaagctctgaaagaagacggtgatgtggtgattgttgtctttgatgcgaaagcgccaagttttcgccacgaagcgtacgaagcttacaaagccgggcgtgctccaacgccggaagactttcctcgccaattggcgcttatgaaggaattagtggatttgcttggcctcgaacgcttggaagttcccggtttcgaggcagacgacgtattagcgactctcgcaaagaaagccgaacgtgagggctatgaagtccagatcttgacagcagatcgcgatcttttccagcttttatctccgcgcatctcggtgttacacccggaagggcatcgtatcaccccggaatggctctgggagaaatatggtttgcgtcccgaacaatgggtggattttcgcgccttagcaggcgatccgagcgacaatattccgggagttaaaggtatcggcgagaagacggcgctcaagctccttaaagaatgggggtcgttggagaacttgcttaagaatttagatcaggtcaaaccagagtcagtgcgtgagaagattcttgctcacctcgaagacctcaaattaagccgcgaattgtcccgtgtacgcaccgatttgccgctcgaagttgatttcggtcgccgccgcgaacctgactgggagggtcttaaagcgtttttagagcgtcttgaatttggttcgctcttgcatgaattcggccttttagaaagcccgttactggccgaagaagcaccttggccaccgcccgagggcgcgtttttaggttaccgtttgagtcgcccggaaccgatgtgggccgaattactggctcttgcagcgtctgcccagggacgtgtgtatcgcgcggaagaccctcatggtgcgctccgcggcctcttcgaagtccgtggactccttgccaaagacttagctgttgttgcattgcgcgaaggtcttgatttacctccgactgatgatccaatgcttcttgcgtacctcttggacccgtcaaacacgacgcccgaaggcgtagcccgtcgttacggcggcgagtggaccgaagatgcagcgaaacgcgcgttattggccgaacgtttgcacgaaaatttattaggacgtttgcaaggcgaggaacgtctcctctggctttacgaagaagtggagaaaccattgagtcgcgtgctcgcgcatatggaagctaccggtgtcaaattagacgtggcgtatttggagaatctcagccttgaagttgctgcccacatgcgccgcttggaggaagaagtattccgtttagcaggccgttcctttcgccttaactctcgcgatcagttagaacgtgtgttgttcgatgaacttggtctccctcctatcggcaagacagagaagaccggtaaacgtagcacttcagcggcggttttagaagctcttcgcgaagtccatcccattgtggacaagatcttgcagtaccgcgaaatggcgaaattgaaaggcacctatattgaccgtcttccggcattagtccacccgaaaacgggacgcctccatacccgcttcaaccaaacagccacggcgaccggtcgtttgtcctcctctgatccaaaccttcagaatattccagtacgtaccgttttgggccagaagatccgccgtgcgtttgtagctgaggagggttggcgtttagtggccctcgattatcgtcaaattgaattacgtgtccttgcccatctttctggcgatgagaacctcatccgcgtgtttcaggaaggcaaagacattcacactcaaacggcaagctggatgtttggattatcagctgaagcgatcgatcctttgatgcgtcgtgcagcgaagaccatcaatttcggtgttctctacggtatgagtgcctttcgtttgtcgcaggaattaggcattccctatgaagaagctcaggcgttcattcagaaatactttcaaagctatcccaaagttaaagcatggatcgagaagactctccgtgaaggccgcacacgtggttacgtagagaccttatttggacgtcgccgctatgttcccgatttaaacgctcgcgtgaaaggcaagcgtgaagccgccgaacgcatggcgttcaacatgcctgtacagggcacggcagctgacctcatgaaacttgcaatggtgcgcctttttccacaattgcgtgaagttggtgcccgcatgctcttgcaggtccacgatgaactcttgttagaagcgccaaaagagcgtgcggaagaggtggcagccctcgcgaaagaagttatggaaggcgtgtggcccttagcggtgcctcttgaagtcgaagttggtattggcgaggattggctggctgccaaagga

SEQ ID NO: 5804 - protein, 841 aa, synthetic construct
  REGION 1..841: note = Variant of DNA polymerase I from Thermus sp. strain 2.9
MHHHHHHGGSGVLPVFEPKGRVLLVDGHHLAYRNFFALKGLTTSLGEPVQGVYGFAKSLLKALKEDGDVVIVVFDAKAPSFRHEAYEAYKAGRAPTPEDFPRQLALMKELVDLLGLERLEVPGFEADDVLATLAKKAEREGYEVQILTADRDLFQLLSPRISVLHPEGHRITPEWLWEKYGLRPEQWVDFRALAGDPSDNIPGVKGIGEKTALKLLKEWGSLENLLKNLDQVKPESVREKILAHLEDLKLSRELSRVRTDLPLEVDFGRRREPDWEGLKAFLERLEFGSLLHEFGLLESPLLAEEAPWPPPEGAFLGYRLSRPEPMWAELLALAASAQGRVYRAEDPHGALRGLFEVRGLLAKDLAVVALREGLDLPPTDDPMLLAYLLDPSNTTPEGVARRYGGEWTEDAAKRALLAERLHENLLGRLQGEERLLWLYEEVEKPLSRVLAHMEATGVKLDVAYLENLSLEVAAHMRRLEEEVFRLAGRSFRLNSRDQLERVLFDELGLPPIGKTEKTGKRSTSAAVLEALREVHPIVDKILQYREMAKLKGTYIDRLPALVHPKTGRLHTRFNQTATATGRLSSSDPNLQNIPVRTVLGQKIRRAFVAEEGWRLVALDYRQIELRVLAHLSGDENLIRVFQEGKDIHTQTASWMFGLSAEAIDPLMRRAAKTINFGVLYGMSAFRLSQELGIPYEEAQAFIQKYFQSYPKVKAWIEKTLREGRTRGYVETLFGRRRYVPDLNARVKGKREAAERMAFNMPVQGTAADLMKLAMVRLFPQLREVGARMLLQVHDELLLEAPKERAEEVAALAKEVMEGVWPLAVPLEVEVGIGEDWLAAKG

SEQ ID NO: 5805 - DNA, 2523 bp, synthetic construct
  misc_feature 1..2523: note = Variant of DNA polymerase I from Thermus sp. strain 2.9
  source 1..2523: mol_type = other DNA
atgcaccatcatcatcatcatggcggtagcggcgtgttaccggtgttcgagcctaaaggtcgcgtgcttctggttgatggccatcatctcgcgtatcgtaacttctttgccctgaaaggattaaccaccagcctgggcgagccggtacagggtgtctacggctttgcaaagtcgctcctgaaagctctgaaagaagacggtgatgtggtgattgttgtctttgatgcgaaagcgccaagttttcgccacgaagcgtacgaagcttacaaagccgggcgtgctccaacgccggaagactttcctcgccaattggcgcttatgaaggaattagtggatttgcttggcctcgaacgcttggaagttcccggtttcgaggcagacgacgtattagcgactctcgcaaagaaagccgaacgtgagggctatgaagtccagatcttgacagcagatcgcgatcttttccagcttttatctccgcgcatctcggtgttacacccggaagggcatcgtatcaccccggaatggctctgggagaaatatggtttgcgtcccgaacaatgggtggattttcgcgccttagcaggcgatccgagcgacaatattccgggagttaaaggtatcggcgagaagacggcgctcaagctccttaaagaatgggggtcgttggagaacttgcttaagaatttagatcaggtcaaaccagagtcagtgcgtgagaagattcttgctcacctcgaagacctcaaattaagccgcgaattgtcccgtgtacgcaccgatttgccgctcgaagttgatttcggtcgccgccgcgaacctgactgggagggtcttaaagcgtttttagagcgtcttgaatttggttcgctcttgcatgaattcggccttttagaaagcccgttactggccgaagaagcaccttggccaccgcccgagggcgcgtttttaggttaccgtttgagtcgcccggaaccgatgtgggccgaattactgatgcttgcagcgtctgcccagggacgtgtgtatcgcgcagaagaccctcatggtgcgctccgcggcctcttcgaagtccgtggactccttgccaaagacttagctgttgttgcattgcgcgaaggtcttgatttacctccgactgatgatccaatgcttcttgcgtacctcttggacccgtcaaacacgacgcccgaaggcgtagcccgtcgttacggcggcgagtggaccgaagatgcagcgaaacgcgcgttattggccgaacgtttgcacgaaaatttattaggacgtttgcaaggcgaggaacgtctcctctggctttacgaagaagtggagaaaccattgagtcgcgtgctcgcgcatatggaagctaccggtgtcaaattagacgtggcgtatttggagaatctcagccttgaagttgctgcccacatgcgccgcttggaggaagaagtattccgtttagcaggccgttcctttcgccttaactctcgcgatcagttagaacgtgtgttgttcgatgaacttggtctccctcctatcggcaagacagagaagaccggtaaacgtagcacttcagcggcggttttagaagctcttcgcgaagtccatcccattgtggacaagatcttgcagtaccgcgaaatggcgaaattgaaaggcacctatattgaccgtcttccggcattagtccacccgaaaacgggacgcctccatacccgcttcaaccaaacagccacggcgaccggtcgtttgtcctcctctgatccaaaccttcagaatattccagtacgtaccccattgggccagaagatccgccgtgcgtttgtagctgaggagggttggcgtttagtggccctcgattatcgtcaaattgaattacgtgtccttgcccatctttctggcgatgagaacctcatccgcgtgtttcaggaaggcaaagacattcacactcaaacggcaagctggatgtttggattatcagctgaagcgatcgatcctttgatgcgtcgtgcagcgaagaccatcaatttcggtgttctctacggtatgagtgcctttcgtttgtcgcaggaattaggcattccctatgaagaagctcaggcgttcattcagaaatactttcaaagctatcccaaagttaaagcatggatcgagaagactctccgtgaaggccgcacacgtggttacgtagagaccttatttggacgtcgccgctatgttcccgatttaaacgctcgcgtgaaaggcaagcgtgaagccgccgaacgcatggcgttcaacatgcctgtacagggcacggcagctgacctcatgaaacttgcaatggtgcgcctttttccacaattgcgtgaagttggtgcccgcatgctcttgcaggtccacgatgaactcttgttagaagcgccaaaagagcgtgcggaagaggtggcagccctcgcgaaagaagttatggaaggcgtgtggcccttagcggtgcctcttgaagtcgaagttggtattggcgaggattggctggctgccaaagga

SEQ ID NO: 5806 - protein, 841 aa, synthetic construct
  REGION 1..841: note = Variant of DNA polymerase I from Thermus sp. strain 2.9
MHHHHHHGGSGVLPVFEPKGRVLLVDGHHLAYRNFFALKGLTTSLGEPVQGVYGFAKSLLKALKEDGDVVIVVFDAKAPSFRHEAYEAYKAGRAPTPEDFPRQLALMKELVDLLGLERLEVPGFEADDVLATLAKKAEREGYEVQILTADRDLFQLLSPRISVLHPEGHRITPEWLWEKYGLRPEQWVDFRALAGDPSDNIPGVKGIGEKTALKLLKEWGSLENLLKNLDQVKPESVREKILAHLEDLKLSRELSRVRTDLPLEVDFGRRREPDWEGLKAFLERLEFGSLLHEFGLLESPLLAEEAPWPPPEGAFLGYRLSRPEPMWAELLMLAASAQGRVYRAEDPHGALRGLFEVRGLLAKDLAVVALREGLDLPPTDDPMLLAYLLDPSNTTPEGVARRYGGEWTEDAAKRALLAERLHENLLGRLQGEERLLWLYEEVEKPLSRVLAHMEATGVKLDVAYLENLSLEVAAHMRRLEEEVFRLAGRSFRLNSRDQLERVLFDELGLPPIGKTEKTGKRSTSAAVLEALREVHPIVDKILQYREMAKLKGTYIDRLPALVHPKTGRLHTRFNQTATATGRLSSSDPNLQNIPVRTPLGQKIRRAFVAEEGWRLVALDYRQIELRVLAHLSGDENLIRVFQEGKDIHTQTASWMFGLSAEAIDPLMRRAAKTINFGVLYGMSAFRLSQELGIPYEEAQAFIQKYFQSYPKVKAWIEKTLREGRTRGYVETLFGRRRYVPDLNARVKGKREAAERMAFNMPVQGTAADLMKLAMVRLFPQLREVGARMLLQVHDELLLEAPKERAEEVAALAKEVMEGVWPLAVPLEVEVGIGEDWLAAKG

SEQ ID NO: 5807 - DNA, 2523 bp, synthetic construct
  misc_feature 1..2523: note = Variant of DNA polymerase I from Thermus sp. strain 2.9
  source 1..2523: mol_type = other DNA
atgcaccatcatcatcatcatggcggtagcggcgtgttaccggtgttcgagcctaaaggtcgcgtgcttctggttgatggccatcatctcgcgtatcgtaacttctttgccctgaaaggattaaccaccagcctgggcgagccggtacagggtgtctacggctttgcaaagtcgctcctgaaagctctgaaagaagacggtgatgtggtgattgttgtctttgatgcgaaagcgccaagttttcgccacgaagcgtacgaagcttacaaagccgggcgtgctccaacgccggaagactttcctcgccaattggcgcttatgaaggaattagtggatttgcttggcctcgaacgcttggaagttcccggtttcgaggcagacgacgtattagcgactctcgcaaagaaagccgaacgtgagggctatgaagtccagatcttgacagcagatcgcgatcttttccagcttttatctccgcgcatctcggtgttacacccggaagggcatcgtatcaccccggaatggctctgggagaaatatggtttgcgtcccgaacaatgggtggattttcgcgccttagcaggcgatccgagcgacaatattccgggagttaaaggtatcggcgagaagacggcgctcaagctccttaaagaatgggggtcgttggagaacttgcttaagaatttagatcaggtcaaaccagagtcagtgcgtgagaagattcttgctcacctcgaagacctcaaattaagccgcgaattgtcccgtgtacgcaccgatttgccgctcgaagttgatttcggtcgccgccgcgaacctgactgggagggtcttaaagcgtttttagagcgtcttgaatttggttcgctcttgcatgaattcggccttttagaaagcccgttactggccgaagaagcaccttggccaccgcccgagggcgcgtttttaggttaccgtttgagtcgcccggaaccgatgtgggccgaattactggctcttgcagcgtctgcccagggacgtgtgtatcgcgcggaagaccctcatggtgcgctccgcggcctcttcgaagtccgtggactccttgccaaagacttagctgttgttgcattgcgcgaaggtcttgatttacctccgactgatgatccaatgcttcttgcgtacctcttggacccgtcaaacacgacgcccgaaggcgtagcccgtcgttacggcggcgagtggaccgaagatgcagcgaaacgcgcgttattggccgaacgtttgcacgaaaatttattaggacgtttgcaaggcgaggaacgtctcctctggctttacgaagaagtggagaaaccattgagtcgcgtgctcgcgcatatggaagctaccggtgtcaaattagacgtggcgtatttggagaatctcagccttgaagttgctgcccacatgcgccgcttggaggaagaagtattccgtttagcaggccgttcctttcgccttaactctcgcgatcagttagaacgtgtgttgttcgatgaacttggtctccctcctatcggcaagacagagaagaccggtaaacgtagcacttcagcggcggttttagaagctcttcgcgaagtccatcccattgtggacaagatcttgcagtaccgcgaaatggcgaaattgaaaggcacctatattgaccgtcttccggcattagtccacccgaaaacgggacgcctccatacccgcttcaaccaaacagccacggcgaccggtcgtttgtcctcctctgatccaaaccttcagaatattccagtacgtaccccattgggccagaagatccgccgtgcgtttgtagctgaggagggttggcgtttagtggccctcgattatcgtcaaattgaattacgtgtccttgcccatctttctggcgatgagaacctcatccgcgtgtttcaggaaggcaaagacattcacactcaaacggcaagctggatgtttggattatcagctgaagcgatcgatcctttgatgcgtcgtgcagcgaagaccatcaatttcggtgttctctacggtatgagtgcctttcgtttgtcgcaggaattaggcattccctctgaagaagctcaggcgttcattcagaaatactttcaaagctatcccaaagttaaagcatggatcgagaagactctccgtgaaggccgcacacgtggttacgtagagaccttatttggacgtcgccgctatgttcccgatttaaacgctcgcgtgaaaggcaagcgtgaagccgccgaacgcatggcgttcaacatgcctgtacagggcacggcagctgacctcatgaaacttgcaatggtgcgcctttttccacaattgcgtgaagttggtgcccgcatgctcttgcaggtccacgatgaactcttgttagaagcgccaaaagagcgtgcggaagaggtggcagccctcgcgaaagaagttatggaaggcgtgtggcccttagcggtgcctcttgaagtcgaagttggtattggcgaggattggctggctgccaaagga

SEQ ID NO: 5808 - protein, 841 aa, synthetic construct
  REGION 1..841: note = Variant of DNA polymerase I from Thermus sp. strain 2.9
MHHHHHHGGSGVLPVFEPKGRVLLVDGHHLAYRNFFALKGLTTSLGEPVQGVYGFAKSLLKALKEDGDVVIVVFDAKAPSFRHEAYEAYKAGRAPTPEDFPRQLALMKELVDLLGLERLEVPGFEADDVLATLAKKAEREGYEVQILTADRDLFQLLSPRISVLHPEGHRITPEWLWEKYGLRPEQWVDFRALAGDPSDNIPGVKGIGEKTALKLLKEWGSLENLLKNLDQVKPESVREKILAHLEDLKLSRELSRVRTDLPLEVDFGRRREPDWEGLKAFLERLEFGSLLHEFGLLESPLLAEEAPWPPPEGAFLGYRLSRPEPMWAELLALAASAQGRVYRAEDPHGALRGLFEVRGLLAKDLAVVALREGLDLPPTDDPMLLAYLLDPSNTTPEGVARRYGGEWTEDAAKRALLAERLHENLLGRLQGEERLLWLYEEVEKPLSRVLAHMEATGVKLDVAYLENLSLEVAAHMRRLEEEVFRLAGRSFRLNSRDQLERVLFDELGLPPIGKTEKTGKRSTSAAVLEALREVHPIVDKILQYREMAKLKGTYIDRLPALVHPKTGRLHTRFNQTATATGRLSSSDPNLQNIPVRTPLGQKIRRAFVAEEGWRLVALDYRQIELRVLAHLSGDENLIRVFQEGKDIHTQTASWMFGLSAEAIDPLMRRAAKTINFGVLYGMSAFRLSQELGIPSEEAQAFIQKYFQSYPKVKAWIEKTLREGRTRGYVETLFGRRRYVPDLNARVKGKREAAERMAFNMPVQGTAADLMKLAMVRLFPQLREVGARMLLQVHDELLLEAPKERAEEVAALAKEVMEGVWPLAVPLEVEVGIGEDWLAAKG

SEQ ID NO: 5809 - DNA, 2523 bp, synthetic construct
  misc_feature 1..2523: note = Variant of DNA polymerase I from Thermus sp. strain 2.9
  source 1..2523: mol_type = other DNA
atgcaccatcatcatcatcatggcggtagcggcgtgttaccggtgttcgagcctaaaggtcgcgtgcttctggttgatggccatcatctcgcgtatcgtaacttctttgccctgaaaggattaaccaccagcctgggcgagccggtacagggtgtctacggctttgcaaagtcgctcctgaaagctctgaaagaagacggtgatgtggtgattgttgtctttgatgcgaaagcgccaagttttcgccacgaagcgtacgaagcttacaaagccgggcgtgctccaacgccggaagactttcctcgccaattggcgcttatgaaggaattagtggatttgcttggcctcgaacgcttggaagttcccggtttcgaggcagacgacgtattagcgactctcgcaaagaaagccgaacgtgagggctatgaagtccagatcttgacagcagatcgcgatcttttccagcttttatctccgcgcatctcggtgttacacccggaagggcatcgtatcaccccggaatggctctgggagaaatatggtttgcgtcccgaacaatgggtggattttcgcgccttagcaggcgatccgagcgacaatattccgggagttaaaggtatcggcgagaagacggcgctcaagctccttaaagaatgggggtcgttggagaacttgcttaagaatttagatcaggtcaaaccagagtcagtgcgtgagaagattcttgctcacctcgaagacctcaaattaagccgcgaattgtcccgtgtacgcaccgatttgccgctcgaagttgatttcggtcgccgccgcgaacctgactgggagggtcttaaagcgtttttagagcgtcttgaatttggttcgctcttgcatgaattcggccttttagaaagcccgttactggccgaagaagcaccttggccaccgcccgagggcgcgtttttaggttaccgtttgagtcgcccggaaccgatgtgggccgaattactggctcttgcagcgtctgcccagggacgtgtgtatcgcgcggaagaccctcatggtgcgctccgcggcctcttcgaagtccgtggactccttgccaaagacttagctgttgttgcattgcgcgaaggtcttgatttacctccgactgatgatccaatgcttcttgcgtacctcttggacccgtcaaacacgacgcccgaaggcgtagcccgtcgttacggcggcgagtggaccgaagatgcagcgaaacgcgcgttattggccgaacgtttgcacgaaaatttattaggacgtttgcaaggcgaggaacgtctcctctggctttacgaagaagtggagaaaccattgagtcgcgtgctcgcgcatatggaagctaccggtgtcaaattagacgtggcgtatttggagaatctcagccttgaagttgctgcccacatgcgccgcttggaggaagaagtattccgtttagcaggccgttcctttcgccttaactctcgcgatcagttagaacgtgtgttgttcgatgaacttggtctccctcctatcggcaagacagagaagaccggtaaacgtagcacttcagcggcggttttagaagctcttcgcgaagtccatcccattgtggacaagatcttgcagtaccgcgaaatggcgaaattgaaaggcacctatattgaccgtcttccggcattagtccacccgaaaacgggacgcctccatacccgcttcaaccaaacagccacggcgaccggtcgtttgtcctcctctgatccaaaccttcagaatattccagtacgtaccccattgggccagaagatccgccgtgcgtttgtagctgaggagggttggcgtttagtggccctcgattatcgtcaaattgaattacgtgtccttgcccatctttctggcgatgagaacctcatccgcgtgtttcaggaaggcaaagacattcacactcaaacggcaagctggatgtttggattatcagctgaagcgatcgatcctttgatgcgtcgtgcagcgaagaccatcaatttcggtgttctctacggtatgagtgcctttcgtttgtcgcaggaattaggcattccctatgaagaagctcaggcgttcattcagaaatactttcaaagctatcccaaagttaaagcatggatcgagaagactctccgtgaaggccgcacacgtggttacgtagagaccttatttggacgtcgccgctatgttcccgatttaaacgctcgcgtgaaaggcaagcgtgaagccgccgaacgcatggcgttcaacatgcctgtacagggcacggcagctgacctcatgaaacttgcaatggtgcgcctttttccacaattgcgtgaagttggtgcccgcatgggtttgcaggtccacgatgaactcttgttagaagcgccaaaagagcgtgcggaagaggtggcagccctcgcgaaagaagttatggaaggcgtgtggcccttagcggtgcctcttgaagtcgaagttggtattggcgaggattggctggctgccaaagga

SEQ ID NO: 5810 - protein, 841 aa, synthetic construct
  REGION 1..841: note = Variant of DNA polymerase I from Thermus sp. strain 2.9
MHHHHHHGGSGVLPVFEPKGRVLLVDGHHLAYRNFFALKGLTTSLGEPVQGVYGFAKSLLKALKEDGDVVIVVFDAKAPSFRHEAYEAYKAGRAPTPEDFPRQLALMKELVDLLGLERLEVPGFEADDVLATLAKKAEREGYEVQILTADRDLFQLLSPRISVLHPEGHRITPEWLWEKYGLRPEQWVDFRALAGDPSDNIPGVKGIGEKTALKLLKEWGSLENLLKNLDQVKPESVREKILAHLEDLKLSRELSRVRTDLPLEVDFGRRREPDWEGLKAFLERLEFGSLLHEFGLLESPLLAEEAPWPPPEGAFLGYRLSRPEPMWAELLALAASAQGRVYRAEDPHGALRGLFEVRGLLAKDLAVVALREGLDLPPTDDPMLLAYLLDPSNTTPEGVARRYGGEWTEDAAKRALLAERLHENLLGRLQGEERLLWLYEEVEKPLSRVLAHMEATGVKLDVAYLENLSLEVAAHMRRLEEEVFRLAGRSFRLNSRDQLERVLFDELGLPPIGKTEKTGKRSTSAAVLEALREVHPIVDKILQYREMAKLKGTYIDRLPALVHPKTGRLHTRFNQTATATGRLSSSDPNLQNIPVRTPLGQKIRRAFVAEEGWRLVALDYRQIELRVLAHLSGDENLIRVFQEGKDIHTQTASWMFGLSAEAIDPLMRRAAKTINFGVLYGMSAFRLSQELGIPYEEAQAFIQKYFQSYPKVKAWIEKTLREGRTRGYVETLFGRRRYVPDLNARVKGKREAAERMAFNMPVQGTAADLMKLAMVRLFPQLREVGARMGLQVHDELLLEAPKERAEEVAALAKEVMEGVWPLAVPLEVEVGIGEDWLAAKG

SEQ ID NO: 5811 - DNA, 2523 bp, synthetic construct
  misc_feature 1..2523: note = Variant of DNA polymerase I from Thermus sp. strain 2.9
  source 1..2523: mol_type = other DNA
atgcaccatcatcatcatcatggcggtagcggcgtgttaccggtgttcgagcctaaaggtcgcgtgcttctggttgatggccatcatctcgcgtatcgtaacttctttgccctgaaaggattaaccaccagcctgggcgagccggtacagggtgtctacggctttgcaaagtcgctcctgaaagctctgaaagaagacggtgatgtggtgattgttgtctttgatgcgaaagcgccaagttttcgccacgaagcgtacgaagcttacaaagccgggcgtgctccaacgccggaagactttcctcgccaattggcgcttatgaaggaattagtggatttgcttggcctcgaacgcttggaagttcccggtttcgaggcagacgacgtattagcgactctcgcaaagaaagccgaacgtgagggctatgaagtccagatcttgacagcagatcgcgatcttttccagcttttatctccgcgcatctcggtgttacacccggaagggcatcgtatcaccccggaatggctctgggagaaatatggtttgcgtcccgaacaatgggtggattttcgcgccttagcaggcgatccgagcgacaatattccgggagttaaaggtatcggcgagaagacggcgctcaagctccttaaagaatgggggtcgttggagaacttgcttaagaatttagatcaggtcaaaccagagtcagtgcgtgagaagattcttgctcacctcgaagacctcaaattaagccgcgaattgtcccgtgtacgcaccgatttgccgctcgaagttgatttcggtcgccgccgcgaacctgactgggagggtcttaaagcgtttttagagcgtcttgaatttggttcgctcttgcatgaattcggccttttagaaagcccgttactggccgaagaagcaccttggccaccgcccgagggcgcgtttttaggttaccgtttgagtcgcccggaaccgatgtgggccgaattactggctcttgcagcgtctgcccagggacgtgtgtatcgcggtgaagaccctcatggtgcgctccgcggcctcttcgaagtccgtggactccttgccaaagacttagctgttgttgcattgcgcgaaggtcttgatttacctccgactgatgatccaatgcttcttgcgtacctcttggacccgtcaaacacgacgcccgaaggcgtagcccgtcgttacggcggcgagtggaccgaagatgcagcgaaacgcgcgttattggccgaacgtttgcacgaaaatttattaggacgtttgcaaggcgaggaacgtctcctctggctttacgaagaagtggagaaaccattgagtcgcgtgctcgcgcatatggaagctaccggtgtcaaattagacgtggcgtatttggagaatctcagccttgaagttgctgcccacatgcgccgcttggaggaagaagtattccgtttagcaggccgttcctttcgccttaactctcgcgatcagttagaacgtgtgttgttcgatgaacttggtctccctcctatcggcaagacagagaagaccggtaaacgtagcacttcagcggcggttttagaagctcttcgcgaagtccatcccattgtggacaagatcttgcagtaccgcgaaatggcgaaattgaaaggcacctatattgaccgtcttccggcattagtccacccgaaaacgggacgcctccatacccgcttcaaccaaacagccacggcgaccggtcgtttgtcctcctctgatccaaaccttcagaatattccagtacgtaccccattgggccagaagatccgccgtgcgtttgtagctgaggagggttggcgtttagtggccctcgattatcgtcaaattgaattacgtgtccttgcccatctttctggcgatgagaacctcatccgcgtgtttcaggaaggcaaagacattcacactcaaacggcaagctggatgtttggattatcagctgaagcgatcgatcctttgatgcgtcgtgcagcgaagaccatcaatttcggtgttctctacggtatgagtgcctttcgtttgtcgcaggaattaggcattccctatgaagaagctcaggcgttcattcagaaatactttcaaagctatcccaaagttaaagcatggatcgagaagactctccgtgaaggccgcacacgtggttacgtagagaccttatttggacgtcgccgctatgttcccgatttaaacgctcgcgtgaaaggcaagcgtgaagccgccgaacgcatggcgttcaacatgcctgtacagggcacggcagctgacctcatgaaacttgcaatggtgcgcctttttccacaattgcgtgaagttggtgcccgcatgctcttgcaggtccacgatgaactcttgttagaagcgccaaaagagcgtgcggaagaggtggcagccctcgcgaaagaagttatggaaggcgtgtggcccttagcggtgcctcttgaagtcgaagttggtattggcgaggattggctggctgccaaagga

SEQ ID NO: 5812 - protein, 841 aa, synthetic construct
  REGION 1..841: note = Variant of DNA polymerase I from Thermus sp. strain 2.9
MHHHHHHGGSGVLPVFEPKGRVLLVDGHHLAYRNFFALKGLTTSLGEPVQGVYGFAKSLLKALKEDGDVVIVVFDAKAPSFRHEAYEAYKAGRAPTPEDFPRQLALMKELVDLLGLERLEVPGFEADDVLATLAKKAEREGYEVQILTADRDLFQLLSPRISVLHPEGHRITPEWLWEKYGLRPEQWVDFRALAGDPSDNIPGVKGIGEKTALKLLKEWGSLENLLKNLDQVKPESVREKILAHLEDLKLSRELSRVRTDLPLEVDFGRRREPDWEGLKAFLERLEFGSLLHEFGLLESPLLAEEAPWPPPEGAFLGYRLSRPEPMWAELLALAASAQGRVYRGEDPHGALRGLFEVRGLLAKDLAVVALREGLDLPPTDDPMLLAYLLDPSNTTPEGVARRYGGEWTEDAAKRALLAERLHENLLGRLQGEERLLWLYEEVEKPLSRVLAHMEATGVKLDVAYLENLSLEVAAHMRRLEEEVFRLAGRSFRLNSRDQLERVLFDELGLPPIGKTEKTGKRSTSAAVLEALREVHPIVDKILQYREMAKLKGTYIDRLPALVHPKTGRLHTRFNQTATATGRLSSSDPNLQNIPVRTPLGQKIRRAFVAEEGWRLVALDYRQIELRVLAHLSGDENLIRVFQEGKDIHTQTASWMFGLSAEAIDPLMRRAAKTINFGVLYGMSAFRLSQELGIPYEEAQAFIQKYFQSYPKVKAWIEKTLREGRTRGYVETLFGRRRYVPDLNARVKGKREAAERMAFNMPVQGTAADLMKLAMVRLFPQLREVGARMLLQVHDELLLEAPKERAEEVAALAKEVMEGVWPLAVPLEVEVGIGEDWLAAKG

SEQ ID NO: 5813 - DNA, 2523 bp, synthetic construct
  misc_feature 1..2523: note = Variant of DNA polymerase I from Thermus sp. strain 2.9
  source 1..2523: mol_type = other DNA
atgcaccatcatcatcatcatggcggtagcggcgtgttaccggtgttcgagcctaaaggtcgcgtgcttctggttgatggccatcatctcgcgtatcgtaacttctttgccctgaaaggattaaccaccagcctgggcgagccggtacagggtgtctacggctttgcaaagtcgctcctgaaagctctgaaagaagacggtgatgtggtgattgttgtctttgatgcgaaagcgccaagttttcgccacgaagcgtacgaagcttacaaagccgggcgtgctccaacgccggaagactttcctcgccaattggcgcttatgaaggaattagtggatttgcttggcctcgaacgcttggaagttcccggtttcgaggcagacgacgtattagcgactctcgcaaagaaagccgaacgtgagggctatgaagtccagatcttgacagcagatcgcgatcttttccagcttttatctccgcgcatctcggtgttacacccggaagggcatcgtatcaccccggaatggctctgggagaaatatggtttgcgtcccgaacaatgggtggattttcgcgccttagcaggcgatccgagcgacaatattccgggagttaaaggtatcggcgagaagacggcgctcaagctccttaaagaatgggggtcgttggagaacttgcttaagaatttagatcaggtcaaaccagagtcagtgcgtgagaagattcttgctcacctcgaagacctcaaattaagccgcgaattgtcccgtgtacgcaccgatttgccgctcgaagttgatttcggtcgccgccgcgaacctgactgggagggtcttaaagcgtttttagagcgtcttgaatttggttcgctcttgcatgaattcggccttttagaaagcccgttactggccgaagaagcaccttggccaccgcccgagggcgcgtttttaggttaccgtttgagtcgcccggaaccgatgtgggccgaattactggctcttgcagcgtctgcccagggacgtgtgtatcgcgcggaagaccctcatggtgcgctccgcggcctcttcgaagtccgtggactccttgccaaagacttagctgttgttgcattgcgcgaaggtcttgatttacctccgactgatgatccaatgcttcttgcgtacctcttggacccgtcaaacacgacgcccgaaggcgtagcccgtcgttacggcggcgagtggaccgaagatgcagcgaaacgcgcgttattggccgaacgtttgcacgaaaatttattaggacgtttgcaaggcgaggaacgtctcctctggctttacgaagaagtggagaaaccattgagtcgcgtgctcgcgcatatggaagctaccggtgtcaaattagacgtggcgtatttggagaatctcagccttgaagttgctgcccacatgcgccgcttggaggaagaagtattccgtttagcaggccgttcctttcgccttaactctcgcgatcagttagaacgtgtgttgttcgatgaacttggtctccctcctatcggcaagacagagaagaccggtaaacgtagcacttcagcggcggttttagaagctcttcgcgaagtccatcccattgtggacaagatcttgcagtaccgcgaaatggcgaaattgaaaggcacctatattgaccgtcttccggcattagtccacccgaaaacgggacgcctccatacccgcttcaaccaaacagccacggcgaccggtcgtttgtcctcctctgatccaaaccttcagaatattccagtacgtaccccattgggccaggtgatccgccgtgcgtttgtagctgaggagggttggcgtttagtggccctcgattatcgtcaaattgaattacgtgtccttgcccatctttctggcgatgagaacctcatccgcgtgtttcaggaaggcaaagacattcacactcaaacggcaagctggatgtttggattatcagctgaagcgatcgatcctttgatgcgtcgtgcagcgaagaccatcaatttcggtgttctctacggtatgagtgcctttcgtttgtcgcaggaattaggcattccctatgaagaagctcaggcgttcattcagaaatactttcaaagctatcccaaagttaaagcatggatcgagaagactctccgtgaaggccgcacacgtggttacgtagagaccttatttggacgtcgccgctatgttcccgatttaaacgctcgcgtgaaaggcaagcgtgaagccgccgaacgcatggcgttcaacatgcctgtacagggcacggcagctgacctcatgaaacttgcaatggtgcgcctttttccacaattgcgtgaagttggtgcccgcatgctcttgcaggtccacgatgaactcttgttagaagcgccaaaagagcgtgcggaagaggtggcagccctcgcgaaagaagttatggaaggcgtgtggcccttagcggtgcctcttgaagtcgaagttggtattggcgaggattggctggctgccaaagga

SEQ ID NO: 5814 - protein, 841 aa, synthetic construct
  REGION 1..841: note = Variant of DNA polymerase I from Thermus sp. strain 2.9
MHHHHHHGGSGVLPVFEPKGRVLLVDGHHLAYRNFFALKGLTTSLGEPVQGVYGFAKSLLKALKEDGDVVIVVFDAKAPSFRHEAYEAYKAGRAPTPEDFPRQLALMKELVDLLGLERLEVPGFEADDVLATLAKKAEREGYEVQILTADRDLFQLLSPRISVLHPEGHRITPEWLWEKYGLRPEQWVDFRALAGDPSDNIPGVKGIGEKTALKLLKEWGSLENLLKNLDQVKPESVREKILAHLEDLKLSRELSRVRTDLPLEVDFGRRREPDWEGLKAFLERLEFGSLLHEFGLLESPLLAEEAPWPPPEGAFLGYRLSRPEPMWAELLALAASAQGRVYRAEDPHGALRGLFEVRGLLAKDLAVVALREGLDLPPTDDPMLLAYLLDPSNTTPEGVARRYGGEWTEDAAKRALLAERLHENLLGRLQGEERLLWLYEEVEKPLSRVLAHMEATGVKLDVAYLENLSLEVAAHMRRLEEEVFRLAGRSFRLNSRDQLERVLFDELGLPPIGKTEKTGKRSTSAAVLEALREVHPIVDKILQYREMAKLKGTYIDRLPALVHPKTGRLHTRFNQTATATGRLSSSDPNLQNIPVRTPLGQVIRRAFVAEEGWRLVALDYRQIELRVLAHLSGDENLIRVFQEGKDIHTQTASWMFGLSAEAIDPLMRRAAKTINFGVLYGMSAFRLSQELGIPYEEAQAFIQKYFQSYPKVKAWIEKTLREGRTRGYVETLFGRRRYVPDLNARVKGKREAAERMAFNMPVQGTAADLMKLAMVRLFPQLREVGARMLLQVHDELLLEAPKERAEEVAALAKEVMEGVWPLAVPLEVEVGIGEDWLAAKG

SEQ ID NO: 5815 - DNA, 2523 bp, synthetic construct
  misc_feature 1..2523: note = Variant of DNA polymerase I from Thermus sp. strain 2.9
  source 1..2523: mol_type = other DNA
atgcaccatcatcatcatcatggcggtagcggcgtgttaccggtgttcgagcctaaaggtcgcgtgcttctggttgatggccatcatctcgcgtatcgtaacttctttgccctgaaaggattaaccaccagcctgggcgagccggtacagggtgtctacggctttgcaaagtcgctcctgaaagctctgaaagaagacggtgatgtggtgattgttgtctttgatgcgaaagcgccaagttttcgccacgaagcgtacgaagcttacaaagccgggcgtgctccaacgccggaagactttcctcgccaattggcgcttatgaaggaattagtggatttgcttggcctcgaacgcttggaagttcccggtttcgaggcagacgacgtattagcgactctcgcaaagaaagccgaacgtgagggctatgaagtccagatcttgacagcagatcgcgatcttttccagcttttatctccgcgcatctcggtgttacacccggaagggcatcgtatcaccccggaatggctctgggagaaatatggtttgcgtcccgaacaatgggtggattttcgcgccttagcaggcgatccgagcgacaatattccgggagttaaaggtatcggcgagaagacggcgctcaagctccttaaagaatgggggtcgttggagaacttgcttaagaatttagatcaggtcaaaccagagtcagtgcgtgagaagattcttgctcacctcgaagacctcaaattaagccgcgaattgtcccgtgtacgcaccgatttgccgctcgaagttgatttcggtcgccgccgcgaacctgactgggagggtcttaaagcgtttttagagcgtcttgaatttggttcgctcttgcatgaattcggccttttagaaagcccgttactggccgaagaagcaccttggccaccgcccgagggcgcgtttttaggttaccgtttgagtcgcccggaaccgatgtgggccgaattactggctcttgcagcgtctgcccagggacgtgtgtatcgcgcggaagaccctcatggtgcgctccgcggcctcttcgaagtccgtggactccttgccaaagacttagctgttgttgcattgcgcgaaggtcttgatttacctccgactgatgatccaatgcttcttgcgtacctcttggacccgtcaaacacgacgcccgaaggcgtagcccgtcgttacggcggcgagtggaccgaagatgcagcgaaacgcgcgttattggccgaacgtttgcacgaaaatttattaggacgtttgcaaggcgaggaacgtctcctctggctttacgaagaagtggagaaaccattgagtcgcgtgctcgcgcatatggaagctaccggtgtcaaattagacgtggcgtatttggagaatctcagccttgaagttgctgcccacatgcgccgcttggaggaagaagtattccgtttagcaggccgttcctttcgccttaactctcgcgatcagttagaacgtgtgttgttcgatgaacttggtctccctcctatcggcaagacagagaagaccggtaaacgtagcacttcagcggcggttttagaagctcttcgcgaagtccatcccattgtggacaagatcttgcagtaccgcgaaatggcgaaattgaaaggcacctatattgaccgtcttccggcattagtccacccgaaaacgggacgcctccatacccgcttcaaccaaacagccacggcgaccggtcgtttgtcctcctctgatccaaaccttcagaatattccagtacgtaccccattgggccagaagatccgccgtgcgtttgtagctgaggagggttggcgtttagtggccctcgattatcgtcaaattgaattacgtgtccttgcccatctttctggcgatgagaacctcatccgcgtgtttcaggaaggcaaagacattcacactcaaacggcaagctggatgtttggattatcagctgaagcgatcgatcctttgatgcgtcgtgcagcgaagaccatcaatttcggtgttctctacggtatgagtgcctttcgtttgtcgcaggaattaggcattccctatgaagaagctcaggcgttcattcagaaatactttcaaagctatcccaaagttaaagcatggatcgagaagactctccgtgaaggccgcacacgtggttacgtagagaccttatttggacgtcgccgctatgttcccgatttaaacgctcgcgtgaaaggcaagcgtgaagccgccgaacgcatggcgttcaacatgcctgtacagggcacggcagctgacctcatgaaacttgcaatggtgcgcctttttccacaattgcgtgaagttggtgcccgcatgctcttgcaggtccacgatgaactcttgttaatggcgccaaaagagcgtgcggaagaggtggcagccctcgcgaaagaagttatggaaggcgtgtggcccttagcggtgcctcttgaagtcgaagttggtattggcgaggattggctggctgccaaagga

SEQ ID NO: 5816 - protein, 841 aa, synthetic construct
  REGION 1..841: note = Variant of DNA polymerase I from Thermus sp. strain 2.9
MHHHHHHGGSGVLPVFEPKGRVLLVDGHHLAYRNFFALKGLTTSLGEPVQGVYGFAKSLLKALKEDGDVVIVVFDAKAPSFRHEAYEAYKAGRAPTPEDFPRQLALMKELVDLLGLERLEVPGFEADDVLATLAKKAEREGYEVQILTADRDLFQLLSPRISVLHPEGHRITPEWLWEKYGLRPEQWVDFRALAGDPSDNIPGVKGIGEKTALKLLKEWGSLENLLKNLDQVKPESVREKILAHLEDLKLSRELSRVRTDLPLEVDFGRRREPDWEGLKAFLERLEFGSLLHEFGLLESPLLAEEAPWPPPEGAFLGYRLSRPEPMWAELLALAASAQGRVYRAEDPHGALRGLFEVRGLLAKDLAVVALREGLDLPPTDDPMLLAYLLDPSNTTPEGVARRYGGEWTEDAAKRALLAERLHENLLGRLQGEERLLWLYEEVEKPLSRVLAHMEATGVKLDVAYLENLSLEVAAHMRRLEEEVFRLAGRSFRLNSRDQLERVLFDELGLPPIGKTEKTGKRSTSAAVLEALREVHPIVDKILQYREMAKLKGTYIDRLPALVHPKTGRLHTRFNQTATATGRLSSSDPNLQNIPVRTPLGQKIRRAFVAEEGWRLVALDYRQIELRVLAHLSGDENLIRVFQEGKDIHTQTASWMFGLSAEAIDPLMRRAAKTINFGVLYGMSAFRLSQELGIPYEEAQAFIQKYFQSYPKVKAWIEKTLREGRTRGYVETLFGRRRYVPDLNARVKGKREAAERMAFNMPVQGTAADLMKLAMVRLFPQLREVGARMLLQVHDELLLMAPKERAEEVAALAKEVMEGVWPLAVPLEVEVGIGEDWLAAKG

SEQ ID NO: 5817 - DNA, 2523 bp, synthetic construct
  misc_feature 1..2523: note = Variant of DNA polymerase I from Thermus sp. strain 2.9
  source 1..2523: mol_type = other DNA
atgcaccatcatcatcatcatggcggtagcggcgtgttaccggtgttcgagcctaaaggtcgcgtgcttctggttgatggccatcatctcgcgtatcgtaacttctttgccctgaaaggattaaccaccagcctgggcgagccggtacagggtgtctacggctttgcaaagtcgctcctgaaagctctgaaagaagacggtgatgtggtgattgttgtctttgatgcgaaagcgccaagttttcgccacgaagcgtacgaagcttacaaagccgggcgtgctccaacgccggaagactttcctcgccaattggcgcttatgaaggaattagtggatttgcttggcctcgaacgcttggaagttcccggtttcgaggcagacgacgtattagcgactctcgcaaagaaagccgaacgtgagggctatgaagtccagatcttgacagcagatcgcgatcttttccagcttttatctccgcgcatctcggtgttacacccggaagggcatcgtatcaccccggaatggctctgggagaaatatggtttgcgtcccgaacaatgggtggattttcgcgccttagcaggcgatccgagcgacaatattccgggagttaaaggtatcggcgagaagacggcgctcaagctccttaaagaatgggggtcgttggagaacttgcttaagaatttagatcaggtcaaaccagagtcagtgcgtgagaagattcttgctcacctcgaagacctcaaattaagccgcgaattgtcccgtgtacgcaccgatttgccgctcgaagttgatttcggtcgccgccgcgaacctgactgggagggtcttaaagcgtttttagagcgtcttgaatttggttcgctcttgcatgaattcggccttttagaaagcccgttactggccgaagaagcaccttggccaccgcccgagggcgcgtttttaggttaccgtttgagtcgcccggaaccgatgtgggccgaattactggctcttgcagcgtctgcccagggacgtgtgtatcgcgcggaagaccctcatggtgcgctccgcggcctcttcgaagtccgtggactccttgccaaagacttagctgttgttgcattgcgcgaaggtcttgatttacctccgactgatgatccaatgcttcttgcgtacctcttggacccgtcaaacacgacgcccgaaggcgtagcccgtcgttacggcggcgagtggaccgaagatgcagcgaaacgcgcgttattggccgaacgtttgcacgaaaatttattaggacgtttgcaaggcgaggaacgtctcctctggctttgggaagaagtggagaaaccattgagtcgcgtgctcgcgcatatggaagctaccggtgtcaaattagacgtggcgtatttggagaatctcagccttgaagttgctgcccacatgcgccgcttggaggaagaagtattccgtttagcaggccgttcctttcgccttaactctcgcgatcagttagaacgtgtgttgttcgatgaacttggtctccctcctatcggcaagacagagaagaccggtaaacgtagcacttcagcggcggttttagaagctcttcgcgaagtccatcccattgtggacaagatcttgcagtaccgcgaaatggcgaaattgaaaggcacctatattgaccgtcttccggcattagtccacccgaaaacgggacgcctccatacccgcttcaaccaaacagccacggcgaccggtcgtttgtcctcctctgatccaaaccttcagaatattccagtacgtaccccattgggccagaagatccgccgtgcgtttgtagctgaggagggttggcgtttagtggccctcgattatcgtcaaattgaattacgtgtccttgcccatctttctggcgatgagaacctcatccgcgtgtttcaggaaggcaaagacattcacactcaaacggcaagctggatgtttggattatcagctgaagcgatcgatcctttgatgcgtcgtgcagcgaagaccatcaatttcggtgttctctacggtatgagtgcctttcgtttgtcgcaggaattaggcattccctatgaagaagctcaggcgttcattcagaaatactttcaaagctatcccaaagttaaagcatggatcgagaagactctccgtgaaggccgcacacgtggttacgtagagaccttatttggacgtcgccgctatgttcccgatttaaacgctcgcgtgaaaggcaagcgtgaagccgccgaacgcatggcgttcaacatgcctgtacagggcacggcagctgacctcatgaaacttgcaatggtgcgcctttttccacaattgcgtgaagttggtgcccgcatgctcttgcaggtccacgatgaactcttgttagaagcgccaaaagagcgtgcggaagaggtggcagccctcgcgaaagaagttatggaaggcgtgtggcccttagcggtgcctcttgaagtcgaagttggtattggcgaggattggctggctgccaaagga

SEQ ID NO: 5818 - protein, 841 aa, synthetic construct
  REGION 1..841: note = Variant of DNA polymerase I from Thermus sp. strain 2.9
MHHHHHHGGSGVLPVFEPKGRVLLVDGHHLAYRNFFALKGLTTSLGEPVQGVYGFAKSLLKALKEDGDVVIVVFDAKAPSFRHEAYEAYKAGRAPTPEDFPRQLALMKELVDLLGLERLEVPGFEADDVLATLAKKAEREGYEVQILTADRDLFQLLSPRISVLHPEGHRITPEWLWEKYGLRPEQWVDFRALAGDPSDNIPGVKGIGEKTALKLLKEWGSLENLLKNLDQVKPESVREKILAHLEDLKLSRELSRVRTDLPLEVDFGRRREPDWEGLKAFLERLEFGSLLHEFGLLESPLLAEEAPWPPPEGAFLGYRLSRPEPMWAELLALAASAQGRVYRAEDPHGALRGLFEVRGLLAKDLAVVALREGLDLPPTDDPMLLAYLLDPSNTTPEGVARRYGGEWTEDAAKRALLAERLHENLLGRLQGEERLLWLWEEVEKPLSRVLAHMEATGVKLDVAYLENLSLEVAAHMRRLEEEVFRLAGRSFRLNSRDQLERVLFDELGLPPIGKTEKTGKRSTSAAVLEALREVHPIVDKILQYREMAKLKGTYIDRLPALVHPKTGRLHTRFNQTATATGRLSSSDPNLQNIPVRTPLGQKIRRAFVAEEGWRLVALDYRQIELRVLAHLSGDENLIRVFQEGKDIHTQTASWMFGLSAEAIDPLMRRAAKTINFGVLYGMSAFRLSQELGIPYEEAQAFIQKYFQSYPKVKAWIEKTLREGRTRGYVETLFGRRRYVPDLNARVKGKREAAERMAFNMPVQGTAADLMKLAMVRLFPQLREVGARMLLQVHDELLLEAPKERAEEVAALAKEVMEGVWPLAVPLEVEVGIGEDWLAAKG

SEQ ID NO: 5819 - DNA, 2523 bp, synthetic construct
  misc_feature 1..2523: note = Variant of DNA polymerase I from Thermus sp. strain 2.9
  source 1..2523: mol_type = other DNA
atgcaccatcatcatcatcatggcggtagcggcgtgttaccggtgttcgagcctaaaggtcgcgtgcttctggttgatggccatcatctcgcgtatcgtaacttctttgccctgaaaggattaaccaccagcctgggcgagccggtacagggtgtctacggctttgcaaagtcgctcctgaaagctctgaaagaagacggtgatgtggtgattgttgtctttgatgcgaaagcgccaagttttcgccacgaagcgtacgaagcttacaaagccgggcgtgctccaacgccggaagactttcctcgccaattggcgcttatgaaggaattagtggatttgcttggcctcgaacgcttggaagttcccggtttcgaggcagacgacgtattagcgactctcgcaaagaaagccgaacgtgagggctatgaagtccagatcttgacagcagatcgcgatcttttccagcttttatctccgcgcatctcggtgttacacccggaagggcatcgtatcaccccggaatggctctgggagaaatatggtttgcgtcccgaacaatgggtggattttcgcgccttagcaggcgatccgagcgacaatattccgggagttaaaggtatcggcgagaagacggcgctcaagctccttaaagaatgggggtcgttggagaacttgcttaagaatttagatcaggtcaaaccagagtcagtgcgtgagaagattcttgctcacctcgaagacctcaaattaagccgcgaattgtcccgtgtacgcaccgatttgccgctcgaagttgatttcggtcgccgccgcgaacctgactgggagggtcttaaagcgtttttagagcgtcttgaatttggttcgctcttgcatgaattcggccttttagaaagcccgttactggccgaagaagcaccttggccaccgcccgagggcgcgtttttaggttaccgtttgagtcgcccggaaccgatgtgggccgaattactggctcttgcagcgtctgcccagggacgtgtgtatcgcgcggaagaccctcatggtgcgctccgcggcctcttcgaagtccgtggactccttgccaaagacttagctgttgttgcattgcgcgaaggtcttgatttacctccgactgatgatccaatgcttgaggcgtacctcttggacccgtcaaacacgacgcccgaaggcgtagcccgtcgttacggcggcgagtggaccgaagatgcagcgaaacgcgcgttattggccgaacgtttgcacgaaaatttattaggacgtttgcaaggcgaggaacgtctcctctggctttacgaagaagtggagaaaccattgagtcgcgtgctcgcgcatatggaagctaccggtgtcaaattagacgtggcgtatttggagaatctcagccttgaagttgctgcccacatgcgccgcttggaggaagaagtattccgtttagcaggccgttcctttcgccttaactctcgcgatcagttagaacgtgtgttgttcgatgaacttggtctccctcctatcggcaagacagagaagaccggtaaacgtagcacttcagcggcggttttagaagctcttcgcgaagtccatcccattgtggacaagatcttgcagtaccgcgaaatggcgaaattgaaaggcacctatattgaccgtcttccggcattagtccacccgaaaacgggacgcctccatacccgcttcaaccaaacagccacggcgaccggtcgtttgtcctcctctgatccaaaccttcagaatattccagtacgtaccccattgggccagaagatccgccgtgcgtttgtagctgaggagggttggcgtttagtggccctcgattatcgtcaaattgaattacgtgtccttgcccatctttctggcgatgagaacctcatccgcgtgtttcaggaaggcaaagacattcacactcaaacggcaagctggatgtttggattatcagctgaagcgatcgatcctttgatgcgtcgtgcagcgaagaccatcaatttcggtgttctctacggtatgagtgcctttcgtttgtcgcaggaattaggcattccctatgaagaagctcaggcgttcattcagaaatactttcaaagctatcccaaagttaaagcatggatcgagaagactctccgtgaaggccgcacacgtggttacgtagagaccttatttggacgtcgccgctatgttcccgatttaaacgctcgcgtgaaaggcaagcgtgaagccgccgaacgcatggcgttcaacatgcctgtacagggcacggcagctgacctcatgaaacttgcaatggtgcgcctttttccacaattgcgtgaagttggtgcccgcatgctcttgcaggtccacgatgaactcttgttagaagcgccaaaagagcgtgcggaagaggtggcagccctcgcgaaagaagttatggaaggcgtgtggcccttagcggtgcctcttgaagtcgaagttggtattggcgaggattggctggctgccaaagga

SEQ ID NO: 5820 - protein, 841 aa, synthetic construct
  REGION 1..841: note = Variant of DNA polymerase I from Thermus sp. strain 2.9
MHHHHHHGGSGVLPVFEPKGRVLLVDGHHLAYRNFFALKGLTTSLGEPVQGVYGFAKSLLKALKEDGDVVIVVFDAKAPSFRHEAYEAYKAGRAPTPEDFPRQLALMKELVDLLGLERLEVPGFEADDVLATLAKKAEREGYEVQILTADRDLFQLLSPRISVLHPEGHRITPEWLWEKYGLRPEQWVDFRALAGDPSDNIPGVKGIGEKTALKLLKEWGSLENLLKNLDQVKPESVREKILAHLEDLKLSRELSRVRTDLPLEVDFGRRREPDWEGLKAFLERLEFGSLLHEFGLLESPLLAEEAPWPPPEGAFLGYRLSRPEPMWAELLALAASAQGRVYRAEDPHGALRGLFEVRGLLAKDLAVVALREGLDLPPTDDPMLEAYLLDPSNTTPEGVARRYGGEWTEDAAKRALLAERLHENLLGRLQGEERLLWLYEEVEKPLSRVLAHMEATGVKLDVAYLENLSLEVAAHMRRLEEEVFRLAGRSFRLNSRDQLERVLFDELGLPPIGKTEKTGKRSTSAAVLEALREVHPIVDKILQYREMAKLKGTYIDRLPALVHPKTGRLHTRFNQTATATGRLSSSDPNLQNIPVRTPLGQKIRRAFVAEEGWRLVALDYRQIELRVLAHLSGDENLIRVFQEGKDIHTQTASWMFGLSAEAIDPLMRRAAKTINFGVLYGMSAFRLSQELGIPYEEAQAFIQKYFQSYPKVKAWIEKTLREGRTRGYVETLFGRRRYVPDLNARVKGKREAAERMAFNMPVQGTAADLMKLAMVRLFPQLREVGARMLLQVHDELLLEAPKERAEEVAALAKEVMEGVWPLAVPLEVEVGIGEDWLAAKG

SEQ ID NO: 5821 - DNA, 2523 bp, synthetic construct
  misc_feature 1..2523: note = Variant of DNA polymerase I from Thermus sp. strain 2.9
  source 1..2523: mol_type = other DNA
atgcaccatcatcatcatcatggcggtagcggcgtgttaccggtgttcgagcctaaaggtcgcgtgcttctggttgatggccatcatctcgcgtatcgtaacttctttgccctgaaaggattaaccaccagcctgggcgagccggtacagggtgtctacggctttgcaaagtcgctcctgaaagctctgaaagaagacggtgatgtggtgattgttgtctttgatgcgaaagcgccaagttttcgccacgaagcgtacgaagcttacaaagccgggcgtgctccaacgccggaagactttcctcgccaattggcgcttatgaaggaattagtggatttgcttggcctcgaacgcttggaagttcccggtttcgaggcagacgacgtattagcgactctcgcaaagaaagccgaacgtgagggctatgaagtccagatcttgacagcagatcgcgatcttttccagcttttatctccgcgcatctcggtgttacacccggaagggcatcgtatcaccccggaatggctctgggagaaatatggtttgcgtcccgaacaatgggtggattttcgcgccttagcaggcgatccgagcgacaatattccgggagttaaaggtatcggcgagaagacggcgctcaagctccttaaagaatgggggtcgttggagaacttgcttaagaatttagatcaggtcaaaccagagtcagtgcgtgagaagattcttgctcacctcgaagacctcaaattaagccgcgaattgtcccgtgtacgcaccgatttgccgctcgaagttgatttcggtcgccgccgcgaacctgactgggagggtcttaaagcgtttttagagcgtcttgaatttggttcgctcttgcatgaattcggccttttagaaagcccgttactggccgaagaagcaccttggccaccgcccgagggcgcgtttttaggttaccgtttgagtcgcccggaaccgatgtgggccgaattactggctcttgcagcgtctgcccagggacgtgtgtatcgcgcggaagaccctcatggtgcgctccgcggcctcttcgaagtccgtggactccttgccaaagacttagctgttgttgcattgcgcgaaggtcttgatttacctccgactgatgatccaatgcttcttgcgtacctcttggacccgtcaaacacgacgcccgaaggcgtagcccgtcgttacggcggcgagtggaccgaagatgcagcgtcgcgcgcgttattggccgaacgtttgcacgaaaatttattaggacgtttgcaaggcgaggaacgtctcctctggctttacgaagaagtggagaaaccattgagtcgcgtgctcgcgcatatggaagctaccggtgtcaaattagacgtggcgtatttggagaatctcagccttgaagttgctgcccacatgcgccgcttggaggaagaagtattccgtttagcaggccgttcctttcgccttaactctcgcgatcagttagaacgtgtgttgttcgatgaacttggtctccctcctatcggcaagacagagaagaccggtaaacgtagcacttcagcggcggttttagaagctcttcgcgaagtccatcccattgtggacaagatcttgcagtaccgcgaaatggcgaaattgaaaggcacctatattgaccgtcttccggcattagtccacccgaaaacgggacgcctccatacccgcttcaaccaaacagccacggcgaccggtcgtttgtcctcctctgatccaaaccttcagaatattccagtacgtaccccattgggccagaagatccgccgtgcgtttgtagctgaggagggttggcgtttagtggccctcgattatcgtcaaattgaattacgtgtccttgcccatctttctggcgatgagaacctcatccgcgtgtttcaggaaggcaaagacattcacactcaaacggcaagctggatgtttggattatcagctgaagcgatcgatcctttgatgcgtcgtgcagcgaagaccatcaatttcggtgttctctacggtatgagtgcctttcgtttgtcgcaggaattaggcattccctatgaagaagctcaggcgttcattcagaaatactttcaaagctatcccaaagttaaagcatggatcgagaagactctccgtgaaggccgcacacgtggttacgtagagaccttatttggacgtcgccgctatgttcccgatttaaacgctcgcgtgaaaggcaagcgtgaagccgccgaacgcatggcgttcaacatgcctgtacagggcacggcagctgacctcatgaaacttgcaatggtgcgcctttttccacaattgcgtgaagttggtgcccgcatgctcttgcaggtccacgatgaactcttgttagaagcgccaaaagagcgtgcggaagaggtggcagccctcgcgaaagaagttatggaaggcgtgtggcccttagcggtgcctcttgaagtcgaagttggtattggcgaggattggctggctgccaaagga

SEQ ID NO: 5822 - protein, 841 aa, synthetic construct
  REGION 1..841: note = Variant of DNA polymerase I from Thermus sp. strain 2.9
MHHHHHHGGSGVLPVFEPKGRVLLVDGHHLAYRNFFALKGLTTSLGEPVQGVYGFAKSLLKALKEDGDVVIVVFDAKAPSFRHEAYEAYKAGRAPTPEDFPRQLALMKELVDLLGLERLEVPGFEADDVLATLAKKAEREGYEVQILTADRDLFQLLSPRISVLHPEGHRITPEWLWEKYGLRPEQWVDFRALAGDPSDNIPGVKGIGEKTALKLLKEWGSLENLLKNLDQVKPESVREKILAHLEDLKLSRELSRVRTDLPLEVDFGRRREPDWEGLKAFLERLEFGSLLHEFGLLESPLLAEEAPWPPPEGAFLGYRLSRPEPMWAELLALAASAQGRVYRAEDPHGALRGLFEVRGLLAKDLAVVALREGLDLPPTDDPMLLAYLLDPSNTTPEGVARRYGGEWTEDAASRALLAERLHENLLGRLQGEERLLWLYEEVEKPLSRVLAHMEATGVKLDVAYLENLSLEVAAHMRRLEEEVFRLAGRSFRLNSRDQLERVLFDELGLPPIGKTEKTGKRSTSAAVLEALREVHPIVDKILQYREMAKLKGTYIDRLPALVHPKTGRLHTRFNQTATATGRLSSSDPNLQNIPVRTPLGQKIRRAFVAEEGWRLVALDYRQIELRVLAHLSGDENLIRVFQEGKDIHTQTASWMFGLSAEAIDPLMRRAAKTINFGVLYGMSAFRLSQELGIPYEEAQAFIQKYFQSYPKVKAWIEKTLREGRTRGYVETLFGRRRYVPDLNARVKGKREAAERMAFNMPVQGTAADLMKLAMVRLFPQLREVGARMLLQVHDELLLEAPKERAEEVAALAKEVMEGVWPLAVPLEVEVGIGEDWLAAKG

SEQ ID NO: 5823 - DNA, 2523 bp, synthetic construct
  misc_feature 1..2523: note = Variant of DNA polymerase I from Thermus sp. strain 2.9
  source 1..2523: mol_type = other DNA
atgcaccatcatcatcatcatggcggtagcggcgtgttaccggtgttcgagcctaaaggtcgcgtgcttctggttgatggccatcatctcgcgtatcgtaacttctttgccctgaaaggattaaccaccagccgcggcgagccggtacagggtgtctacggctttgcaaagtcgctcctgaaagctctgaaagaagacggtgatgtggtgattgttgtctttgatgcgaaagcgccaagttttcgccacgaagcgtacgaagcttacaaagccgggcgtgctccaacgccggaagactttcctcgccaattggcgcttatgaaggaattagtggatttgcttggcctcgaacgcttggaagttcccggtttcgaggcagacgacgtattagcgactctcgcaaagaaagccgaacgtgagggctatgaagtccagatcttgacagcagatcgcgatcttttccagcttttatctccgcgcatctcggtgttacacccggaagggcatcgtatcaccccggaatggctctgggagaaatatggtttgcgtcccgaacaatgggtggattttcgcgccttagcaggcgatccgagcgacaatattccgggagttaaaggtatcggcgagaagacggcgctcaagctccttaaagaatgggggtcgttggagaacttgcttaagaatttagatcaggtcaaaccagagtcagtgcgtgagaagattcttgctcacctcgaagacctcaaattaagccgcgaattgtcccgtgtacgcaccgatttgccgctcgaagttgatttcggtcgccgccgcgaacctgactgggagggtcttaaagcgtttttagagcgtcttgaatttggttcgctcttgcatgaattcggccttttagaaagcccgttactggccgaagaagcaccttggccaccgcccgagggcgcgtttttaggttaccgtttgagtcgcccggaaccgatgtgggccgaattactggctcttgcagcgtctgcccagggacgtgtgtatcgcgcggaagaccctcatggtgcgctccgcggcctcttcgaagtccgtggactccttgccaaagacttagctgttgttgcattgcgcgaaggtcttgatttacctccgactgatgatccaatgcttcttgcgtacctcttggacccgtcaaacacgacgcccgaaggcgtagcccgtcgttacggcggcgagtggaccgaagatgcagcgaaacgcgcgttattggccgaacgtttgcacgcaaatttattaggacgtttgcaaggcgaggaacgtctcctctggctttacgaagaagtggagaaaccattgagtcgcgtgctcgcgcatatggaagctaccggtgtcaaattagacgtggcgtatttggaggcccttcaccttgaagttgctgcccacatgcgccgcttggaggaagaagtattccgtttagcaggccgttcctttcgccttaactctcgcgatcagttagaacgtgtgttgttcgatgaacttggtctccctcctatcggcaagacagagaagaccggtaaacgtagcacttcagcggcggttttagaagctcttcgcgaagtccatcccattgtggacaagatcttgcagtaccgcgaactggcgaaattgaaaggcacctatattgaccgtcttccggcattagtccacccgaaaacgggacgcctccatacccgcttcaaccaaacagccacggcgaccggtcgtttgtcctcctctgatccaaaccttcagaatattccagtacgtaccccattgggccagaagatccgccgtgcgtttgtagctgaggagggttggcgtttagtggccctcgattatcgtcaaattgaattacgtgtccttgcccatctttctggcgatgagaacctcatccgcgtgtttcaggaaggcaaagacattcacactcaaacggcaagctggatgtttggattatcagctgaagcgatcgatcctttgatgcgtcgtgcagcgaagaccatcaatttcggtgttctctacggtatgagtgcctttcgtttgtcgcaggaattaggcattccctatgaagaagctcaggcgttcattcagaaatactttcaaagctatcccaaagttaaagcatggatcgagaagactctcgaggaaggccgcacacgtggttacgtagagaccttatttggacgtcgccgctatgttcccgatttaaacgctcgcgtgaaaggcgtacgtgaagccgccgaacgcatggcgttcaacatgcctgtacagggcacggcagctgacctcatgaaacttgcaatggtgcgcctttttccacaattgcgtgaagttggtgcccgcatgctcttgcaggtccacgatgaactcttgttagaagcgccaaaagagcgtgcggaagaggtggcagccctcgcgaaagaagttatggaaggcgtgtggcccttagcggtgcctcttgaagtcgaagttggtattggcgaggattggctggctgccaaagga

SEQ ID NO: 5824 - protein, 841 aa, synthetic construct
  REGION 1..841: note = Variant of DNA polymerase I from Thermus sp. strain 2.9
MHHHHHHGGSGVLPVFEPKGRVLLVDGHHLAYRNFFALKGLTTSRGEPVQGVYGFAKSLLKALKEDGDVVIVVFDAKAPSFRHEAYEAYKAGRAPTPEDFPRQLALMKELVDLLGLERLEVPGFEADDVLATLAKKAEREGYEVQILTADRDLFQLLSPRISVLHPEGHRITPEWLWEKYGLRPEQWVDFRALAGDPSDNIPGVKGIGEKTALKLLKEWGSLENLLKNLDQVKPESVREKILAHLEDLKLSRELSRVRTDLPLEVDFGRRREPDWEGLKAFLERLEFGSLLHEFGLLESPLLAEEAPWPPPEGAFLGYRLSRPEPMWAELLALAASAQGRVYRAEDPHGALRGLFEVRGLLAKDLAVVALREGLDLPPTDDPMLLAYLLDPSNTTPEGVARRYGGEWTEDAAKRALLAERLHANLLGRLQGEERLLWLYEEVEKPLSRVLAHMEATGVKLDVAYLEALHLEVAAHMRRLEEEVFRLAGRSFRLNSRDQLERVLFDELGLPPIGKTEKTGKRSTSAAVLEALREVHPIVDKILQYRELAKLKGTYIDRLPALVHPKTGRLHTRFNQTATATGRLSSSDPNLQNIPVRTPLGQKIRRAFVAEEGWRLVALDYRQIELRVLAHLSGDENLIRVFQEGKDIHTQTASWMFGLSAEAIDPLMRRAAKTINFGVLYGMSAFRLSQELGIPYEEAQAFIQKYFQSYPKVKAWIEKTLEEGRTRGYVETLFGRRRYVPDLNARVKGVREAAERMAFNMPVQGTAADLMKLAMVRLFPQLREVGARMLLQVHDELLLEAPKERAEEVAALAKEVMEGVWPLAVPLEVEVGIGEDWLAAKG

SEQ ID NO: 5825 - DNA, 2523 bp, synthetic construct
  misc_feature 1..2523: note = Variant of DNA polymerase I from Thermus sp. strain 2.9
  source 1..2523: mol_type = other DNA
atgcaccatcatcatcatcatggcggtagcggcgtgttaccggtgttcgagcctaaaggtcgcgtgcttctggttgatggccatcatctcgcgtatcgtaacttctttgccctgaaaggattaaccaccagcctgggcgagccggtacagggtgtctacggctttgcaaagtcgctcctgaaagctctgaaagaagacggtgatgtggtgattgttgtctttgatgcgaaagcgccaagttttcgccacgaagcgtacgaagcttacaaagccgggcgtgctccaacgccggaagactttcctcgccaattggcgcttatgaaggaattagtggatttgcttggcctcgaacgcttggaagttcccggtttcgaggcagacgacgtattagcgactctcgcaaagaaagccgaacgtgagggctatgaagtccagatcttgacagcagatcgcgatcttttccagcttttatctccgcgcatctcggtgttacacccggaagggcatcgtatcaccccggaatggctctgggagaaatatggtttgcgtcccgaacaatgggtggattttcgcgccttagcaggcgatccgagcgacaatattccgggagttaaaggtatcggcgagaagacggcgctcaagctccttaaagaatgggggtcgttggagaacttgcttaagaatttagatcaggtcaaaccagagtcagtgcgtgagaagattcttgctcacctcgaagacctcaaattaagccgcgaattgtcccgtgtacgcaccgatttgccgctcgaagttgatttcggtcgccgccgcgaacctgactgggagggtcttaaagcgtttttagagcgtcttgaatttggttcgctcttgcatgaattcggccttttagaaagcccgttactggccgaagaagcaccttggccaccgcccgagggcgcgtttttaggttaccgtttgagtcgcccggaaccgatgtgggccgaattactggctcttgcagcgtctgcccagggacgtgtgtatcgcgcggaagaccctcatggtgcgctccgcggcctcttcgaagtccgtaccctccttgccaaagacttagctgttgttgcattgcgcgaaggtcttgatttacctccgactgatgatccaatgcttcttgcgtacctcttggacccgtcaaacacgacgcccgaaggcgtagcccgtcgttacggcggcgagtggaccgaagatgcaggcaaacgcgcgttattggccgaacgtttgcacgaaaatttattaggacgtttgcaaggcgaggcgcgtctcctgtggctttacgaagaagtggagaaaccattgagtcgcgtgctcgcgcatatggaagctaccggtgtcaaattagacgtggcgtatttggagaatctcagccttgaagttgctgcccacatgcgccgcttggaggaagaagtattccgtttagcaggccgttcctttcgccttaactctcgcgatcagttagaacgtgtgttgttcgatgaacttggtctccctcctatcggcaagacagagaagaccggtaaacgtagcacttcagcggcggttttagaagctcttcgcgaagtccatcccattgtggacaagatcttgcagtaccgcgaaatggcgaaattgaaaggcacctatattgaccgtcttccggcattagtccacccgaaaacgggacgcctccatacccgcttcaaccaaacagccacggcgaccggtcgtttgtcctcctctgatccaaaccttcagaatattccagtacgtaccccattgggccagaagatccgccgtgcgtttgtagctgagccgggttgggcgttagtggccctcgattatcgtcaaattgaattacgtgtccttgcccatctttctggcgatgagaacctcatccgcgtgtttcaggaaggcaaagacattcacactcaaacggcaagctggatgtttggattatcagctgaagcgatcgatcctttgatgcgtcgtgcagcgaagaccatcaatttcggtgttctctacggtatgagtgcctttcgtttgtcgcaggaattaggcattccctatgaagaagctcaggcgttcattcagaaatactttcaaggctatcccaaagttaaagcatggatcgagaagactctccgtgaaggccgcacacgtggttacgtagagaccttatttggacgtcgccgctatgttcccgatttaaacgctcgcgtgaaaggcaagcgtgaagccgccgaacgcatggcgttcaacatgcctgtacagggcacggcagctgacctcatgaaacttgcaatggtgcgcctttttccacaattgcgtgaagttggtgcccgcatgctgttgcaggtccacgatgaactcttgttagaagcgccaaaagagcgtgcggaagaggtggcagccctcgcgaaagaagttatggaaggcgtgtggcccttagcggtgcctcttgaagtcgaagttggtattggcgaggattggctggctgccaaagga

SEQ ID NO: 5826 - protein, 841 aa, synthetic construct
  REGION 1..841: note = Variant of DNA polymerase I from Thermus sp. strain 2.9
MHHHHHHGGSGVLPVFEPKGRVLLVDGHHLAYRNFFALKGLTTSLGEPVQGVYGFAKSLLKALKEDGDVVIVVFDAKAPSFRHEAYEAYKAGRAPTPEDFPRQLALMKELVDLLGLERLEVPGFEADDVLATLAKKAEREGYEVQILTADRDLFQLLSPRISVLHPEGHRITPEWLWEKYGLRPEQWVDFRALAGDPSDNIPGVKGIGEKTALKLLKEWGSLENLLKNLDQVKPESVREKILAHLEDLKLSRELSRVRTDLPLEVDFGRRREPDWEGLKAFLERLEFGSLLHEFGLLESPLLAEEAPWPPPEGAFLGYRLSRPEPMWAELLALAASAQGRVYRAEDPHGALRGLFEVRTLLAKDLAVVALREGLDLPPTDDPMLLAYLLDPSNTTPEGVARRYGGEWTEDAGKRALLAERLHENLLGRLQGEARLLWLYEEVEKPLSRVLAHMEATGVKLDVAYLENLSLEVAAHMRRLEEEVFRLAGRSFRLNSRDQLERVLFDELGLPPIGKTEKTGKRSTSAAVLEALREVHPIVDKILQYREMAKLKGTYIDRLPALVHPKTGRLHTRFNQTATATGRLSSSDPNLQNIPVRTPLGQKIRRAFVAEPGWALVALDYRQIELRVLAHLSGDENLIRVFQEGKDIHTQTASWMFGLSAEAIDPLMRRAAKTINFGVLYGMSAFRLSQELGIPYEEAQAFIQKYFQGYPKVKAWIEKTLREGRTRGYVETLFGRRRYVPDLNARVKGKREAAERMAFNMPVQGTAADLMKLAMVRLFPQLREVGARMLLQVHDELLLEAPKERAEEVAALAKEVMEGVWPLAVPLEVEVGIGEDWLAAKG

SEQ ID NO: 5827 - DNA, 2523 bp, synthetic construct
  misc_feature 1..2523: note = Variant of DNA polymerase I from Thermus sp. strain 2.9
  source 1..2523: mol_type = other DNA
atgcaccatcatcatcatcatggcggtagcggcgtgttaccggtgttcgagcctaaaggtcgcgtgcttctggttgatggccatcatctcgcgtatcgtaacttctttgccctgaaaggattaaccaccagcctgggcgagccggtacagggtgtctacggctttgcaaagtcgctcctgaaagctctgaaagaagacggtgatgtggtgattgttgtctttgatgcgaaagcgccaagttttcgccacgaagcgtacgaagcttacaaagccgggcgtgctccaacgccggaagactttcctcgccaattggcgcttatgaaggaattagtggatttgcttggcctcgaacgcttggaagttcccggtttcgaggcagacgacgtattagcgactctcgcaaagaaagccgaacgtgagggctatgaagtccagatcttgacagcagatcgcgatcttttccagcttttatctccgcgcatctcggtgttacacccggaagggcatcgtatcaccccggaatggctctgggagaaatatggtttgcgtcccgaacaatgggtggattttcgcgccttagcaggcgatccgagcgacaatattccgggagttaaaggtatcggcgagaagacggcgctcaagctccttaaagaatgggggtcgttggagaacttgcttaagaatttagatcaggtcaaaccagagtcagtgcgtgagaagattcttgctcacctcgaagacctcaaattaagccgcgaattgtcccgtgtacgcaccgatttgccgctcgaagttgatttcggtcgccgccgcgaacctgactgggagggtcttaaagcgtttttagagcgtcttgaatttggttcgctcttgcatgaattcggccttttagaaagcccgttactggccgaagaagcaccttggccaccgcccgagggcgcgtttttaggttaccgtttgagtcgcccggaaccgatgtgggccgaattactggctcttgcagcgtctgcccagggacgtgtgtatcgcgcggaagaccctcatggtgcgctccgcggcctcttcgaagtccgtggactccttgccaaagacttagctgttgttgcattgcgcgaaggtcttgatttacctccgactgatgatccaatgcttcttgcgtacctcttggacccgtcaaacacgacgcccgaaggcgtagcccgtcgttacggcggcgagtggaccgaagatgcacggaaacgcgcgttattggccgaacgtttgcacgaaaatttattaggacgtttgcaaggcgaggaacgtctcctctggctttacgaagaagtggagaaaccattgagtcgcgtgctcgcgcatatggaagctaccggtgtcaaattagacgtggcgtatttggagaatctcagccttgaagttgctgcccacatgcgccgcttggaggaagaagtattccgtttagcaggccgttcctttcgccttaactctcgcgatcagttagaacgtgtgttgttcgatgaacttggtctccctcctatcggcaagacagagaagaccggtaaacgtagcacttcagcggcggttttagaagctcttcgcgaagtccatcccattgtggacaagatcttgcagtaccgcgaaatggcgaaattgaaaggcacctatattgaccgtcttccggcattagtccacccgaaaacgggacgcctccatacccgcttcaaccaaacagccacggcgaccggtcgtttgtcctcctctgatccaaaccttcagaatattccagtacgtaccccattgggccagaagatccgccgtgcgtttgtagctgaggagggttggcgtttagtggccctcgattatcgtcaaattgaattacgtgtccttgcccatctttctggcgatgagaacctcatccgcgtgtttcaggaaggcaaagacattcacactcaaacggcaagctggatgtttggattatcagctgaagcgatcgatcctttgatgcgtcgtgcagcgaagaccatcaatttcggtgttctctacggtatgagtgcctttcgtttgtcgcaggaattaggcattccctatgaagaagctcaggcgttcattcagaaatactttcaaagctatcccaaagttaaagcatggatcgagaagactctccgtgaaggccgcacacgtggttacgtagagaccttatttggacgtcgccgctatgttcccgatttaaacgctcgcgtgaaaggcaagcgtgaagccgccgaacgcatggcgttcaacatgcctgtacagggcacggcagctgacctcatgaaacttgcaatggtgcgcctttttccacaattgcgtgaagttggtgcccgcatgctcttgcaggtccacgatgaactcttgttagaagcgccaaaagagcgtgcggaagaggtggcagccctcgcgaaagaagttatggaaggcgtgtggcccttagcggtgcctcttgaagtcgaagttggtattggcgaggattggctggctgccaaagga

SEQ ID NO: 5828 - protein, 841 aa, synthetic construct
  REGION 1..841: note = Variant of DNA polymerase I from Thermus sp. strain 2.9
MHHHHHHGGSGVLPVFEPKGRVLLVDGHHLAYRNFFALKGLTTSLGEPVQGVYGFAKSLLKALKEDGDVVIVVFDAKAPSFRHEAYEAYKAGRAPTPEDFPRQLALMKELVDLLGLERLEVPGFEADDVLATLAKKAEREGYEVQILTADRDLFQLLSPRISVLHPEGHRITPEWLWEKYGLRPEQWVDFRALAGDPSDNIPGVKGIGEKTALKLLKEWGSLENLLKNLDQVKPESVREKILAHLEDLKLSRELSRVRTDLPLEVDFGRRREPDWEGLKAFLERLEFGSLLHEFGLLESPLLAEEAPWPPPEGAFLGYRLSRPEPMWAELLALAASAQGRVYRAEDPHGALRGLFEVRGLLAKDLAVVALREGLDLPPTDDPMLLAYLLDPSNTTPEGVARRYGGEWTEDARKRALLAERLHENLLGRLQGEERLLWLYEEVEKPLSRVLAHMEATGVKLDVAYLENLSLEVAAHMRRLEEEVFRLAGRSFRLNSRDQLERVLFDELGLPPIGKTEKTGKRSTSAAVLEALREVHPIVDKILQYREMAKLKGTYIDRLPALVHPKTGRLHTRFNQTATATGRLSSSDPNLQNIPVRTPLGQKIRRAFVAEEGWRLVALDYRQIELRVLAHLSGDENLIRVFQEGKDIHTQTASWMFGLSAEAIDPLMRRAAKTINFGVLYGMSAFRLSQELGIPYEEAQAFIQKYFQSYPKVKAWIEKTLREGRTRGYVETLFGRRRYVPDLNARVKGKREAAERMAFNMPVQGTAADLMKLAMVRLFPQLREVGARMLLQVHDELLLEAPKERAEEVAALAKEVMEGVWPLAVPLEVEVGIGEDWLAAKG

SEQ ID NO: 5829 - DNA, 2523 bp, synthetic construct
  misc_feature 1..2523: note = Variant of DNA polymerase I from Thermus sp. strain 2.9
  source 1..2523: mol_type = other DNA
atgcaccatcatcatcatcatggcggtagcggcgtgttaccggtgttcgagcctaaaggtcgcgtgcttctggttgatggccatcatctcgcgtatcgtaacttctttgccctgaaaggattaaccaccagcctgggcgagccggtacagggtgtctacggctttgcaaagtcgctcctgaaagctctgaaagaagacggtgatgtggtgattgttgtctttgatgcgaaagcgccaagttttcgccacgaagcgtacgaagcttacaaagccgggcgtgctccaacgccggaagactttcctcgccaattggcgcttatgaaggaattagtggatttgcttggcctcgaacgcttggaagttcccggtttcgaggcagacgacgtattagcgactctcgcaaagaaagccgaacgtgagggctatgaagtccagatcttgacagcagatcgcgatcttttccagcttttatctccgcgcatctcggtgttacacccggaagggcatcgtatcaccccggaatggctctgggagaaatatggtttgcgtcccgaacaatgggtggattttcgcgccttagcaggcgatccgagcgacaatattccgggagttaaaggtatcggcgagaagacggcgctcaagctccttaaagaatgggggtcgttggagaacttgcttaagaatttagatcaggtcaaaccagagtcagtgcgtgagaagattcttgctcacctcgaagacctcaaattaagccgcgaattgtcccgtgtacgcaccgatttgccgctcgaagttgatttcggtcgccgccgcgaacctgactgggagggtcttaaagcgtttttagagcgtcttgaatttggttcgctcttgcatgaattcggccttttagaaagcccgttactggccgaagaagcaccttggccaccgcccgagggcgcgtttttaggttaccgtttgagtcgcccggaaccgatgtgggccgaattactggctcttgcagcgtctgcccagggacgtgtgtatcgcgcggaagaccctcatggtgcgctccgcggcctcttcgaagtccgtggactccttgccaaagacttagctgttgttgcattgcgcgaaagtcttgatttacctccgactgatgatccaatgcttcttgcgtacctcttggacccgtcaaacacgacgcccgaaggcgtagcccgtcgttacggcggcgagtggaccgaagatgcagcgaaacgcgcgttattggccgaacgtttgcacgaaaatttattaggacgtttgcaaggcgaggaacgtctcctctggctttacgaagaagtggagaaaccattgagtcgcgtgctcgcgcatatggaagctaccggtgtcaaattagacgtggcgtatttggagaatctcagccttgaagttgctgcccacatgcgccgcttggaggaagaagtattccgtttagcaggccgttcctttcgccttaactctcgcgatcagttagaacgtgtgttgttcgatgaacttggtctccctcctatcggcaagacagagaagaccggtaaacgtagcacttcagcggcggttttagaagctcttcgcgaagtccatcccattgtggacaagatcttgcagtaccgcgaaatggcgaaattgaaaggcacctatattgaccgtcttccggcattagtccacccgaaaacgggacgcctccatacccgcttcaaccaaacagccacggcgaccggtcgtttgtcctcctctgatccaaaccttcagaatattccagtacgtaccccattgggccagaagatccgccgtgcgtttgtagctgaggagggttggcgtttagtggccctcgattatcgtcaaattgaattacgtgtccttgcccatctttctggcgatgagaacctcatccgcgtgtttcaggaaggcaaagacattcacactcaaacggcaagctggatgtttggattatcagctgaagcgatcgatcctttgatgcgtcgtgcagcgaagaccatcaatttcggtgttctctacggtatgagtgcctttcgtttgtcgcaggaattaggcattccctatgaagaagctcaggcgttcattcagaaatactttcaaagctatcccaaagttaaagcatggatcgagaagactctccgtgaaggccgcacacgtggttacgtagagaccttatttggacgtcgccgctatgttcccgatttaaacgctcgcgtgaaaggcaagcgtgaagccgccgaacgcatggcgttcaacatgcctgtacagggcacggcagctgacctcatgaaacttgcaatggtgcgcctttttccacaattgcgtgaagttggtgcccgcatgctcttgcaggtccacgatgaactcttgttagaagcgccaaaagagcgtgcggaagaggtggcagccctcgcgaaagaagttatggaaggcgtgtggcccttagcggtgcctcttgaagtcgaagttggtattggcgaggattggctggctgccaaagga

SEQ ID NO: 5830 - protein, 841 aa, synthetic construct
  REGION 1..841: note = Variant of DNA polymerase I from Thermus sp. strain 2.9
MHHHHHHGGSGVLPVFEPKGRVLLVDGHHLAYRNFFALKGLTTSLGEPVQGVYGFAKSLLKALKEDGDVVIVVFDAKAPSFRHEAYEAYKAGRAPTPEDFPRQLALMKELVDLLGLERLEVPGFEADDVLATLAKKAEREGYEVQILTADRDLFQLLSPRISVLHPEGHRITPEWLWEKYGLRPEQWVDFRALAGDPSDNIPGVKGIGEKTALKLLKEWGSLENLLKNLDQVKPESVREKILAHLEDLKLSRELSRVRTDLPLEVDFGRRREPDWEGLKAFLERLEFGSLLHEFGLLESPLLAEEAPWPPPEGAFLGYRLSRPEPMWAELLALAASAQGRVYRAEDPHGALRGLFEVRGLLAKDLAVVALRESLDLPPTDDPMLLAYLLDPSNTTPEGVARRYGGEWTEDAAKRALLAERLHENLLGRLQGEERLLWLYEEVEKPLSRVLAHMEATGVKLDVAYLENLSLEVAAHMRRLEEEVFRLAGRSFRLNSRDQLERVLFDELGLPPIGKTEKTGKRSTSAAVLEALREVHPIVDKILQYREMAKLKGTYIDRLPALVHPKTGRLHTRFNQTATATGRLSSSDPNLQNIPVRTPLGQKIRRAFVAEEGWRLVALDYRQIELRVLAHLSGDENLIRVFQEGKDIHTQTASWMFGLSAEAIDPLMRRAAKTINFGVLYGMSAFRLSQELGIPYEEAQAFIQKYFQSYPKVKAWIEKTLREGRTRGYVETLFGRRRYVPDLNARVKGKREAAERMAFNMPVQGTAADLMKLAMVRLFPQLREVGARMLLQVHDELLLEAPKERAEEVAALAKEVMEGVWPLAVPLEVEVGIGEDWLAAKG

SEQ ID NO: 5831 - DNA, 2523 bp, synthetic construct
  misc_feature 1..2523: note = Variant of DNA polymerase I from Thermus sp. strain 2.9
  source 1..2523: mol_type = other DNA
atgcaccatcatcatcatcatggcggtagcggcgtgttaccggtgttcgagcctaaaggtcgcgtgcttctggttgatggccatcatctcgcgtatcgtaacttctttgccctgaaaggattaaccaccagcctgggcgagccggtacagggtgtctacggctttgcaaagtcgctcctgaaagctctgaaagaagacggtgatgtggtgattgttgtctttgatgcgaaagcgccaagttttcgccacgaagcgtacgaagcttacaaagccgggcgtgctccaacgccggaagactttcctcgccaattggcgcttatgaaggaattagtggatttgcttggcctcgaacgcttggaagttcccggtttcgaggcagacgacgtattagcgactctcgcaaagaaagccgaacgtgagggctatgaagtccagatcttgacagcagatcgcgatcttttccagcttttatctccgcgcatctcggtgttacacccggaagggcatcgtatcaccccggaatggctctgggagaaatatggtttgcgtcccgaacaatgggtggattttcgcgccttagcaggcgatccgagcgacaatattccgggagttaaaggtatcggcgagaagacggcgctcaagctccttaaagaatgggggtcgttggagaacttgcttaagaatttagatcaggtcaaaccagagtcagtgcgtgagaagattcttgctcacctcgaagacctcaaattaagccgcgaattgtcccgtgtacgcaccgatttgccgctcgaagttgatttcggtcgccgccgcgaacctgactgggagggtcttaaagcgtttttagagcgtcttgaatttggttcgctcttgcatgaattcggccttttagaaagcccgttactggccgaagaagcaccttggccaccgcccgagggcgcgtttttaggttaccgtttgagtcgcccggaaccgatgtgggccgaattactggctcttgcagcgtctgcccagggacgtgtgtatcgcgcggaagaccctcatggtgcgctccgcggcctcttcgaagtccgtggactccttgccaaagacttagctgttgttgcattgcgcgaaggtcttgatttacctccgactgatgatccaatgcttcttgcgtacctcttggacccgtcaaacacgacgcccgaaggcgtagcccgtcgttacggcggcgagtggaccgaagatgcagcgaaacgcgcgttattggccgaacgtttgcacgaaaatttattaggacgtttgcaaggcgaggaacgtctcctctggctttacgaagaagtggagaaaccattgagtcgcgtgctcgcgcatatggaagctaccggtgtcaaattagacgtggcgtatttggagaatctcagccttgaagttgctgcccacatgcgccgcttggaggaagaagtattccgtttagcaggccgttcctttcgccttaactctcgcgatcagttagaacgtgtgttgttcgatgaacttggtctccctcctatcggcaagacagagaagaccggtaaacgtagcacttcagcggcggttttagaagctcttcgcgaagtccatcccattgtggacaagatcttgcagtaccgcgaaatggcgaaattgaaaggcacctatattgaccgtcttccggcattagtccacccgaaaacgggacgcctccatacccgcttcaaccaaacagccacggcgaccggtcgtttgtcctcctctgatccaaaccttcagaatattccagtacgtaccccattgggccagaagatccgccgtgcgtttgtagctgaggagggttggcgtttagtggccctcgattatcgtcaaattgaattacgtgtccttgcccatctttctggcgatgagaacctcatccgcgtgtttcaggaaggcaaagacattcacactcaaacggcaagctggatgtttggattatcagctgaagcgatcgatcctttgatgcgtcgtgcagcgaagaccatcaatttcggtgttctctacggtatgagtgcctttcgtttgtcgcaggaattaggcattccctatgaagaagctcaggcgttcattcagaaatactttcaaagctatcccaaagttaaagcatggatcgagaagactctccgtgaaggccgcacacgtggttacgtagagaccttatttggacgtcgccgctatgttcccaagttaaacgctcgcgtgaaaggcaagcgtgaagccgccgaacgcatggcgttcaacatgcctgtacagggcacggcagctgacctcatgaaacttgcaatggtgcgcctttttccacaattgcgtgaagttggtgcccgcatgctcttgcaggtccacgatgaactcttgttagaagcgccaaaagagcgtgcggaagaggtggcagccctcgcgaaagaagttatggaaggcgtgtggcccttagcggtgcctcttgaagtcgaagttggtattggcgaggattggctggctgccaaagga

SEQ ID NO: 5832 - protein, 841 aa, synthetic construct
  REGION 1..841: note = Variant of DNA polymerase I from Thermus sp. strain 2.9
MHHHHHHGGSGVLPVFEPKGRVLLVDGHHLAYRNFFALKGLTTSLGEPVQGVYGFAKSLLKALKEDGDVVIVVFDAKAPSFRHEAYEAYKAGRAPTPEDFPRQLALMKELVDLLGLERLEVPGFEADDVLATLAKKAEREGYEVQILTADRDLFQLLSPRISVLHPEGHRITPEWLWEKYGLRPEQWVDFRALAGDPSDNIPGVKGIGEKTALKLLKEWGSLENLLKNLDQVKPESVREKILAHLEDLKLSRELSRVRTDLPLEVDFGRRREPDWEGLKAFLERLEFGSLLHEFGLLESPLLAEEAPWPPPEGAFLGYRLSRPEPMWAELLALAASAQGRVYRAEDPHGALRGLFEVRGLLAKDLAVVALREGLDLPPTDDPMLLAYLLDPSNTTPEGVARRYGGEWTEDAAKRALLAERLHENLLGRLQGEERLLWLYEEVEKPLSRVLAHMEATGVKLDVAYLENLSLEVAAHMRRLEEEVFRLAGRSFRLNSRDQLERVLFDELGLPPIGKTEKTGKRSTSAAVLEALREVHPIVDKILQYREMAKLKGTYIDRLPALVHPKTGRLHTRFNQTATATGRLSSSDPNLQNIPVRTPLGQKIRRAFVAEEGWRLVALDYRQIELRVLAHLSGDENLIRVFQEGKDIHTQTASWMFGLSAEAIDPLMRRAAKTINFGVLYGMSAFRLSQELGIPYEEAQAFIQKYFQSYPKVKAWIEKTLREGRTRGYVETLFGRRRYVPKLNARVKGKREAAERMAFNMPVQGTAADLMKLAMVRLFPQLREVGARMLLQVHDELLLEAPKERAEEVAALAKEVMEGVWPLAVPLEVEVGIGEDWLAAKG

SEQ ID NO: 5833 - DNA, 2523 bp, synthetic construct
  misc_feature 1..2523: note = Variant of DNA polymerase I from Thermus sp. strain 2.9
  source 1..2523: mol_type = other DNA
atgcaccatcatcatcatcatggcggtagcggcgtgttaccggtgttcgagcctaaaggtcgcgtgcttctggttgatggccatcatctcgcgtatcgtaacttctttgccctgaaaggattaaccaccagcctgggcgagccggtacagggtgtctacggctttgcaaagtcgctcctgaaagctctgaaagaagacggtgatgtggtgattgttgtctttgatgcgaaagcgccaagttttcgccacgaagcgtacgaagcttacaaagccgggcgtgctccaacgccggaagactttcctcgccaattggcgcttatgaaggaattagtggatttgcttggcctcgaacgcttggaagttcccggtttcgaggcagacgacgtattagcgactctcgcaaagaaagccgaacgtgagggctatgaagtccagatcttgacagcagatcgcgatcttttccagcttttatctccgcgcatctcggtgttacacccggaagggcatcgtatcaccccggaatggctctgggagaaatatggtttgcgtcccgaacaatgggtggattttcgcgccttagcaggcgatccgagcgacaatattccgggagttaaaggtatcggcgagaagacggcgctcaagctccttaaagaatgggggtcgttggagaacttgcttaagaatttagatcaggtcaaaccagagtcagtgcgtgagaagattcttgctcacctcgaagacctcaaattaagccgcgaattgtcccgtgtacgcaccgatttgccgctcgaagttgatttcggtcgccgccgcgaacctgactgggagggtcttaaagcgtttttagagcgtcttgaatttggttcgctcttgcatgaattcggccttttagaaagcccgttactggccgaagaagcaccttggccaccgcccgagggcgcgtttttaggttaccgtttgagtcgcccggaaccgatgtgggccgaattactggctcttgcagcgtctgcccagggacgtgtgtatcgcgcggaagaccctcatggtgcgctccgcggcctcttcgaagtccgtggactccttgccaaagacttagctgttgttgcattgcgcgaaggtcttgatttacctccgactgatgatccaatgcttcttgcgtacctcttggacccgtcaaacacgacgcccgaaggcgtagcccgtcgttacggcggcgagtggaccgaagatgcagcgaaacgcgcgttattggccgaacgtttgcacgaaaatttattaggacgtttgcaaggcgaggaacgtctcctctggctttacgaagaagtggagaaaccattgagtcgcgtgctcgcgcatatggaagctaccggtgtcaaattagacgtggcgtatttggagaatctcagccttgaagttgctgcccacatgcgccgcttggaggaagaagtattccgtttagcaggccgttcctttcgccttaactctcgcgatcagttagaacgtgtgttgttcgatgaacttggtctccctcctatcggcaagacagagaagaccggtaaacgtagcacttcagcggcggttttagaagctcttcgcgaagtccatcccattgtggacaagatcttgcagtaccgcgaaatggcgaaattgaaaggcacctatattgaccgtcttccggcattagtccacccgaaaacgggacgcctccatacccgcttcaaccaaacagccacggcgaccggtcgtttgtcctcctctgatccaaaccttcagaatattccagtacgtaccccattgggccagaagatccgccgtgcgtttgtagctgaggagggttggcgtttagtgcatctcgattatcgtcaaattgaattacgtgtccttgcccatctttctggcgatgagaacctcatccgcgtgtttcaggaaggcaaagacattcacactcaaacggcaagctggatgtttggattatcagctgaagcgatcgatcctttgatgcgtcgtgcagcgaagaccatcaatttcggtgttctctacggtatgagtgcctttcgtttgtcgcaggaattaggcattccctatgaagaagctcaggcgttcattcagaaatactttcaaagctatcccaaagttaaagcatggatcgagaagactctccgtgaaggccgcacacgtggttacgtagagaccttatttggacgtcgccgctatgttcccgatttaaacgctcgcgtgaaaggcaagcgtgaagccgccgaacgcatggcgttcaacatgcctgtacagggcacggcagctgacctcatgaaacttgcaatggtgcgcctttttccacaattgcgtgaagttggtgcccgcatgctcttgcaggtccacgatgaactcttgttagaagcgccaaaagagcgtgcggaagaggtggcagccctcgcgaaagaagttatggaaggcgtgtggcccttagcggtgcctcttgaagtcgaagttggtattggcgaggattggctggctgccaaagga

SEQ ID NO: 5834 - protein, 841 aa, synthetic construct
  REGION 1..841: note = Variant of DNA polymerase I from Thermus sp. strain 2.9
MHHHHHHGGSGVLPVFEPKGRVLLVDGHHLAYRNFFALKGLTTSLGEPVQGVYGFAKSLLKALKEDGDVVIVVFDAKAPSFRHEAYEAYKAGRAPTPEDFPRQLALMKELVDLLGLERLEVPGFEADDVLATLAKKAEREGYEVQILTADRDLFQLLSPRISVLHPEGHRITPEWLWEKYGLRPEQWVDFRALAGDPSDNIPGVKGIGEKTALKLLKEWGSLENLLKNLDQVKPESVREKILAHLEDLKLSRELSRVRTDLPLEVDFGRRREPDWEGLKAFLERLEFGSLLHEFGLLESPLLAEEAPWPPPEGAFLGYRLSRPEPMWAELLALAASAQGRVYRAEDPHGALRGLFEVRGLLAKDLAVVALREGLDLPPTDDPMLLAYLLDPSNTTPEGVARRYGGEWTEDAAKRALLAERLHENLLGRLQGEERLLWLYEEVEKPLSRVLAHMEATGVKLDVAYLENLSLEVAAHMRRLEEEVFRLAGRSFRLNSRDQLERVLFDELGLPPIGKTEKTGKRSTSAAVLEALREVHPIVDKILQYREMAKLKGTYIDRLPALVHPKTGRLHTRFNQTATATGRLSSSDPNLQNIPVRTPLGQKIRRAFVAEEGWRLVHLDYRQIELRVLAHLSGDENLIRVFQEGKDIHTQTASWMFGLSAEAIDPLMRRAAKTINFGVLYGMSAFRLSQELGIPYEEAQAFIQKYFQSYPKVKAWIEKTLREGRTRGYVETLFGRRRYVPDLNARVKGKREAAERMAFNMPVQGTAADLMKLAMVRLFPQLREVGARMLLQVHDELLLEAPKERAEEVAALAKEVMEGVWPLAVPLEVEVGIGEDWLAAKG

SEQ ID NO: 5835 - DNA, 2523 bp, synthetic construct
  misc_feature 1..2523: note = Variant of DNA polymerase I from Thermus sp. strain 2.9
  source 1..2523: mol_type = other DNA
atgcaccatcatcatcatcatggcggtagcggcgtgttaccggtgttcgagcctaaaggtcgcgtgcttctggttgatggccatcatctcgcgtatcgtaacttctttgccctgaaaggattaaccaccagccgcggcgagccggtacagggtgtctacggctttgcaaagtcgctcctgaaagctctgaaagaagacggtgatgtggtgattgttgtctttgatgcgaaagcgccaagttttcgccacgaagcgtacgaagcttacaaagccgggcgtgctccaacgccggaagactttcctcgccaattggcgcttatgaaggaattagtggatttgcttggcctcgaacgcttggaagttcccggtttcgaggcagacgacgtattagcgactctcgcaaagaaagccgaacgtgagggctatgaagtccagatcttgacagcagatcgcgatcttttccagcttttatctccgcgcatctcggtgttacacccggaagggcatcgtatcaccccggaatggctctgggagaaatatggtttgcgtcccgaacaatgggtggattttcgcgccttagcaggcgatccgagcgacaatattccgggagttaaaggtatcggcgagaagacggcgctcaagctccttaaagaatgggggtcgttggagaacttgcttaagaatttagatcaggtcaaaccagagtcagtgcgtgagaagattcttgctcacctcgaagacctcaaattaagccgcgaattgtcccgtgtacgcaccgatttgccgctcgaagttgatttccgccgccgccgcgaacctgactgggagggtcttaaagcgtttttagagcgtcttgaatttggttcgctcttgcatgaattcggccttttagaaagcccgttaccggccgaagaagcaccttggccaccgcccgagggcgcgtttttaggttaccgtttgagtcgcccggaaccgatgtgggccgaattactggctcttgcagcgtctgcccagggacgtgtgtatcgcgcggaagaccctcatggtgcgctccgcggcctcttcgaagtccgtggactccttgccaaagacttagctgttgttgcattgcgcgaaggtcttgatttacctccgactgatgatccaatgcttcttgcgtacctcttggacccgtcaaacacgacgcccgaaggcgtagcccgtcgttacggcggcgagtggaccgaagatgcagcgaaacgcgcgttattggccgaacgtttgcacgcaaatttattaggacgtttgcaaggcgaggaacgtctcctctggctttacgaagaagtggagaaaccattgagtcgcgtgctcgcgcatatggaagctaccggtgtcaaattagacgtggcgtatttggagaatctcagccttgaagttgctgcccacatgcgccgcttggaggaagaagtattccgtttagcaggccgttcctttcgccttaactctcgcgatcagttagaacgtgtgttgttcgatgaacttggtctccctcctatcggcaagacagagaagaccggtaaacgtagcacttcagcggcggttttagaagctcttcgcgaagtccatcccattgtggacaagatcttgcagtaccgcgaaatggcgaaattgaaaggcacctatattgaccgtcttccggcattagtccacccgaaaacgggacgcctccatacccgcttcaaccaaacagccacggcgaccggtcgtttgtcctcctctgatccaaaccttcagaatattccagtacgtaccccattgggccagaagatccgccgtgcgtttgtagctgaggagggttggcgtttagtggccctcgattatcgtcaaattgaattacgtgtccttgcccatctttctggcgatgagaacctcatccgcgtgtttcaggaaggcaaagacattcacactcaaacggcaagctggatgtttggattatcagctgaagcgatcgatcctttgatgcgtcgtgcagcgaagaccatcaatttcggtgttctctacggtatgagtgcctttcgtttgtcgcaggaattaggcattccctatgaagaagctcaggcgttcattcagaaatactttcaaagctatcccaaagttaaagcatggatcgagaagactctccgtgaaggccgcacacgtggttacgtagagaccttatttggacgtcgccgctatgttcccgatttaaacgctcgcgtgaaaggcaagcgtgaagccgccgaacgcatggcgttcaacatgcctgtacagggcacggcagctgacctcatgaaacttgcaatggtgcgcctttttccacaattgcgtgaagttggtgcccgcatgctcttgcaggtccacgatgaactcttgttagaagcgccaaaagagcgtgcggaagaggtggcagccctcgcgaaagaagttatggaaggcgtgtggcccttagcggtgcctcttgaagtcgaagttggtattggcgaggattggctggctgccaaagga

SEQ ID NO: 5836 - protein, 841 aa, synthetic construct
  REGION 1..841: note = Variant of DNA polymerase I from Thermus sp. strain 2.9
MHHHHHHGGSGVLPVFEPKGRVLLVDGHHLAYRNFFALKGLTTSRGEPVQGVYGFAKSLLKALKEDGDVVIVVFDAKAPSFRHEAYEAYKAGRAPTPEDFPRQLALMKELVDLLGLERLEVPGFEADDVLATLAKKAEREGYEVQILTADRDLFQLLSPRISVLHPEGHRITPEWLWEKYGLRPEQWVDFRALAGDPSDNIPGVKGIGEKTALKLLKEWGSLENLLKNLDQVKPESVREKILAHLEDLKLSRELSRVRTDLPLEVDFRRRREPDWEGLKAFLERLEFGSLLHEFGLLESPLPAEEAPWPPPEGAFLGYRLSRPEPMWAELLALAASAQGRVYRAEDPHGALRGLFEVRGLLAKDLAVVALREGLDLPPTDDPMLLAYLLDPSNTTPEGVARRYGGEWTEDAAKRALLAERLHANLLGRLQGEERLLWLYEEVEKPLSRVLAHMEATGVKLDVAYLENLSLEVAAHMRRLEEEVFRLAGRSFRLNSRDQLERVLFDELGLPPIGKTEKTGKRSTSAAVLEALREVHPIVDKILQYREMAKLKGTYIDRLPALVHPKTGRLHTRFNQTATATGRLSSSDPNLQNIPVRTPLGQKIRRAFVAEEGWRLVALDYRQIELRVLAHLSGDENLIRVFQEGKDIHTQTASWMFGLSAEAIDPLMRRAAKTINFGVLYGMSAFRLSQELGIPYEEAQAFIQKYFQSYPKVKAWIEKTLREGRTRGYVETLFGRRRYVPDLNARVKGKREAAERMAFNMPVQGTAADLMKLAMVRLFPQLREVGARMLLQVHDELLLEAPKERAEEVAALAKEVMEGVWPLAVPLEVEVGIGEDWLAAKG

SEQ ID NO: 5837 - DNA, 2523 bp, synthetic construct
  misc_feature 1..2523: note = Variant of DNA polymerase I from Thermus sp. strain 2.9
  source 1..2523: mol_type = other DNA
atgcaccatcatcatcatcatggcggtagcggcgtgttaccggtgttcgagcctaaaggtcgcgtgcttctggttgatggccatcatctcgcgtatcgtaacttctttgccctgaaaggattaaccaccagcctgggcgagccggtacagggtgtctacggctttgcaaagtcgctcctgaaagctctgaaagaagacggtgatgtggtgattgttgtctttgatgcgaaagcgccaagttttcgccacgaagcgtacgaagcttacaaagccgggcgtgctccaacgccggaagactttcctcgccaattggcgcttatgaaggaattagtggatttgcttggcctcgaacgcttggaagttcccggtttcgaggcagacgacgtattagcgactctcgcaaagaaagccgaacgtgagggctatgaagtccagatcttgacagcagatcgcgatcttttccagcttttatctccgcgcatctcggtgttacacccggaagggcatcgtatcaccccggaatggctctgggagaaatatggtttgcgtcccgaacaatgggtggattttcgcgccttagcaggcgatccgagcgacaatattccgggagttaaaggtatcggcgagaagacggcgctcaagctccttaaagaatgggggtcgttggagaacttgcttaagaatttagatcaggtcaaaccagagtcagtgcgtgagaagattcttgctcacctcgaagacctcaaattaagccgcgaattgtcccgtgtacgcaccgatttgccgctcgaagttgatttcggtcgccgccgcgaacctgactgggagggtcttaaagcgtttttagagcgtcttgaatttggttcgctcttgcatgaattcggccttttagaaagcccgttactggccgaagaagcaccttggccaccgcccgagggcgcgtttttaggttaccgtttgagtcgcccggaaccgatgtgggccgaattactggctcttgcagcgtctgcccagggacgtgtgtatcgcgcggaagaccctcatggtgcgctccgcggcctcttcgaagtccgtaccctccttgccaaagacttagctgttgttgcattgcgcgaaggtcttgatttacctccgactgatgatccaatgcttcttgcgtacctcttggacccgtcaaacacgacgcccgaaggcgtagcccgtcgttacggcggcgagtggaccgaagatgcaggcaaacgcgcgttattggccgaacgtttgcacgaaaatttattaggacgtttgcaaggcgaggaacgtctcctctggctttacgaagaagtggagaaaccattgagtcgcgtgctcgcgcatatggaagctaccggtgtcaaattagacgtggcgtatttggagaatctcagccttgaagttgctgcccacatgcgccgcttggaggaagaagtattccgtttagcaggccgttcctttcgccttaactctcgcgatcagttagaacgtgtgttgttcgatgaacttggtctccctcctatcggcaagacagagaagaccggtaaacgtagcacttcagcggcggttttagaagctcttcgcgaagtccatcccattgtggacaagatcttgcagtaccgcgaaatggcgaaattgaaaggcacctatattgaccgtcttccggcattagtccacccgaaaacgggacgcctccatacccgcttcaaccaaacagccacggcgaccggtcgtttgtcctcctctgatccaaaccttcagaatattccagtacgtaccccattgggccagaagatccgccgtgcgtttgtagctgaggagggttggcgtttagtggccctcgattatcgtcaaattgaattacgtgtccttgcccatctttctggcgatgagaacctcatccgcgtgtttcaggaaggcaaagacattcacactcaaacggcaagctggatgtttggattatcagctgaagcgatcgatcctttgatgcgtcgtgcagcgaagaccatcaatttcggtgttctctacggtatgagtgcctttcgtttgtcgcaggaattaggcattcccctggaagaagctcagggtttcattcagaaatactttcaaagctatcccaaagttaaagcatggatcgagaagactctccgtgaaggccgcacacgtggttacgtagagaccttatttggacgtcgccgctatgttcccgatttaaacggtcgcgtgaaaggcaagcgtgaagccgccgaacgcatggcgttcaacatgcctgtacagggcacggcagctgacctcatgaaacttgcaatggtgcgcctttttccacaattgcgtgaagttggtgcccgcatgctgttgcaggtccacgatgaactcttgttagaagcgccaaaagagcgtgcggaagaggtggcagccctcgcgaaagaagttatggaaggcgtgtggcccttagcggtgcctcttgaagtcgaagttggtattggcgaggattggctggctgccaaagga

SEQ ID NO: 5838 - protein, 841 aa, synthetic construct
  REGION 1..841: note = Variant of DNA polymerase I from Thermus sp. strain 2.9
MHHHHHHGGSGVLPVFEPKGRVLLVDGHHLAYRNFFALKGLTTSLGEPVQGVYGFAKSLLKALKEDGDVVIVVFDAKAPSFRHEAYEAYKAGRAPTPEDFPRQLALMKELVDLLGLERLEVPGFEADDVLATLAKKAEREGYEVQILTADRDLFQLLSPRISVLHPEGHRITPEWLWEKYGLRPEQWVDFRALAGDPSDNIPGVKGIGEKTALKLLKEWGSLENLLKNLDQVKPESVREKILAHLEDLKLSRELSRVRTDLPLEVDFGRRREPDWEGLKAFLERLEFGSLLHEFGLLESPLLAEEAPWPPPEGAFLGYRLSRPEPMWAELLALAASAQGRVYRAEDPHGALRGLFEVRTLLAKDLAVVALREGLDLPPTDDPMLLAYLLDPSNTTPEGVARRYGGEWTEDAGKRALLAERLHENLLGRLQGEERLLWLYEEVEKPLSRVLAHMEATGVKLDVAYLENLSLEVAAHMRRLEEEVFRLAGRSFRLNSRDQLERVLFDELGLPPIGKTEKTGKRSTSAAVLEALREVHPIVDKILQYREMAKLKGTYIDRLPALVHPKTGRLHTRFNQTATATGRLSSSDPNLQNIPVRTPLGQKIRRAFVAEEGWRLVALDYRQIELRVLAHLSGDENLIRVFQEGKDIHTQTASWMFGLSAEAIDPLMRRAAKTINFGVLYGMSAFRLSQELGIPLEEAQGFIQKYFQSYPKVKAWIEKTLREGRTRGYVETLFGRRRYVPDLNGRVKGKREAAERMAFNMPVQGTAADLMKLAMVRLFPQLREVGARMLLQVHDELLLEAPKERAEEVAALAKEVMEGVWPLAVPLEVEVGIGEDWLAAKG

SEQ ID NO: 5839 - DNA, 2523 bp, synthetic construct
  misc_feature 1..2523: note = Variant of DNA polymerase I from Thermus sp. strain 2.9
  source 1..2523: mol_type = other DNA
atgcaccatcatcatcatcatggcggtagcggcgtgttaccggtgttcgagcctaaaggtcgcgtgcttctggttgatggccatcatctcgcgtatcgtaacttctttgccctgaaaggattaaccaccagcctgggcgagccggtacagggtgtctacggctttgcaaagtcgctcctgaaagctctgaaagaagacggtgatgtggtgattgttgtctttgatgcgaaagcgccaagttttcgccacgaagcgtacgaagcttacaaagccgggcgtgctccaacgccggaagactttcctcgccaattggcgcttatgaaggaattagtggatttgcttggcctcgaacgcttggaagttcccggtttcgaggcagacgacgtattagcgactctcgcaaagaaagccgaacgtgagggctatgaagtccagatcttgacagcagatcgcgatcttttccagcttttatctccgcgcatctcggtgttacacccggaagggcatcgtatcaccccggaatggctctgggagaaatatggtttgcgtcccgaacaatgggtggattttcgcgccttagcaggcgatccgagcgacaatattccgggagttaaaggtatcggcgagaagacggcgctcaagctccttaaagaatgggggtcgttggagaacttgcttaagaatttagatcaggtcaaaccagagtcagtgcgtgagaagattcttgctcacctcgaagacctcaaattaagccgcgaattgtcccgtgtacgcaccgatttgccgctcgaagttgatttcggtcgccgccgcgaacctgactgggagggtcttaaagcgtttttagagcgtcttgaatttggttcgctcttgcatgaattcggccttttagaaagcccgttactggccgaagaagcaccttggccaccgcccgagggcgcgtttttaggttaccgtttgagtcgcccggaaccgatgtgggccgaattactggctcttgcagcgtctgcccagggacgtgtgtatcgcgcggaagaccctcatggtgcgctccgcggcctcttcgaagtccgtggcctccttgccaaagacttagctgttgttgcattgcgcgaaggtcttgatttacctccgactgatgatccaatgcttcttgcgtacctcttggacccgtcaaacacgacgcccgaaggcgtagcccgtcgttacggcggcgagtggtgggaagatgcaggcaaacgcgcgttattggccgaacgtttgcacgaaaatttattaggacgtttgcaaggcgaggaacgtctccgttggctttacgaagaagtggagaaaccattgagtcgcgtgctcgcgcatatggaagctaccggtgtcaaattagacgtggcgtatttggagaatctcagccttgaagttgctgcccacatgcgccgcttggaggaagaagtattccgtttagcaggccgttcctttcgccttaactctcgcgatcagttagaacgtgtgttgttcgatgaacttggtctccctcctatcggcaagacagagaagaccggtaaacgtagcacttcagcggcggttttagaagctcttcgcgaagtccatcccattgtggacaagatcttgcagtaccgcgaaatggcgaaattgaaaggcacctatattgaccgtcttccggcattagtccacccgaaaacgggacgcctccatacccgcttcaaccaaacagccacggcgaccggtcgtttgtcctcctctgatccaaaccttcagaatattccagtacgtaccccattgggccagaagatccgccgtgcgtttgtagctgagccgggttgggcgttagtggccctcgattatcgtcaaattgaattacgtgtccttgcccatctttctggcgatgagaacctcatccgcgtgtttcaggaaggcaaagacattcacactcaaacggcaagctggatgtttggattatcagctgaagcgatcgatcctttgatgcgtcgtgcagcgaagaccatcaatttcggtgttctctacggtatgagtgcctttcgtttgtcgcaggaattaggcattccctatgaagaagctcaggcgttcattcagaaatactttcaaagctatcccaaagttaaagcatggatcgagaagactctccgtgaaggccgcacacgtggttacgtagagaccttatttggacgtcgccgctatgttcccgatttaaacgctcgcgtgaaaggcaagcgtgaagccgccgaacgcatggcgttcaacatgcctgtacagggcacggcagctgacctcatgaaacttgcaatggtgcgcctttttccacaattgcgtgaagttggtgcccgcatgctgttgcaggtccacgatgaactcttgttagaagcgccaaaagagcgtgcggaagaggtggcagccctcgcgaaagaagttatggaaggcgtgtggcccttagcggtgcctcttgaagtcgaagttggtattggcgaggattggctggctgccaaagga

SEQ ID NO: 5840 - protein, 841 aa, synthetic construct
  REGION 1..841: note = Variant of DNA polymerase I from Thermus sp. strain 2.9
MHHHHHHGGSGVLPVFEPKGRVLLVDGHHLAYRNFFALKGLTTSLGEPVQGVYGFAKSLLKALKEDGDVVIVVFDAKAPSFRHEAYEAYKAGRAPTPEDFPRQLALMKELVDLLGLERLEVPGFEADDVLATLAKKAEREGYEVQILTADRDLFQLLSPRISVLHPEGHRITPEWLWEKYGLRPEQWVDFRALAGDPSDNIPGVKGIGEKTALKLLKEWGSLENLLKNLDQVKPESVREKILAHLEDLKLSRELSRVRTDLPLEVDFGRRREPDWEGLKAFLERLEFGSLLHEFGLLESPLLAEEAPWPPPEGAFLGYRLSRPEPMWAELLALAASAQGRVYRAEDPHGALRGLFEVRGLLAKDLAVVALREGLDLPPTDDPMLLAYLLDPSNTTPEGVARRYGGEWWEDAGKRALLAERLHENLLGRLQGEERLRWLYEEVEKPLSRVLAHMEATGVKLDVAYLENLSLEVAAHMRRLEEEVFRLAGRSFRLNSRDQLERVLFDELGLPPIGKTEKTGKRSTSAAVLEALREVHPIVDKILQYREMAKLKGTYIDRLPALVHPKTGRLHTRFNQTATATGRLSSSDPNLQNIPVRTPLGQKIRRAFVAEPGWALVALDYRQIELRVLAHLSGDENLIRVFQEGKDIHTQTASWMFGLSAEAIDPLMRRAAKTINFGVLYGMSAFRLSQELGIPYEEAQAFIQKYFQSYPKVKAWIEKTLREGRTRGYVETLFGRRRYVPDLNARVKGKREAAERMAFNMPVQGTAADLMKLAMVRLFPQLREVGARMLLQVHDELLLEAPKERAEEVAALAKEVMEGVWPLAVPLEVEVGIGEDWLAAKG

SEQ ID NO: 5841 - DNA, 2523 bp, synthetic construct
  misc_feature 1..2523: note = Variant of DNA polymerase I from Thermus sp. strain 2.9
  source 1..2523: mol_type = other DNA
atgcaccatcatcatcatcatggcggtagcggcgtgttaccggtgttcgagcctaaaggtcgcgtgcttctggttgatggccatcatctcgcgtatcgtaacttctttgccctgaaaggattaaccaccagcctgggcgagccggtacagggtgtctacggctttgcaaagtcgctcctgaaagctctgaaagaagacggtgatgtggtgattgttgtctttgatgcgaaagcgccaagttttcgccacgaagcgtacgaagcttacaaagccgggcgtgctccaacgccggaagactttcctcgccaattggcgcttatgaaggaattagtggatttgcttggcctcgaacgcttggaagttcccggtttcgaggcagacgacgtattagcgactctcgcaaagaaagccgaacgtgagggctatgaagtccagatcttgacagcagatcgcgatcttttccagcttttatctccgcgcatctcggtgttacacccggaagggcatcgtatcaccccggaatggctctgggagaaatatggtttgcgtcccgaacaatgggtggattttcgcgccttagcaggcgatccgagcgacaatattccgggagttaaaggtatcggcgagaagacggcgctcaagctccttaaagaatgggggtcgttggagaacttgcttaagaatttagatcaggtcaaaccagagtcagtgcgtgagaagattcttgctcacctcgaagacctcaaattaagccgcgaattgtcccgtgtacgcaccgatttgccgctcgaagttgatttcggtcgccgccgcgaacctgactgggagggtcttaaagcgtttttagagcgtcttgaatttggttcgctcttgcatgaattcggccttttagaaagcccgttactggccgaagaagcaccttggccaccgcccgagggcgcgtttttaggttaccgtttgagtcgcccggaaccgatgtgggccgaattactggctcttgcagcgtctgcccagggacgtgtgtatcgcgcggaagaccctcatggtgcgctccgcggcctcttcgaagtccgtggcctccttgccaaagacttagctgttgttgcattgcgcgaaggtcttgatttacctccgactgatgatccaatgcttcttgcgtacctcttggacccgtcaaacacgacgcccgaaggcgtagcccgtcgttacggcggcgagtggaccgaagatgcaggcaaacgcgcgttattggccgaacgtttgcacgaaaatttattaggacgtttgcaaggcgaggaacgtctcctctggctttacgaagaagtggagaaaccattgagtcgcgtgctcgcgcatatggaagctaccggtgtcaaattagacgtggcgtatttggagaatctcctgcttgaagttgctgcccacatgcgccgcttggaggaagaagtattccgtttagcaggccgttcctttcgccttaactctcgcgatcagttagaacgtgtgttgttcgatgaacttggtctccctcctatcggcaagacagagaagaccggtaaacgtagcacttcagcggcggttttagaagctcttcgcgaagtccatcccattgtggacaagatcttgcagtaccgcgaaatggcgaaattgaaaggcacctatattgaccgtcttccggcattagtccacccgaaaacgggacgcctccatacccgcttcaaccaaacagccacggcgaccggtcgtttgtcctcctctgatccaaaccttcagaatattccagtacgtaccccattgggccagaagatccgccgtgcgtttgtagctgagccgggttggcgtttagtggccctcgattatcgtcaaattgaattacgtgtccttgcccatctttctggcgatgagaacctcatccgcgtgtttcaggaaggcaaagacattcacactcaaacggcaagctggatgtttggattatcagctgaagcgatcgatcctttgatgcgtcgtgcagcgaagaccatcaatttcggtgttctctacggtatgagtgcctttcgtttgtcgcaggaattaggcattccctatgaagaagctcagggtttcattcagaaatactttcaaagctatcccaaagttaaagcatggatcgagaagactctccgtgaaggccgcacacgtggttacgtagagaccttatttggacgtcgccgctatgttcccgatttaaactcgcgcgtgaaaggcaagcgtgaagccgccgaacgcatggcgttcaacatgcctgtacagggcacggcagctgacctcatgaaacttgcaatggtgcgcctttttccacaattgcgtgaagttggtgcccgcatgctgttgcaggtccacgatgaactcttgttagaagcgccaaaagagcgtgcggaagaggtggcagccctcgcgaaagaagttatggaaggcgtgtggcccttagcggtgcctcttgaagtcgaagttggtattggcgaggattggctggctgccaaagga

SEQ ID NO: 5842 - protein, 841 aa, synthetic construct
  REGION 1..841: note = Variant of DNA polymerase I from Thermus sp. strain 2.9
MHHHHHHGGSGVLPVFEPKGRVLLVDGHHLAYRNFFALKGLTTSLGEPVQGVYGFAKSLLKALKEDGDVVIVVFDAKAPSFRHEAYEAYKAGRAPTPEDFPRQLALMKELVDLLGLERLEVPGFEADDVLATLAKKAEREGYEVQILTADRDLFQLLSPRISVLHPEGHRITPEWLWEKYGLRPEQWVDFRALAGDPSDNIPGVKGIGEKTALKLLKEWGSLENLLKNLDQVKPESVREKILAHLEDLKLSRELSRVRTDLPLEVDFGRRREPDWEGLKAFLERLEFGSLLHEFGLLESPLLAEEAPWPPPEGAFLGYRLSRPEPMWAELLALAASAQGRVYRAEDPHGALRGLFEVRGLLAKDLAVVALREGLDLPPTDDPMLLAYLLDPSNTTPEGVARRYGGEWTEDAGKRALLAERLHENLLGRLQGEERLLWLYEEVEKPLSRVLAHMEATGVKLDVAYLENLLLEVAAHMRRLEEEVFRLAGRSFRLNSRDQLERVLFDELGLPPIGKTEKTGKRSTSAAVLEALREVHPIVDKILQYREMAKLKGTYIDRLPALVHPKTGRLHTRFNQTATATGRLSSSDPNLQNIPVRTPLGQKIRRAFVAEPGWRLVALDYRQIELRVLAHLSGDENLIRVFQEGKDIHTQTASWMFGLSAEAIDPLMRRAAKTINFGVLYGMSAFRLSQELGIPYEEAQGFIQKYFQSYPKVKAWIEKTLREGRTRGYVETLFGRRRYVPDLNSRVKGKREAAERMAFNMPVQGTAADLMKLAMVRLFPQLREVGARMLLQVHDELLLEAPKERAEEVAALAKEVMEGVWPLAVPLEVEVGIGEDWLAAKG

SEQ ID NO: 5843 - DNA, 2523 bp, synthetic construct
  misc_feature 1..2523: note = Variant of DNA polymerase I from Thermus sp. strain 2.9
  source 1..2523: mol_type = other DNA
atgcaccatcatcatcatcatggcggtagcggcgtgttaccggtgttcgagcctaaaggtcgcgtgcttctggttgatggccatcatctcgcgtatcgtaacttctttgccctgaaaggattaaccaccagcctgggcgagccggtacagggtgtctacggctttgcaaagtcgctcctgaaagctctgaaagaagacggtgatgtggtgattgttgtctttgatgcgaaagcgccaagttttcgccacgaagcgtacgaagcttacaaagccgggcgtgctccaacgccggaagactttcctcgccaattggcgcttatgaaggaattagtggatttgcttggcctcgaacgcttggaagttcccggtttcgaggcagacgacgtattagcgactctcgcaaagaaagccgaacgtgagggctatgaagtccagatcttgacagcagatcgcgatcttttccagcttttatctccgcgcatctcggtgttacacccggaagggcatcgtatcaccccggaatggctctgggagaaatatggtttgcgtcccgaacaatgggtggattttcgcgccttagcaggcgatccgagcgacaatattccgggagttaaaggtatcggcgagaagacggcgctcaagctccttaaagaatgggggtcgttggagaacttgcttaagaatttagatcaggtcaaaccagagtcagtgcgtgagaagattcttgctcacctcgaagacctcaaattaagccgcgaattgtcccgtgtacgcaccgatttgccgctcgaagttgatttcggtcgccgccgcgaacctgactgggagggtcttaaagcgtttttagagcgtcttgaatttggttcgctcttgcatgaattcggccttttagaaagcccgttactggccgaagaagcaccttggccaccgcccgagggcgcgtttttaggttaccgtttgagtcgcccggaaccgatgtgggccgaattactggctcttgcagcgtctgcccagggacgtgtgtatcgcgcggaagaccctcatggtgcgctccgcggcctcttcgaagtccgtggactccttgccaaagacttagctgttgttgcattgcgcgaaggtcttgatttacctccgactgatgatccaatgcttcttgcgtacctcttggacccgtcaaacacgacgcccgaaggcgtagcccgtcgttacggcggcgagtggaccgaagatgcagcgaaacgcgcgttattggccgaacgtttgcacgaaaatttattaggacgtttgcaaggcgaggaacgtctcctctggctttacgaagaagtggagaaaccattgagtcgcgtgctcgcgcatatggaagctaccggtgtcaaattagacgtggcgtatttggagaatctcagccttgaagttgctgcccacatgcgccgcttggaggaagaagtattccgtttagcaggccgttcctttcgccttaactctcgcgatcagttagaacgtgtgttgttcgatgaacttggtctccctcctatcggcaagacagagaagaccggtaaacgtagcacttcagcggcggttttagaagctcttcgcgaagtccatcccattgtggacaagatcttgcagtaccgcgaaatggcgaaattgaaaggcacctatattgaccgtcttccggcattagtccacccgaaaacgggacgcctccatacccgcttcaaccaaacagccacggcgaccggtcgtttgtcctcctctgatccaaaccttcagaatattccagtacgtaccccattgggccagaagatccgccgtgcgtttgtagctgaggagggttggcgtttagtggccctcgattatcgtcaaattgaattacgtgtccttgcccatctttctggcgatgagaacctcatccgcgtgtttcaggaaggcaaagacattcacactcaaacggcaagctggatgtttggattatcagctgaagcgatcgatcctttgatgcgtcgtgcagcgaagaccatcaatttcggtgttctctacggtatgagtgcctttcgtttgtcgcaggaattaggcattccctatgaagaagctcaggcgttcattcagaaatactttcaaagctatcccaaagttaaagcatggatcgagaagactctccgtgaaggccgcacacgtggttacgtagagaccttatttggacgtcgccgctatgttcccgatttaaacgctcgcgtgaaaggcaagcgtgaagccgccgaacgcatggcgttcaacatgcctgtacagggcacggcagctgacctcatgaaacttgcaatggtgcgcctttttccacaattgcgtgaagttggtgccaagatgctcttgcaggtccacgatgaactcttgttagaagcgccaaaagagcgtgcggaagaggtggcagccctcgcgaaagaagttatggaaggcgtgtggcccttagcggtgcctcttgaagtcgaagttggtattggcgaggattggctggctgccaaagga

SEQ ID NO: 5844 - protein, 841 aa, synthetic construct
  REGION 1..841: note = Variant of DNA polymerase I from Thermus sp. strain 2.9
MHHHHHHGGSGVLPVFEPKGRVLLVDGHHLAYRNFFALKGLTTSLGEPVQGVYGFAKSLLKALKEDGDVVIVVFDAKAPSFRHEAYEAYKAGRAPTPEDFPRQLALMKELVDLLGLERLEVPGFEADDVLATLAKKAEREGYEVQILTADRDLFQLLSPRISVLHPEGHRITPEWLWEKYGLRPEQWVDFRALAGDPSDNIPGVKGIGEKTALKLLKEWGSLENLLKNLDQVKPESVREKILAHLEDLKLSRELSRVRTDLPLEVDFGRRREPDWEGLKAFLERLEFGSLLHEFGLLESPLLAEEAPWPPPEGAFLGYRLSRPEPMWAELLALAASAQGRVYRAEDPHGALRGLFEVRGLLAKDLAVVALREGLDLPPTDDPMLLAYLLDPSNTTPEGVARRYGGEWTEDAAKRALLAERLHENLLGRLQGEERLLWLYEEVEKPLSRVLAHMEATGVKLDVAYLENLSLEVAAHMRRLEEEVFRLAGRSFRLNSRDQLERVLFDELGLPPIGKTEKTGKRSTSAAVLEALREVHPIVDKILQYREMAKLKGTYIDRLPALVHPKTGRLHTRFNQTATATGRLSSSDPNLQNIPVRTPLGQKIRRAFVAEEGWRLVALDYRQIELRVLAHLSGDENLIRVFQEGKDIHTQTASWMFGLSAEAIDPLMRRAAKTINFGVLYGMSAFRLSQELGIPYEEAQAFIQKYFQSYPKVKAWIEKTLREGRTRGYVETLFGRRRYVPDLNARVKGKREAAERMAFNMPVQGTAADLMKLAMVRLFPQLREVGAKMLLQVHDELLLEAPKERAEEVAALAKEVMEGVWPLAVPLEVEVGIGEDWLAAKG

SEQ ID NO: 5845 - DNA, 2523 bp, synthetic construct
  misc_feature 1..2523: note = Variant of DNA polymerase I from Thermus sp. strain 2.9
  source 1..2523: mol_type = other DNA
atgcaccatcatcatcatcatggcggtagcggcgtgttaccggtgttcgagcctaaaggtcgcgtgcttctggttgatggccatcatctcgcgtatcgtaacttctttgccctgaaaggattaaccaccagcctgggcgagccggtacagggtgtctacggctttgcaaagtcgctcctgaaagctctgaaagaagacggtgatgtggtgattgttgtctttgatgcgaaagcgccaagttttcgccacgaagcgtacgaagcttacaaagccgggcgtgctccaacgccggaagactttcctcgccaattggcgcttatgaaggaattagtggatttgcttggcctcgaacgcttggaagttcccggtttcgaggcagacgacgtattagcgactctcgcaaagaaagccgaacgtgagggctatgaagtccagatcttgacagcagatcgcgatcttttccagcttttatctccgcgcatctcggtgttacacccggaagggcatcgtatcaccccggaatggctctgggagaaatatggtttgcgtcccgaacaatgggtggattttcgcgccttagcaggcgatccgagcgacaatattccgggagttaaaggtatcggcgagaagacggcgctcaagctccttaaagaatgggggtcgttggagaacttgcttaagaatttagatcaggtcaaaccagagtcagtgcgtgagaagattcttgctcacctcgaagacctcaaattaagccgcgaattgtcccgtgtacgcaccgatttgccgctcgaagttgatttcggtcgccgccgcgaacctgactgggagggtcttaaagcgtttttagagcgtcttgaatttggttcgctcttgcatgaattcggccttttagaaagcccgttactggccgaagaagcaccttggccaccgcccgagggcgcgtttttaggttaccgtttgagtcgcccggaaccgatgtgggccgaattactggctcttgcagcgtctgcccagggacgtgtgtatcgcgcggaagaccctcatggtgcgctccgcggcctcttcgaagtccgtggactccttgccaaagacttagctgttgttgcattgcgcgaaggtcttgatttacctccgactgatgatccaatgcttcttgcgtacctcttggacccgtcaaacacgacgcccgaaggcgtagcccgtcgttacggcggcgagtggaccgaagatgcagcgaaacgcgcgttattggccgaacgtttgcacgaaaatttattaggacgtttgcaaggcgaggaacgtctcctctggctttacgaagaagtggagaaaccattgagtcgcgtgctcgcgcatatggaagctaccggtgtcaaattagacgtggcgtatttggagaatctcagccttgaagttgctgcccacatgcgccgcttggaggaagaagtattccgtttagcaggccgttcctttcgccttaactctcgcgatcagttagaacgtgtgttgttcgatgaacttggtctccctcctatcggcaagacagagaagaccggtaaacgtagcacttcagcggcggttttagaagctcttcgcgaagtccatcccattgtggacaagatcccgcagtaccgcgaaatggcgaaattgaaaggcacctatattgaccgtcttccggcattagtccacccgaaaacgggacgcctccatacccgcttcaaccaaacagccacggcgaccggtcgtttgtcctcctctgatccaaaccttcagaatattccagtacgtaccccattgggccagaagatccgccgtgcgtttgtagctgaggagggttggcgtttagtggccctcgattatcgtcaaattgaattacgtgtccttgcccatctttctggcgatgagaacctcatccgcgtgtttcaggaaggcaaagacattcacactcaaacggcaagctggatgtttggattatcagctgaagcgatcgatcctttgatgcgtcgtgcagcgaagaccatcaatttcggtgttctctacggtatgagtgcctttcgtttgtcgcaggaattaggcattccctatgaagaagctcaggcgttcattcagaaatactttcaaagctatcccaaagttaaagcatggatcgagaagactctccgtgaaggccgcacacgtggttacgtagagaccttatttggacgtcgccgctatgttcccgatttaaacgctcgcgtgaaaggcaagcgtgaagccgccgaacgcatggcgttcaacatgcctgtacagggcacggcagctgacctcatgaaacttgcaatggtgcgcctttttccacaattgcgtgaagttggtgcccgcatgctcttgcaggtccacgatgaactcttgttagaagcgccaaaagagcgtgcggaagaggtggcagccctcgcgaaagaagttatggaaggcgtgtggcccttagcggtgcctcttgaagtcgaagttggtattggcgaggattggctggctgccaaagga

SEQ ID NO: 5846 - protein, 841 aa, synthetic construct
  REGION 1..841: note = Variant of DNA polymerase I from Thermus sp. strain 2.9
MHHHHHHGGSGVLPVFEPKGRVLLVDGHHLAYRNFFALKGLTTSLGEPVQGVYGFAKSLLKALKEDGDVVIVVFDAKAPSFRHEAYEAYKAGRAPTPEDFPRQLALMKELVDLLGLERLEVPGFEADDVLATLAKKAEREGYEVQILTADRDLFQLLSPRISVLHPEGHRITPEWLWEKYGLRPEQWVDFRALAGDPSDNIPGVKGIGEKTALKLLKEWGSLENLLKNLDQVKPESVREKILAHLEDLKLSRELSRVRTDLPLEVDFGRRREPDWEGLKAFLERLEFGSLLHEFGLLESPLLAEEAPWPPPEGAFLGYRLSRPEPMWAELLALAASAQGRVYRAEDPHGALRGLFEVRGLLAKDLAVVALREGLDLPPTDDPMLLAYLLDPSNTTPEGVARRYGGEWTEDAAKRALLAERLHENLLGRLQGEERLLWLYEEVEKPLSRVLAHMEATGVKLDVAYLENLSLEVAAHMRRLEEEVFRLAGRSFRLNSRDQLERVLFDELGLPPIGKTEKTGKRSTSAAVLEALREVHPIVDKIPQYREMAKLKGTYIDRLPALVHPKTGRLHTRFNQTATATGRLSSSDPNLQNIPVRTPLGQKIRRAFVAEEGWRLVALDYRQIELRVLAHLSGDENLIRVFQEGKDIHTQTASWMFGLSAEAIDPLMRRAAKTINFGVLYGMSAFRLSQELGIPYEEAQAFIQKYFQSYPKVKAWIEKTLREGRTRGYVETLFGRRRYVPDLNARVKGKREAAERMAFNMPVQGTAADLMKLAMVRLFPQLREVGARMLLQVHDELLLEAPKERAEEVAALAKEVMEGVWPLAVPLEVEVGIGEDWLAAKG

SEQ ID NO: 5847 - DNA, 2523 bp, synthetic construct
  misc_feature 1..2523: note = Variant of DNA polymerase I from Thermus sp. strain 2.9
  source 1..2523: mol_type = other DNA
atgcaccatcatcatcatcatggcggtagcggcgtgttaccggtgttcgagcctaaaggtcgcgtgcttctggttgatggccatcatctcgcgtatcgtaacttctttgccctgaaaggattaaccaccagcctgggcgagccggtacagggtgtctacggctttgcaaagtcgctcctgaaagctctgaaagaagacggtgatgtggtgattgttgtctttgatgcgaaagcgccaagttttcgccacgaagcgtacgaagcttacaaagccgggcgtgctccaacgccggaagactttcctcgccaattggcgcttatgaaggaattagtggatttgcttggcctcgaacgcttggaagttcccggtttcgaggcagacgacgtattagcgactctcgcaaagaaagccgaacgtgagggctatgaagtccagatcttgacagcagatcgcgatcttttccagcttttatctccgcgcatctcggtgttacacccggaagggcatcgtatcaccccggaatggctctgggagaaatatggtttgcgtcccgaacaatgggtggattttcgcgccttagcaggcgatccgagcgacaatattccgggagttaaaggtatcggcgagaagacggcgctcaagctccttaaagaatgggggtcgttggagaacttgcttaagaatttagatcaggtcaaaccagagtcagtgcgtgagaagattcttgctcacctcgaagacctcaaattaagccgcgaattgtcccgtgtacgcaccgatttgccgctcgaagttgatttcggtcgccgccgcgaacctgactgggagggtcttaaagcgtttttagagcgtcttgaatttggttcgctcttgcatgaattcggccttttagaaagcccgttactggccgaagaagcaccttggccaccgcccgagggcgcgtttttaggttaccgtttgagtcgcccggaaccgatgtgggccgaattactggctcttgcagcgtctgcccagggacgtgtgtatcgcgcggaagaccctcatggtgcgctccgcggcctcttcgaagtccgtggactccttgccaaagacttagctgttgttgcattgcgcgaaggtcttgatttacctccgactgatgatccaatgcttcttgcgtacctcttggacccgtcaaacacgacgcccgaaggcgtagcccgtcgttacggcggcgagtggaccgaagatgcagcgaaacgcgcgttattggccgaacgtttgcacgaaaatttattaggacgtttgcaaggcgaggaacgtctcctctggctttacgaagaagtggagaaaccattgagtcgcgtgctcgcgcatatggaagctaccggtgtcaaattagacgtggcgtatttggagaatctcagccttgaagttgctgcccacatgcgccgcttggaggaagaagtattccgtttagcaggccgttcctttcgccttaactctcgcgatcagttagaacgtgtgttgttcgatgaacttggtctccctcctatcggcatgacagagaagaccggtaaacgtagcacttcagcggcggttttagaagctcttcgcgaagtccatcccattgtggacaagatcttgcagtaccgcgaaatggcgaaattgaaaggcacctatattgaccgtcttccggcattagtccacccgaaaacgggacgcctccatacccgcttcaaccaaacagccacggcgaccggtcgtttgtcctcctctgatccaaaccttcagaatattccagtacgtaccccattgggccagaagatccgccgtgcgtttgtagctgaggagggttggcgtttagtggccctcgattatcgtcaaattgaattacgtgtccttgcccatctttctggcgatgagaacctcatccgcgtgtttcaggaaggcaaagacattcacactcaaacggcaagctggatgtttggattatcagctgaagcgatcgatcctttgatgcgtcgtgcagcgaagaccatcaatttcggtgttctctacggtatgagtgcctttcgtttgtcgcaggaattaggcattccctatgaagaagctcaggcgttcattcagaaatactttcaaagctatcccaaagttaaagcatggatcgagaagactctccgtgaaggccgcacacgtggttacgtagagaccttatttggacgtcgccgctatgttcccgatttaaacgctcgcgtgaaaggcaagcgtgaagccgccgaacgcatggcgttcaacatgcctgtacagggcacggcagctgacctcatgaaacttgcaatggtgcgcctttttccacaattgcgtgaagttggtgcccgcatgctcttgcaggtccacgatgaactcttgttagaagcgccaaaagagcgtgcggaagaggtggcagccctcgcgaaagaagttatggaaggcgtgtggcccttagcggtgcctcttgaagtcgaagttggtattggcgaggattggctggctgccaaagga

SEQ ID NO: 5848 - protein, 841 aa, synthetic construct
  REGION 1..841: note = Variant of DNA polymerase I from Thermus sp. strain 2.9
MHHHHHHGGSGVLPVFEPKGRVLLVDGHHLAYRNFFALKGLTTSLGEPVQGVYGFAKSLLKALKEDGDVVIVVFDAKAPSFRHEAYEAYKAGRAPTPEDFPRQLALMKELVDLLGLERLEVPGFEADDVLATLAKKAEREGYEVQILTADRDLFQLLSPRISVLHPEGHRITPEWLWEKYGLRPEQWVDFRALAGDPSDNIPGVKGIGEKTALKLLKEWGSLENLLKNLDQVKPESVREKILAHLEDLKLSRELSRVRTDLPLEVDFGRRREPDWEGLKAFLERLEFGSLLHEFGLLESPLLAEEAPWPPPEGAFLGYRLSRPEPMWAELLALAASAQGRVYRAEDPHGALRGLFEVRGLLAKDLAVVALREGLDLPPTDDPMLLAYLLDPSNTTPEGVARRYGGEWTEDAAKRALLAERLHENLLGRLQGEERLLWLYEEVEKPLSRVLAHMEATGVKLDVAYLENLSLEVAAHMRRLEEEVFRLAGRSFRLNSRDQLERVLFDELGLPPIGMTEKTGKRSTSAAVLEALREVHPIVDKILQYREMAKLKGTYIDRLPALVHPKTGRLHTRFNQTATATGRLSSSDPNLQNIPVRTPLGQKIRRAFVAEEGWRLVALDYRQIELRVLAHLSGDENLIRVFQEGKDIHTQTASWMFGLSAEAIDPLMRRAAKTINFGVLYGMSAFRLSQELGIPYEEAQAFIQKYFQSYPKVKAWIEKTLREGRTRGYVETLFGRRRYVPDLNARVKGKREAAERMAFNMPVQGTAADLMKLAMVRLFPQLREVGARMLLQVHDELLLEAPKERAEEVAALAKEVMEGVWPLAVPLEVEVGIGEDWLAAKG

SEQ ID NO: 5849 - DNA, 2523 bp, synthetic construct
  misc_feature 1..2523: note = Variant of DNA polymerase I from Thermus sp. strain 2.9
  source 1..2523: mol_type = other DNA
atgcaccatcatcatcatcatggcggtagcggcgtgttaccggtgttcgagcctaaaggtcgcgtgcttctggttgatggccatcatctcgcgtatcgtaacttctttgccctgaaaggattaaccaccagcctgggcgagccggtacagggtgtctacggctttgcaaagtcgctcctgaaagctctgaaagaagacggtgatgtggtgattgttgtctttgatgcgaaagcgccaagttttcgccacgaagcgtacgaagcttacaaagccgggcgtgctccaacgccggaagactttcctcgccaattggcgcttatgaaggaattagtggatttgcttggcctcgaacgcttggaagttcccggtttcgaggcagacgacgtattagcgactctcgcaaagaaagccgaacgtgagggctatgaagtccagatcttgacagcagatcgcgatcttttccagcttttatctccgcgcatctcggtgttacacccggaagggcatcgtatcaccccggaatggctctgggagaaatatggtttgcgtcccgaacaatgggtggattttcgcgccttagcaggcgatccgagcgacaatattccgggagttaaaggtatcggcgagaagacggcgctcaagctccttaaagaatgggggtcgttggagaacttgcttaagaatttagatcaggtcaaaccagagtcagtgcgtgagaagattcttgctcacctcgaagacctcaaattaagccgcgaattgtcccgtgtacgcaccgatttgccgctcgaagttgatttcggccgccgccgcgaacctgactgggagggtcttaaagcgtttttagagcgtcttgaatttggttcgctcttgcatgaattcggccttttagaaagcccgttaccggccgaagaagcaccttggccaccgcccgagggcgcgtttttaggttaccgtttgagtcgcccggaaccgatgtgggccgaattactggctcttgcagcgtctgcccagggacgtgtgtatcgcgcggaagaccctcatggtgcgctccgcggcctcttcgaagtccgtggactccttgccaaagacttagctgttgttgcattgcgcgaaggtcttgatttacctccgactgatgatccaatgcttcttgcgtacctcttggacccgtcaaacacgacgcccgaaggcgtagcccgtcgttacggcggcgagtggaccgaagatgcagcgaaacgcgcgttattggccgaacgtttgcacgcaaatttattaggacgtttgcaaggcgaggaacgtctcctctggctttacgaagaagtggagaaaccattgagtcgcgtgctcgcgcatatggaagctaccggtgtcaaattagacgtggcgtatttggagaatctcagccttgaagttgctgccgaaatgcgccgcttggaggaagaagtattccgtttagcaggccactcctttcgccttaactctcgcgatcagttagaacgtgtgttgttcgatgaacttggtctccctcctatcggcaagacagagaagaccggtaaacgtagcacttcagcggcggttttagaagctcttcgcgaagtccatcccattgtggacaagatcttgcagtaccgcgaactggcgaaattgaaaggcacctatattgaccgtcttccggcattagtccacccgaaaacgggacgcctccatacccgcttcaaccaaacagccacggcgaccggtcgtttgtccagttctgatccaaaccttcagaatattccagtacgtaccccattgggccagaagatccgccgtgcgtttgtagctgaggagggttggcgtttagtggccctcgattatagtcaaattgaattacgtgtccttgcccatctttctggcgatgagaacctcatccgcgtgtttcaggaaggcaaagacattcacactcaaacggcaagctggatgtttggattatcagctgaagcgatcgatcctttgatgcgtcgtgcagcgaagaccatcaatttcggtgttctctacggtatgagtgcctttcgtttgtcgcaggaattaggcattccctatgaagaagctcaggcgttcattcagaaatactttcaaagctatcccaaagttaaagcatggatcgagaagactctccgcgaaggccgcacacgtggttacgtagagaccttatttggacgtcgccgctatgttcccgatttaaacgctcgcgtgaaaggcaagcgtgaagccgccgaacgcatggcgttcaacatgcctgtacagggcacggcagctgacctcatgaaacttgcaatggtgcgcctttttccacaattgcgtgaagttggtgcccgcatgctcttgcaggtccacgatgaactcttgttagaagcgccaaaagagcgtgcggaagaggtggcagccctcgcgaaagaagttatggaaggcgtgtggcccttagcggtgcctcttgaagtcgaagttggtattggcgaggattggctggctgccaaagga

SEQ ID NO: 5850 - protein, 841 aa, synthetic construct
  REGION 1..841: note = Variant of DNA polymerase I from Thermus sp. strain 2.9
MHHHHHHGGSGVLPVFEPKGRVLLVDGHHLAYRNFFALKGLTTSLGEPVQGVYGFAKSLLKALKEDGDVVIVVFDAKAPSFRHEAYEAYKAGRAPTPEDFPRQLALMKELVDLLGLERLEVPGFEADDVLATLAKKAEREGYEVQILTADRDLFQLLSPRISVLHPEGHRITPEWLWEKYGLRPEQWVDFRALAGDPSDNIPGVKGIGEKTALKLLKEWGSLENLLKNLDQVKPESVREKILAHLEDLKLSRELSRVRTDLPLEVDFGRRREPDWEGLKAFLERLEFGSLLHEFGLLESPLPAEEAPWPPPEGAFLGYRLSRPEPMWAELLALAASAQGRVYRAEDPHGALRGLFEVRGLLAKDLAVVALREGLDLPPTDDPMLLAYLLDPSNTTPEGVARRYGGEWTEDAAKRALLAERLHANLLGRLQGEERLLWLYEEVEKPLSRVLAHMEATGVKLDVAYLENLSLEVAAEMRRLEEEVFRLAGHSFRLNSRDQLERVLFDELGLPPIGKTEKTGKRSTSAAVLEALREVHPIVDKILQYRELAKLKGTYIDRLPALVHPKTGRLHTRFNQTATATGRLSSSDPNLQNIPVRTPLGQKIRRAFVAEEGWRLVALDYSQIELRVLAHLSGDENLIRVFQEGKDIHTQTASWMFGLSAEAIDPLMRRAAKTINFGVLYGMSAFRLSQELGIPYEEAQAFIQKYFQSYPKVKAWIEKTLREGRTRGYVETLFGRRRYVPDLNARVKGKREAAERMAFNMPVQGTAADLMKLAMVRLFPQLREVGARMLLQVHDELLLEAPKERAEEVAALAKEVMEGVWPLAVPLEVEVGIGEDWLAAKG

SEQ ID NO: 5851 - DNA, 2523 bp, synthetic construct
  misc_feature 1..2523: note = Variant of DNA polymerase I from Thermus sp. strain 2.9
  source 1..2523: mol_type = other DNA
atgcaccatcatcatcatcatggcggtagcggcgtgttaccggtgttcgagcctaaaggtcgcgtgcttctggttgatggccatcatctcgcgtatcgtaacttctttgccctgaaaggattaaccaccagcctgggcgagccggtacagggtgtctacggctttgcaaagtcgctcctgaaagctctgaaagaagacggtgatgtggtgattgttgtctttgatgcgaaagcgccaagttttcgccacgaagcgtacgaagcttacaaagccgggcgtgctccaacgccggaagactttcctcgccaattggcgcttatgaaggaattagtggatttgcttggcctcgaacgcttggaagttcccggtttcgaggcagacgacgtattagcgactctcgcaaagaaagccgaacgtgagggctatgaagtccagatcttgacagcagatcgcgatcttttccagcttttatctccgcgcatctcggtgttacacccggaagggcatcgtatcaccccggaatggctctgggagaaatatggtttgcgtcccgaacaatgggtggattttcgcgccttagcaggcgatccgagcgacaatattccgggagttaaaggtatcggcgagaagacggcgctcaagctccttaaagaatgggggtcgttggagaacttgcttaagaatttagatcaggtcaaaccagagtcagtgcgtgagaagattcttgctcacctcgaagacctcaaattaagccgcgaattgtcccgtgtacgcaccgatttgccgctcgaagttgatttcggtcgccgccgcgaacctgactgggagggtcttaaagcgtttttagagcgtcttgaatttggttcgctcttgcatgaattcggccttttagaaagcccgttactggccgaagaagcaccttggccaccgcccgagggcgcgtttttaggttaccgtttgagtcgcccggaaccgatgtgggccgaattactggctcttgcagcgtctgcccagggacgtgtgtatcgcgcggaagaccctcatggtgcgctccgcggcctcttcgaagtccgtggcctccttgccaaagacttagctgttgttgcattgcgcgaaggtcttgatttacctccgactgatgatccaatgcttcttgcgtacctcttggacccgtcaaacacgacgcccgaaggcgtagcccgtcgttacggcggcgagtggtgggaagatgcaggcaaacgcgcgttattggccgaacgtttgcacgaaaatttattaggacgtttgcaaggcgaggagcgtctcctgtggctttacgaagaagtggagaaaccattgagtcgcgtgctcgcgcatatggaagctaccggtgtcaaattagacgtggcgtatttggagaatctcagccttgaagttgctgcccacatgcgccgcttggaggaagaagtattccgtttagcaggccgttcctttcgccttaactctcgcgatcagttagaacgtgtgttgttcgatgaacttggtctccctcctatcggcaagacagagaagaccggtaaacgtagcacttcagcggcggttttagaagctcttcgcgaagtccatcccattgtggacaagatcttgcagtaccgcgaaatggcgaaattgaaaggcacctatattgaccgtcttccggcattagtccacccgaaaacgggacgcctccatacccgcttcaaccaaacagccacggcgaccggtcgtttgtcctcctctgatccaaaccttcagaatattccagtacgtacctttttgggccagaagatccgccgtgcgtttgtagctgaggagggttggcgtttagtggccctcgattatcgtcaaattgaattacgtgtccttgcccatctttctggcgatgagaacctcatccgcgtgtttcaggaaggcaaagacattcacactcaaacggcaagctggatgtttggattatcagctgaagcgatcgatcctttgatgcgtcgtgcagcgaagaccatcaatttcggtgttctctacggtatgagtgcctttcgtttgtcgcaggaattaggcattccctatgaagaagctcagggtttcattcagaaatactttcaaagctatcccaaagttaaagcatggatcgagaagactctccgtgaaggccgcacacgtggttacgtagagaccttatttggacgtcgccgctatgttcccgatttaaactcgcgcgtgaaaggcaagcgtgaagccgccgaacgcatggcgttcaacatgcctgtacagggcacggcagctgacctcatgaaacttgcaatggtgcgcctttttccacaattgcgtgaagttggtgcccgcatgctcttgcaggtccacgatgaactcttgttagaagcgccaaaagagcgtgcggaagaggtggcagccctcgcgaaagaagttatggaaggcgtgtggcccttagcggtgcctcttgaagtcgaagttggtattggcgaggattggctggctgccaaagga

SEQ ID NO: 5852 - protein, 841 aa, synthetic construct
  REGION 1..841: note = Variant of DNA polymerase I from Thermus sp. strain 2.9
MHHHHHHGGSGVLPVFEPKGRVLLVDGHHLAYRNFFALKGLTTSLGEPVQGVYGFAKSLLKALKEDGDVVIVVFDAKAPSFRHEAYEAYKAGRAPTPEDFPRQLALMKELVDLLGLERLEVPGFEADDVLATLAKKAEREGYEVQILTADRDLFQLLSPRISVLHPEGHRITPEWLWEKYGLRPEQWVDFRALAGDPSDNIPGVKGIGEKTALKLLKEWGSLENLLKNLDQVKPESVREKILAHLEDLKLSRELSRVRTDLPLEVDFGRRREPDWEGLKAFLERLEFGSLLHEFGLLESPLLAEEAPWPPPEGAFLGYRLSRPEPMWAELLALAASAQGRVYRAEDPHGALRGLFEVRGLLAKDLAVVALREGLDLPPTDDPMLLAYLLDPSNTTPEGVARRYGGEWWEDAGKRALLAERLHENLLGRLQGEERLLWLYEEVEKPLSRVLAHMEATGVKLDVAYLENLSLEVAAHMRRLEEEVFRLAGRSFRLNSRDQLERVLFDELGLPPIGKTEKTGKRSTSAAVLEALREVHPIVDKILQYREMAKLKGTYIDRLPALVHPKTGRLHTRFNQTATATGRLSSSDPNLQNIPVRTFLGQKIRRAFVAEEGWRLVALDYRQIELRVLAHLSGDENLIRVFQEGKDIHTQTASWMFGLSAEAIDPLMRRAAKTINFGVLYGMSAFRLSQELGIPYEEAQGFIQKYFQSYPKVKAWIEKTLREGRTRGYVETLFGRRRYVPDLNSRVKGKREAAERMAFNMPVQGTAADLMKLAMVRLFPQLREVGARMLLQVHDELLLEAPKERAEEVAALAKEVMEGVWPLAVPLEVEVGIGEDWLAAKG

SEQ ID NO: 5853 - DNA, 2523 bp, synthetic construct
  misc_feature 1..2523: note = Variant of DNA polymerase I from Thermus sp. strain 2.9
  source 1..2523: mol_type = other DNA
atgcaccatcatcatcatcatggcggtagcggcgtgttaccggtgttcgagcctaaaggtcgcgtgcttctggttgatggccatcatctcgcgtatcgtaacttctttgccctgaaaggattaaccaccagcctgggcgagccggtacagggtgtctacggctttgcaaagtcgctcctgaaagctctgaaagaagacggtgatgtggtgattgttgtctttgatgcgaaagcgccaagttttcgccacgaagcgtacgaagcttacaaagccgggcgtgctccaacgccggaagactttcctcgccaattggcgcttatgaaggaattagtggatttgcttggcctcgaacgcttggaagttcccggtttcgaggcagacgacgtattagcgactctcgcaaagaaagccgaacgtgagggctatgaagtccagatcttgacagcagatcgcgatcttttccagcttttatctccgcgcatctcggtgttacacccggaagggcatcgtatcaccccggaatggctctgggagaaatatggtttgcgtcccgaacaatgggtggattttcgcgccttagcaggcgatccgagcgacaatattccgggagttaaaggtatcggcgagaagacggcgctcaagctccttaaagaatgggggtcgttggagaacttgcttaagaatttagatcaggtcaaaccagagtcagtgcgtgagaagattcttgctcacctcgaagacctcaaattaagccgcgaattgtcccgtgtacgcaccgatttgccgctcgaagttgatttcggtcgccgccgcgaacctgactgggagggtcttaaagcgtttttagagcgtcttgaatttggttcgctcttgcatgaattcggccttttagaaagcccgttactggccgaagaagcaccttggccaccgcccgagggcgcgtttttaggttaccgtttgagtcgcccggaaccgatgtgggccgaattactggctcttgcagcgtctgcccagggacgtgtgtatcgcgcggaagaccctcatggtgcgctccgcggcctcttcgaagtccgtggactccttgccaaagacttagctgttgttgcattgcgcgaaggtcttgatttacctccgactgatgatccaatgcttcttgcgtacctcttggacccgtcaaacacgacgcccgaaggcgtagcccgtcgttacggcggcgagtggaccgaagatgcagcgaaacgcgcgttattggccgaacgtttgcacgaaaatttattaggacgtttgcaaggcgaggaacgtctcctctggctttacgaagaagtggagaaaccattgagtcgcgtgctcgcgcatatggaagctaccggtgtcaaattagacgtggcgtatttggagaatctcagccttgaagttgctgcccacatgcgccgcttggaggaagaagtattccgtttagcaggccgttcctttcgccttaactctcgcgatcagttagaacgtgtgttgttcgatgaacttggtctccctcctatcggcaagacagagaagaccggtaaacgtagcacttcagcggcggttttagaagctcttcgcgaagtccatcccattgtggacaagatcttgcagtaccgcgaaatggcgaaattgaaaggcacctatattgaccgtcttccggcattagtccacccgaaaacgggacgcctccatacccgcttcaaccaaacagccacggcgaccggtcgtttgtcctcctctgatccaaaccttcagaatattccagtacgtaccccattgggccagaagatccgccgtgcgtttgtagctgaggagggttggcgtttagtggccctcgattatcgtcaaattgaattacgtgtccttgcccatctttctggcgatgagaacctcatccgcgtgtttcaggaaggcaaagacattcacactcaaacggcaagctggatgtttggattatcagctgaagcgatcgatcctttgatgcgtcgtgcagcgaagaccatcaatttcggtgttctctacggtatgagtgcctttcgtttgtcgatggaattaggcattccctatgaagaagctcaggcgttcattcagaaatactttcaaagctatcccaaagttaaagcatggatcgagaagactctccgtgaaggccgcacacgtggttacgtagagaccttatttggacgtcgccgctatgttcccgatttaaacgctcgcgtgaaaggcaagcgtgaagccgccgaacgcatggcgttcaacatgcctgtacagggcacggcagctgacctcatgaaacttgcaatggtgcgcctttttccacaattgcgtgaagttggtgcccgcatgctcttgcaggtccacgatgaactcttgttagaagcgccaaaagagcgtgcggaagaggtggcagccctcgcgaaagaagttatggaaggcgtgtggcccttagcggtgcctcttgaagtcgaagttggtattggcgaggattggctggctgccaaagga

SEQ ID NO: 5854 - protein, 841 aa, synthetic construct
  REGION 1..841: note = Variant of DNA polymerase I from Thermus sp. strain 2.9
MHHHHHHGGSGVLPVFEPKGRVLLVDGHHLAYRNFFALKGLTTSLGEPVQGVYGFAKSLLKALKEDGDVVIVVFDAKAPSFRHEAYEAYKAGRAPTPEDFPRQLALMKELVDLLGLERLEVPGFEADDVLATLAKKAEREGYEVQILTADRDLFQLLSPRISVLHPEGHRITPEWLWEKYGLRPEQWVDFRALAGDPSDNIPGVKGIGEKTALKLLKEWGSLENLLKNLDQVKPESVREKILAHLEDLKLSRELSRVRTDLPLEVDFGRRREPDWEGLKAFLERLEFGSLLHEFGLLESPLLAEEAPWPPPEGAFLGYRLSRPEPMWAELLALAASAQGRVYRAEDPHGALRGLFEVRGLLAKDLAVVALREGLDLPPTDDPMLLAYLLDPSNTTPEGVARRYGGEWTEDAAKRALLAERLHENLLGRLQGEERLLWLYEEVEKPLSRVLAHMEATGVKLDVAYLENLSLEVAAHMRRLEEEVFRLAGRSFRLNSRDQLERVLFDELGLPPIGKTEKTGKRSTSAAVLEALREVHPIVDKILQYREMAKLKGTYIDRLPALVHPKTGRLHTRFNQTATATGRLSSSDPNLQNIPVRTPLGQKIRRAFVAEEGWRLVALDYRQIELRVLAHLSGDENLIRVFQEGKDIHTQTASWMFGLSAEAIDPLMRRAAKTINFGVLYGMSAFRLSMELGIPYEEAQAFIQKYFQSYPKVKAWIEKTLREGRTRGYVETLFGRRRYVPDLNARVKGKREAAERMAFNMPVQGTAADLMKLAMVRLFPQLREVGARMLLQVHDELLLEAPKERAEEVAALAKEVMEGVWPLAVPLEVEVGIGEDWLAAKG

SEQ ID NO: 5855 - DNA, 2523 bp, synthetic construct
  misc_feature 1..2523: note = Variant of DNA polymerase I from Thermus sp. strain 2.9
  source 1..2523: mol_type = other DNA
atgcaccatcatcatcatcatggcggtagcggcgtgttaccggtgttcgagcctaaaggtcgcgtgcttctggttgatggccatcatctcgcgtatcgtaacttctttgccctgaaaggattaaccaccagcctgggcgagccggtacagggtgtctacggctttgcaaagtcgctcctgaaagctctgaaagaagacggtgatgtggtgattgttgtctttgatgcgaaagcgccaagttttcgccacgaagcgtacgaagcttacaaagccgggcgtgctccaacgccggaagactttcctcgccaattggcgcttatgaaggaattagtggatttgcttggcctcgaacgcttggaagttcccggtttcgaggcagacgacgtattagcgactctcgcaaagaaagccgaacgtgagggctatgaagtccagatcttgacagcagatcgcgatcttttccagcttttatctccgcgcatctcggtgttacacccggaagggcatcgtatcaccccggaatggctctgggagaaatatggtttgcgtcccgaacaatgggtggattttcgcgccttagcaggcgatccgagcgacaatattccgggagttaaaggtatcggcgagaagacggcgctcaagctccttaaagaatgggggtcgttggagaacttgcttaagaatttagatcaggtcaaaccagagtcagtgcgtgagaagattcttgctcacctcgaagacctcaaattaagccgcgaattgtcccgtgtacgcaccgatttgccgctcgaagttgatttcggtcgccgccgcgaacctgactgggagggtcttaaagcgtttttagagcgtcttgaatttggttcgctcttgcatgaattcggccttttagaaagcccgttactggccgaagaagcaccttggccaccgcccgagggcgcgtttttaggttaccgtttgagtcgcccggaaccgatgtgggccgaattactggctcttgcagcgtctgcccagggacgtgtgtatcgcgcggaagaccctcatggtgcgctccgcggcctcttcgaagtccgtggactccttgccaaagacttagctgttgttgcattgcgcgaaggtcttgatttacctccgactgatgatccaatgcttcttgcgtacctcttggacccgtcaaacacgacgcccgaaggcgtagcccgtcgttacggcggcgagtggaccgaagatgcagcgaaacgcgcgttattggccgaacgtttgcacgaaaatttattaggacgtttgcaaggcgaggaacgtctcctctggctttacgaagaagtggagaaaccattgagtcgcgtgctcgcgcatatggaagctaccggtgtcaaattagacgtggcgtatttggagaatctcagccttgaagttgctgcccacatgcgccgcttggaggaagaagtattccgtttagcaggccgttcctttcgccttaactctcgcgatcagttagaacgtgtgttgttcgatgaacttggtctccctcctatcggcaagacagagaagaccggtaaacgtagcacttcagcggcggttttagaagctcttcgcgaagtccatcccattggggacaagatcttgcagtaccgcgaaatggcgaaattgaaaggcacctatattgaccgtcttccggcattagtccacccgaaaacgggacgcctccatacccgcttcaaccaaacagccacggcgaccggtcgtttgtcctcctctgatccaaaccttcagaatattccagtacgtaccccattgggccagaagatccgccgtgcgtttgtagctgaggagggttggcgtttagtggccctcgattatcgtcaaattgaattacgtgtccttgcccatctttctggcgatgagaacctcatccgcgtgtttcaggaaggcaaagacattcacactcaaacggcaagctggatgtttggattatcagctgaagcgatcgatcctttgatgcgtcgtgcagcgaagaccatcaatttcggtgttctctacggtatgagtgcctttcgtttgtcgcaggaattaggcattccctatgaagaagctcaggcgttcattcagaaatactttcaaagctatcccaaagttaaagcatggatcgagaagactctccgtgaaggccgcacacgtggttacgtagagaccttatttggacgtcgccgctatgttcccgatttaaacgctcgcgtgaaaggcaagcgtgaagccgccgaacgcatggcgttcaacatgcctgtacagggcacggcagctgacctcatgaaacttgcaatggtgcgcctttttccacaattgcgtgaagttggtgcccgcatgctcttgcaggtccacgatgaactcttgttagaagcgccaaaagagcgtgcggaagaggtggcagccctcgcgaaagaagttatggaaggcgtgtggcccttagcggtgcctcttgaagtcgaagttggtattggcgaggattggctggctgccaaagga

SEQ ID NO: 5856 - protein, 841 aa, synthetic construct
  REGION 1..841: note = Variant of DNA polymerase I from Thermus sp. strain 2.9
MHHHHHHGGSGVLPVFEPKGRVLLVDGHHLAYRNFFALKGLTTSLGEPVQGVYGFAKSLLKALKEDGDVVIVVFDAKAPSFRHEAYEAYKAGRAPTPEDFPRQLALMKELVDLLGLERLEVPGFEADDVLATLAKKAEREGYEVQILTADRDLFQLLSPRISVLHPEGHRITPEWLWEKYGLRPEQWVDFRALAGDPSDNIPGVKGIGEKTALKLLKEWGSLENLLKNLDQVKPESVREKILAHLEDLKLSRELSRVRTDLPLEVDFGRRREPDWEGLKAFLERLEFGSLLHEFGLLESPLLAEEAPWPPPEGAFLGYRLSRPEPMWAELLALAASAQGRVYRAEDPHGALRGLFEVRGLLAKDLAVVALREGLDLPPTDDPMLLAYLLDPSNTTPEGVARRYGGEWTEDAAKRALLAERLHENLLGRLQGEERLLWLYEEVEKPLSRVLAHMEATGVKLDVAYLENLSLEVAAHMRRLEEEVFRLAGRSFRLNSRDQLERVLFDELGLPPIGKTEKTGKRSTSAAVLEALREVHPIGDKILQYREMAKLKGTYIDRLPALVHPKTGRLHTRFNQTATATGRLSSSDPNLQNIPVRTPLGQKIRRAFVAEEGWRLVALDYRQIELRVLAHLSGDENLIRVFQEGKDIHTQTASWMFGLSAEAIDPLMRRAAKTINFGVLYGMSAFRLSQELGIPYEEAQAFIQKYFQSYPKVKAWIEKTLREGRTRGYVETLFGRRRYVPDLNARVKGKREAAERMAFNMPVQGTAADLMKLAMVRLFPQLREVGARMLLQVHDELLLEAPKERAEEVAALAKEVMEGVWPLAVPLEVEVGIGEDWLAAKG

SEQ ID NO: 5857 - DNA, 2523 bp, synthetic construct
  misc_feature 1..2523: note = Variant of DNA polymerase I from Thermus sp. strain 2.9
  source 1..2523: mol_type = other DNA
atgcaccatcatcatcatcatggcggtagcggcgtgttaccggtgttcgagcctaaaggtcgcgtgcttctggttgatggccatcatctcgcgtatcgtaacttctttgccctgaaaggattaaccaccagcctgggcgagccggtacagggtgtctacggctttgcaaagtcgctcctgaaagctctgaaagaagacggtgatgtggtgattgttgtctttgatgcgaaagcgccaagttttcgccacgaagcgtacgaagcttacaaagccgggcgtgctccaacgccggaagactttcctcgccaattggcgcttatgaaggaattagtggatttgcttggcctcgaacgcttggaagttcccggtttcgaggcagacgacgtattagcgactctcgcaaagaaagccgaacgtgagggctatgaagtccagatcttgacagcagatcgcgatcttttccagcttttatctccgcgcatctcggtgttacacccggaagggcatcgtatcaccccggaatggctctgggagaaatatggtttgcgtcccgaacaatgggtggattttcgcgccttagcaggcgatccgagcgacaatattccgggagttaaaggtatcggcgagaagacggcgctcaagctccttaaagaatgggggtcgttggagaacttgcttaagaatttagatcaggtcaaaccagagtcagtgcgtgagaagattcttgctcacctcgaagacctcaaattaagccgcgaattgtcccgtgtacgcaccgatttgccgctcgaagttgatttcggtcgccgccgcgaacctgactgggagggtcttaaagcgtttttagagcgtcttgaatttggttcgctcttgcatgaattcggccttttagaaagcccgttactggccgaagaagcaccttggccaccgcccgagggcgcgtttttaggttaccgtttgagtcgcccggaaccgatgtgggccgaattactggctcttgcagcgtctgcccagggacgtgtgtatcgcgcggaagaccctcatggtgcgctccgcggcctcttcgaagtccgtggactccttgccaaagacttagctgttgttgcattgcgcgaaggtcttgatttacctccgactgatgatccaatgcttcttgcgtacctcttggacccgtcaaacacgacgcccgaaggcgtagcccgtcgttacggcggcgagtggaccgaagatgcagcgaaacgcgcgttattggccgaacgtttgcacgaaaatttattaggacgtttgcaaggcgaggaacgtctcctctggctttacgaagaagtggagaaaccattgagtcgcgtgctcgcgcatatggaagctaccggtgtcaaattagacgtggcgtatttggagaatctcagccttgaagttgctgcccacatgcgccgcttggaggaagaagtattccgtttagcaggccgttcctttcgccttaactctcgcgatcagttagaacgtgtgttgttcgatgaacttggtctccctcctatcggcaagacagagaagaccggtaaacgtagcacttcagcggcggttttagaagctcttcgcgaagtccatcccattgtggacaagatcttgcagtaccgcgaaatggcgaaattgaaaggcacctatattgaccgtcttccggcattagtccacccgaaaacgggacgcctccatacccgcttcaaccaaacagccacggcgaccggtcgtttgtcctcctctgatccaaaccttcagaatattccagtacgtaccccattgggccagaagatccgccgtgcgtttgtagctgagactggttggcgtttagtggccctcgattatcgtcaaattgaattacgtgtccttgcccatctttctggcgatgagaacctcatccgcgtgtttcaggaaggcaaagacattcacactcaaacggcaagctggatgtttggattatcagctgaagcgatcgatcctttgatgcgtcgtgcagcgaagaccatcaatttcggtgttctctacggtatgagtgcctttcgtttgtcgcaggaattaggcattccctatgaagaagctcaggcgttcattcagaaatactttcaaagctatcccaaagttaaagcatggatcgagaagactctccgtgaaggccgcacacgtggttacgtagagaccttatttggacgtcgccgctatgttcccgatttaaacgctcgcgtgaaaggcaagcgtgaagccgccgaacgcatggcgttcaacatgcctgtacagggcacggcagctgacctcatgaaacttgcaatggtgcgcctttttccacaattgcgtgaagttggtgcccgcatgctcttgcaggtccacgatgaactcttgttagaagcgccaaaagagcgtgcggaagaggtggcagccctcgcgaaagaagttatggaaggcgtgtggcccttagcggtgcctcttgaagtcgaagttggtattggcgaggattggctggctgccaaagga

SEQ ID NO: 5858 - protein, 841 aa, synthetic construct
  REGION 1..841: note = Variant of DNA polymerase I from Thermus sp. strain 2.9
MHHHHHHGGSGVLPVFEPKGRVLLVDGHHLAYRNFFALKGLTTSLGEPVQGVYGFAKSLLKALKEDGDVVIVVFDAKAPSFRHEAYEAYKAGRAPTPEDFPRQLALMKELVDLLGLERLEVPGFEADDVLATLAKKAEREGYEVQILTADRDLFQLLSPRISVLHPEGHRITPEWLWEKYGLRPEQWVDFRALAGDPSDNIPGVKGIGEKTALKLLKEWGSLENLLKNLDQVKPESVREKILAHLEDLKLSRELSRVRTDLPLEVDFGRRREPDWEGLKAFLERLEFGSLLHEFGLLESPLLAEEAPWPPPEGAFLGYRLSRPEPMWAELLALAASAQGRVYRAEDPHGALRGLFEVRGLLAKDLAVVALREGLDLPPTDDPMLLAYLLDPSNTTPEGVARRYGGEWTEDAAKRALLAERLHENLLGRLQGEERLLWLYEEVEKPLSRVLAHMEATGVKLDVAYLENLSLEVAAHMRRLEEEVFRLAGRSFRLNSRDQLERVLFDELGLPPIGKTEKTGKRSTSAAVLEALREVHPIVDKILQYREMAKLKGTYIDRLPALVHPKTGRLHTRFNQTATATGRLSSSDPNLQNIPVRTPLGQKIRRAFVAETGWRLVALDYRQIELRVLAHLSGDENLIRVFQEGKDIHTQTASWMFGLSAEAIDPLMRRAAKTINFGVLYGMSAFRLSQELGIPYEEAQAFIQKYFQSYPKVKAWIEKTLREGRTRGYVETLFGRRRYVPDLNARVKGKREAAERMAFNMPVQGTAADLMKLAMVRLFPQLREVGARMLLQVHDELLLEAPKERAEEVAALAKEVMEGVWPLAVPLEVEVGIGEDWLAAKG

SEQ ID NO: 5859 - DNA, 2523 bp, synthetic construct
  misc_feature 1..2523: note = Variant of DNA polymerase I from Thermus sp. strain 2.9
  source 1..2523: mol_type = other DNA
atgcaccatcatcatcatcatggcggtagcggcgtgttaccggtgttcgagcctaaaggtcgcgtgcttctggttgatggccatcatctcgcgtatcgtaacttctttgccctgaaaggattaaccaccagcctgggcgagccggtacagggtgtctacggctttgcaaagtcgctcctgaaagctctgaaagaagacggtgatgtggtgattgttgtctttgatgcgaaagcgccaagttttcgccacgaagcgtacgaagcttacaaagccgggcgtgctccaacgccggaagactttcctcgccaattggcgcttatgaaggaattagtggatttgcttggcctcgaacgcttggaagttcccggtttcgaggcagacgacgtattagcgactctcgcaaagaaagccgaacgtgagggctatgaagtccagatcttgacagcagatcgcgatcttttccagcttttatctccgcgcatctcggtgttacacccggaagggcatcgtatcaccccggaatggctctgggagaaatatggtttgcgtcccgaacaatgggtggattttcgcgccttagcaggcgatccgagcgacaatattccgggagttaaaggtatcggcgagaagacggcgctcaagctccttaaagaatgggggtcgttggagaacttgcttaagaatttagatcaggtcaaaccagagtcagtgcgtgagaagattcttgctcacctcgaagacctcaaattaagccgcgaattgtcccgtgtacgcaccgatttgccgctcgaagttgatttcggtcgccgccgcgaacctgactgggagggtcttaaagcgtttttagagcgtcttgaatttggttcgctcttgcatgaattcggccttttagaaagcccgttactggccgaagaagcaccttggccaccgcccgagggcgcgtttttaggttaccgtttgagtcgcccggaaccgatgtgggccgaattactggctcttgcagcgtctgcccagggacgtgtgtatcgcgcggaagaccctcatggtgcgctccgcggcctcttcgaagtccgtggactccttgccaaagacttagctgttgttgcattgcgcgaaggtcttgatttacctccgactgatgatccaatgcttcttgcgtacctcttggacccgtcaaacacgacgcccgaaggcgtagcccgtcgttacggcggcgagtggaccgaagatgcagcgaaacgcgcgttattggccgaacgtttgcacgaaaatttattaggacgtttgcaaggcgaggaacgtctcctctggctttacgaagaagtggagaaaccattgagtcgcgtgctcgcgcatatggaagctaccggtgtcaaattagacgtggcgtatttggagaatctcagccttgaagttgctgcccacatgcgccgcttggaggaagaagtattccgtttagcaggccgttcctttcgccttaactctcgcgatcagttagaacgtgtgttgttcgatgaacttggtctccctcctatcggcaagacagagaagaccggtaaacgtagcacttcagcggcggttttagaagctcttcgcgaagtccatcccattgtggacaagatcttgcagtaccgcgaaatggcgaaattgaaaggcacctatattgaccgtcttccggcattagtccacccgaaaacgggacgcctccatacccgcttcaaccaaacagccacggcgaccggtcgtttgtcctcctctgatccaaaccttcagaatattccagtacgtaccccattgggccagaagatccgccgtgcgtttgtagctgaggagggttggcgtttagtggccctcgattatcgtcaaattgaattacgtgtccttgcccatctttctggcgatgagaacctcatccgcgtgtttcaggaaggcaaagacattcacactcaaacggcaagctggatgtttggattatcagctgaagcgatcgatcctttgatgcgtcgtgcagcgaagaccatcaatttcggtgttctctacggtatgagtgcctttcgtttgtcgcaggaattaggcattccctatgaagaagctcagtttttcattcagaaatactttcaaagctatcccaaagttaaagcatggatcgagaagactctccgtgaaggccgcacacgtggttacgtagagaccttatttggacgtcgccgctatgttcccgatttaaacgctcgcgtgaaaggcaagcgtgaagccgccgaacgcatggcgttcaacatgcctgtacagggcacggcagctgacctcatgaaacttgcaatggtgcgcctttttccacaattgcgtgaagttggtgcccgcatgctcttgcaggtccacgatgaactcttgttagaagcgccaaaagagcgtgcggaagaggtggcagccctcgcgaaagaagttatggaaggcgtgtggcccttagcggtgcctcttgaagtcgaagttggtattggcgaggattggctggctgccaaagga

SEQ ID NO: 5860 - protein, 841 aa, synthetic construct
  REGION 1..841: note = Variant of DNA polymerase I from Thermus sp. strain 2.9
MHHHHHHGGSGVLPVFEPKGRVLLVDGHHLAYRNFFALKGLTTSLGEPVQGVYGFAKSLLKALKEDGDVVIVVFDAKAPSFRHEAYEAYKAGRAPTPEDFPRQLALMKELVDLLGLERLEVPGFEADDVLATLAKKAEREGYEVQILTADRDLFQLLSPRISVLHPEGHRITPEWLWEKYGLRPEQWVDFRALAGDPSDNIPGVKGIGEKTALKLLKEWGSLENLLKNLDQVKPESVREKILAHLEDLKLSRELSRVRTDLPLEVDFGRRREPDWEGLKAFLERLEFGSLLHEFGLLESPLLAEEAPWPPPEGAFLGYRLSRPEPMWAELLALAASAQGRVYRAEDPHGALRGLFEVRGLLAKDLAVVALREGLDLPPTDDPMLLAYLLDPSNTTPEGVARRYGGEWTEDAAKRALLAERLHENLLGRLQGEERLLWLYEEVEKPLSRVLAHMEATGVKLDVAYLENLSLEVAAHMRRLEEEVFRLAGRSFRLNSRDQLERVLFDELGLPPIGKTEKTGKRSTSAAVLEALREVHPIVDKILQYREMAKLKGTYIDRLPALVHPKTGRLHTRFNQTATATGRLSSSDPNLQNIPVRTPLGQKIRRAFVAEEGWRLVALDYRQIELRVLAHLSGDENLIRVFQEGKDIHTQTASWMFGLSAEAIDPLMRRAAKTINFGVLYGMSAFRLSQELGIPYEEAQFFIQKYFQSYPKVKAWIEKTLREGRTRGYVETLFGRRRYVPDLNARVKGKREAAERMAFNMPVQGTAADLMKLAMVRLFPQLREVGARMLLQVHDELLLEAPKERAEEVAALAKEVMEGVWPLAVPLEVEVGIGEDWLAAKG

SEQ ID NO: 5861 - DNA, 2523 bp, synthetic construct
  misc_feature 1..2523: note = Variant of DNA polymerase I from Thermus sp. strain 2.9
  source 1..2523: mol_type = other DNA
atgcaccatcatcatcatcatggcggtagcggcgtgttaccggtgttcgagcctaaaggtcgcgtgcttctggttgatggccatcatctcgcgtatcgtaacttctttgccctgaaaggattaaccaccagcctgggcgagccggtacagggtgtctacggctttgcaaagtcgctcctgaaagctctgaaagaagacggtgatgtggtgattgttgtctttgatgcgaaagcgccaagttttcgccacgaagcgtacgaagcttacaaagccgggcgtgctccaacgccggaagactttcctcgccaattggcgcttatgaaggaattagtggatttgcttggcctcgaacgcttggaagttcccggtttcgaggcagacgacgtattagcgactctcgcaaagaaagccgaacgtgagggctatgaagtccagatcttgacagcagatcgcgatcttttccagcttttatctccgcgcatctcggtgttacacccggaagggcatcgtatcaccccggaatggctctgggagaaatatggtttgcgtcccgaacaatgggtggattttcgcgccttagcaggcgatccgagcgacaatattccgggagttaaaggtatcggcgagaagacggcgctcaagctccttaaagaatgggggtcgttggagaacttgcttaagaatttagatcaggtcaaaccagagtcagtgcgtgagaagattcttgctcacctcgaagacctcaaattaagccgcgaattgtcccgtgtacgcaccgatttgccgctcgaagttgatttcggtcgccgccgcgaacctgactgggagggtcttaaagcgtttttagagcgtcttgaatttggttcgctcttgcatgaattcggccttttagaaagcccgttactggccgaagaagcaccttggccaccgcccgagggcgcgtttttaggttaccgtttgagtcgcccggaaccgatgtgggccgaattactggctcttgcagcgtctgcccagggacgtgtgtatcgcgcggaagaccctcatggtgcgctccgcggcctcttcgaagtccgtggactccttgccaaagacttagctgttgttgcattgcgcgaaggtcttgatttacctccgactgatgatccaatgcttctttgttacctcttggacccgtcaaacacgacgcccgaaggcgtagcccgtcgttacggcggcgagtggaccgaagatgcagcgaaacgcgcgttattggccgaacgtttgcacgaaaatttattaggacgtttgcaaggcgaggaacgtctcctctggctttacgaagaagtggagaaaccattgagtcgcgtgctcgcgcatatggaagctaccggtgtcaaattagacgtggcgtatttggagaatctcagccttgaagttgctgcccacatgcgccgcttggaggaagaagtattccgtttagcaggccgttcctttcgccttaactctcgcgatcagttagaacgtgtgttgttcgatgaacttggtctccctcctatcggcaagacagagaagaccggtaaacgtagcacttcagcggcggttttagaagctcttcgcgaagtccatcccattgtggacaagatcttgcagtaccgcgaaatggcgaaattgaaaggcacctatattgaccgtcttccggcattagtccacccgaaaacgggacgcctccatacccgcttcaaccaaacagccacggcgaccggtcgtttgtcctcctctgatccaaaccttcagaatattccagtacgtaccccattgggccagaagatccgccgtgcgtttgtagctgaggagggttggcgtttagtggccctcgattatcgtcaaattgaattacgtgtccttgcccatctttctggcgatgagaacctcatccgcgtgtttcaggaaggcaaagacattcacactcaaacggcaagctggatgtttggattatcagctgaagcgatcgatcctttgatgcgtcgtgcagcgaagaccatcaatttcggtgttctctacggtatgagtgcctttcgtttgtcgcaggaattaggcattccctatgaagaagctcaggcgttcattcagaaatactttcaaagctatcccaaagttaaagcatggatcgagaagactctccgtgaaggccgcacacgtggttacgtagagaccttatttggacgtcgccgctatgttcccgatttaaacgctcgcgtgaaaggcaagcgtgaagccgccgaacgcatggcgttcaacatgcctgtacagggcacggcagctgacctcatgaaacttgcaatggtgcgcctttttccacaattgcgtgaagttggtgcccgcatgctcttgcaggtccacgatgaactcttgttagaagcgccaaaagagcgtgcggaagaggtggcagccctcgcgaaagaagttatggaaggcgtgtggcccttagcggtgcctcttgaagtcgaagttggtattggcgaggattggctggctgccaaagga

SEQ ID NO: 5862 - protein, 841 aa, synthetic construct
  REGION 1..841: note = Variant of DNA polymerase I from Thermus sp. strain 2.9
MHHHHHHGGSGVLPVFEPKGRVLLVDGHHLAYRNFFALKGLTTSLGEPVQGVYGFAKSLLKALKEDGDVVIVVFDAKAPSFRHEAYEAYKAGRAPTPEDFPRQLALMKELVDLLGLERLEVPGFEADDVLATLAKKAEREGYEVQILTADRDLFQLLSPRISVLHPEGHRITPEWLWEKYGLRPEQWVDFRALAGDPSDNIPGVKGIGEKTALKLLKEWGSLENLLKNLDQVKPESVREKILAHLEDLKLSRELSRVRTDLPLEVDFGRRREPDWEGLKAFLERLEFGSLLHEFGLLESPLLAEEAPWPPPEGAFLGYRLSRPEPMWAELLALAASAQGRVYRAEDPHGALRGLFEVRGLLAKDLAVVALREGLDLPPTDDPMLLCYLLDPSNTTPEGVARRYGGEWTEDAAKRALLAERLHENLLGRLQGEERLLWLYEEVEKPLSRVLAHMEATGVKLDVAYLENLSLEVAAHMRRLEEEVFRLAGRSFRLNSRDQLERVLFDELGLPPIGKTEKTGKRSTSAAVLEALREVHPIVDKILQYREMAKLKGTYIDRLPALVHPKTGRLHTRFNQTATATGRLSSSDPNLQNIPVRTPLGQKIRRAFVAEEGWRLVALDYRQIELRVLAHLSGDENLIRVFQEGKDIHTQTASWMFGLSAEAIDPLMRRAAKTINFGVLYGMSAFRLSQELGIPYEEAQAFIQKYFQSYPKVKAWIEKTLREGRTRGYVETLFGRRRYVPDLNARVKGKREAAERMAFNMPVQGTAADLMKLAMVRLFPQLREVGARMLLQVHDELLLEAPKERAEEVAALAKEVMEGVWPLAVPLEVEVGIGEDWLAAKG

SEQ ID NO: 5863 - DNA, 2523 bp, synthetic construct
  misc_feature 1..2523: note = Variant of DNA polymerase I from Thermus sp. strain 2.9
  source 1..2523: mol_type = other DNA
atgcaccatcatcatcatcatggcggtagcggcgtgttaccggtgttcgagcctaaaggtcgcgtgcttctggttgatggccatcatctcgcgtatcgtaacttctttgccctgaaaggattaaccaccagcctgggcgagccggtacagggtgtctacggctttgcaaagtcgctcctgaaagctctgaaagaagacggtgatgtggtgattgttgtctttgatgcgaaagcgccaagttttcgccacgaagcgtacgaagcttacaaagccgggcgtgctccaacgccggaagactttcctcgccaattggcgcttatgaaggaattagtggatttgcttggcctcgaacgcttggaagttcccggtttcgaggcagacgacgtattagcgactctcgcaaagaaagccgaacgtgagggctatgaagtccagatcttgacagcagatcgcgatcttttccagcttttatctccgcgcatctcggtgttacacccggaagggcatcgtatcaccccggaatggctctgggagaaatatggtttgcgtcccgaacaatgggtggattttcgcgccttagcaggcgatccgagcgacaatattccgggagttaaaggtatcggcgagaagacggcgctcaagctccttaaagaatgggggtcgttggagaacttgcttaagaatttagatcaggtcaaaccagagtcagtgcgtgagaagattcttgctcacctcgaagacctcaaattaagccgcgaattgtcccgtgtacgcaccgatttgccgctcgaagttgatttcggtcgccgccgcgaacctgactgggagggtcttaaagcgtttttagagcgtcttgaatttggttcgctcttgcatgaattcggccttttagaaagcccgttactggccgaagaagcaccttggccaccgcccgagggcgcgtttttaggttaccgtttgagtcgcccggaaccgatgtgggccgaattactggctcttgcagcgtctgcccagggacgtgtgtatcgcgcggaagaccctcatggtgcgctccgcggcctcttcgaagtccgtggactccttgccaaagacttagctgttgttgcattgcgcgaaggtcttgatttacctccgactgatgatccaatgcttcttgcgtacctcttggacccgtcaaacacgacgcccaatggcgtagcccgtcgttacggcggcgagtggaccgaagatgcagcgaaacgcgcgttattggccgaacgtttgcacgaaaatttattaggacgtttgcaaggcgaggaacgtctcctctggctttacgaagaagtggagaaaccattgagtcgcgtgctcgcgcatatggaagctaccggtgtcaaattagacgtggcgtatttggagaatctcagccttgaagttgctgcccacatgcgccgcttggaggaagaagtattccgtttagcaggccgttcctttcgccttaactctcgcgatcagttagaacgtgtgttgttcgatgaacttggtctccctcctatcggcaagacagagaagaccggtaaacgtagcacttcagcggcggttttagaagctcttcgcgaagtccatcccattgtggacaagatcttgcagtaccgcgaaatggcgaaattgaaaggcacctatattgaccgtcttccggcattagtccacccgaaaacgggacgcctccatacccgcttcaaccaaacagccacggcgaccggtcgtttgtcctcctctgatccaaaccttcagaatattccagtacgtaccccattgggccagaagatccgccgtgcgtttgtagctgaggagggttggcgtttagtggccctcgattatcgtcaaattgaattacgtgtccttgcccatctttctggcgatgagaacctcatccgcgtgtttcaggaaggcaaagacattcacactcaaacggcaagctggatgtttggattatcagctgaagcgatcgatcctttgatgcgtcgtgcagcgaagaccatcaatttcggtgttctctacggtatgagtgcctttcgtttgtcgcaggaattaggcattccctatgaagaagctcaggcgttcattcagaaatactttcaaagctatcccaaagttaaagcatggatcgagaagactctccgtgaaggccgcacacgtggttacgtagagaccttatttggacgtcgccgctatgttcccgatttaaacgctcgcgtgaaaggcaagcgtgaagccgccgaacgcatggcgttcaacatgcctgtacagggcacggcagctgacctcatgaaacttgcaatggtgcgcctttttccacaattgcgtgaagttggtgcccgcatgctcttgcaggtccacgatgaactcttgttagaagcgccaaaagagcgtgcggaagaggtggcagccctcgcgaaagaagttatggaaggcgtgtggcccttagcggtgcctcttgaagtcgaagttggtattggcgaggattggctggctgccaaagga

SEQ ID NO: 5864 - protein, 841 aa, synthetic construct
  REGION 1..841: note = Variant of DNA polymerase I from Thermus sp. strain 2.9
MHHHHHHGGSGVLPVFEPKGRVLLVDGHHLAYRNFFALKGLTTSLGEPVQGVYGFAKSLLKALKEDGDVVIVVFDAKAPSFRHEAYEAYKAGRAPTPEDFPRQLALMKELVDLLGLERLEVPGFEADDVLATLAKKAEREGYEVQILTADRDLFQLLSPRISVLHPEGHRITPEWLWEKYGLRPEQWVDFRALAGDPSDNIPGVKGIGEKTALKLLKEWGSLENLLKNLDQVKPESVREKILAHLEDLKLSRELSRVRTDLPLEVDFGRRREPDWEGLKAFLERLEFGSLLHEFGLLESPLLAEEAPWPPPEGAFLGYRLSRPEPMWAELLALAASAQGRVYRAEDPHGALRGLFEVRGLLAKDLAVVALREGLDLPPTDDPMLLAYLLDPSNTTPNGVARRYGGEWTEDAAKRALLAERLHENLLGRLQGEERLLWLYEEVEKPLSRVLAHMEATGVKLDVAYLENLSLEVAAHMRRLEEEVFRLAGRSFRLNSRDQLERVLFDELGLPPIGKTEKTGKRSTSAAVLEALREVHPIVDKILQYREMAKLKGTYIDRLPALVHPKTGRLHTRFNQTATATGRLSSSDPNLQNIPVRTPLGQKIRRAFVAEEGWRLVALDYRQIELRVLAHLSGDENLIRVFQEGKDIHTQTASWMFGLSAEAIDPLMRRAAKTINFGVLYGMSAFRLSQELGIPYEEAQAFIQKYFQSYPKVKAWIEKTLREGRTRGYVETLFGRRRYVPDLNARVKGKREAAERMAFNMPVQGTAADLMKLAMVRLFPQLREVGARMLLQVHDELLLEAPKERAEEVAALAKEVMEGVWPLAVPLEVEVGIGEDWLAAKG

SEQ ID NO: 5865 - DNA, 2523 bp, synthetic construct
  misc_feature 1..2523: note = Variant of DNA polymerase I from Thermus sp. strain 2.9
  source 1..2523: mol_type = other DNA
atgcaccatcatcatcatcatggcggtagcggcgtgttaccggtgttcgagcctaaaggtcgcgtgcttctggttgatggccatcatctcgcgtatcgtaacttctttgccctgaaaggattaaccaccagcctgggcgagccggtacagggtgtctacggctttgcaaagtcgctcctgaaagctctgaaagaagacggtgatgtggtgattgttgtctttgatgcgaaagcgccaagttttcgccacgaagcgtacgaagcttacaaagccgggcgtgctccaacgccggaagactttcctcgccaattggcgcttatgaaggaattagtggatttgcttggcctcgaacgcttggaagttcccggtttcgaggcagacgacgtattagcgactctcgcaaagaaagccgaacgtgagggctatgaagtccagatcttgacagcagatcgcgatcttttccagcttttatctccgcgcatctcggtgttacacccggaagggcatcgtatcaccccggaatggctctgggagaaatatggtttgcgtcccgaacaatgggtggattttcgcgccttagcaggcgatccgagcgacaatattccgggagttaaaggtatcggcgagaagacggcgctcaagctccttaaagaatgggggtcgttggagaacttgcttaagaatttagatcaggtcaaaccagagtcagtgcgtgagaagattcttgctcacctcgaagacctcaaattaagccgcgaattgtcccgtgtacgcaccgatttgccgctcgaagttgatttcggtcgccgccgcgaacctgactgggagggtcttaaagcgtttttagagcgtcttgaatttggttcgctcttgcatgaattcggccttttagaaagcccgttactggccgaagaagcaccttggccaccgcccgagggcgcgtttttaggttaccgtttgagtcgcccggaaccgatgtgggccgaattactggctcttgcatcgtctgcccagggacgtgtgtatcgcgcggaagaccctcatggtgcgctccgcggcctcttcgaagtccgtggactccttgccaaagacttagctgttgttgcattgcgcgaaggtcttgatttacctccgactgatgatccaatgcttcttgcgtacctcttggacccgtcaaacacgacgcccgaaggcgtagcccgtcgttacggcggcgagtggaccgaagatgcagcgaaacgcgcgttattggccgaacgtttgcacgaaaatttattaggacgtttgcaaggcgaggaacgtctcctctggctttacgaagaagtggagaaaccattgagtcgcgtgctcgcgcatatggaagctaccggtgtcaaattagacgtggcgtatttggagaatctcagccttgaagttgctgcccacatgcgccgcttggaggaagaagtattccgtttagcaggccgttcctttcgccttaactctcgcgatcagttagaacgtgtgttgttcgatgaacttggtctccctcctatcggcaagacagagaagaccggtaaacgtagcacttcagcggcggttttagaagctcttcgcgaagtccatcccattgtggacaagatcttgcagtaccgcgaaatggcgaaattgaaaggcacctatattgaccgtcttccggcattagtccacccgaaaacgggacgcctccatacccgcttcaaccaaacagccacggcgaccggtcgtttgtcctcctctgatccaaaccttcagaatattccagtacgtaccccattgggccagaagatccgccgtgcgtttgtagctgaggagggttggcgtttagtggccctcgattatcgtcaaattgaattacgtgtccttgcccatctttctggcgatgagaacctcatccgcgtgtttcaggaaggcaaagacattcacactcaaacggcaagctggatgtttggattatcagctgaagcgatcgatcctttgatgcgtcgtgcagcgaagaccatcaatttcggtgttctctacggtatgagtgcctttcgtttgtcgcaggaattaggcattccctatgaagaagctcaggcgttcattcagaaatactttcaaagctatcccaaagttaaagcatggatcgagaagactctccgtgaaggccgcacacgtggttacgtagagaccttatttggacgtcgccgctatgttcccgatttaaacgctcgcgtgaaaggcaagcgtgaagccgccgaacgcatggcgttcaacatgcctgtacagggcacggcagctgacctcatgaaacttgcaatggtgcgcctttttccacaattgcgtgaagttggtgcccgcatgctcttgcaggtccacgatgaactcttgttagaagcgccaaaagagcgtgcggaagaggtggcagccctcgcgaaagaagttatggaaggcgtgtggcccttagcggtgcctcttgaagtcgaagttggtattggcgaggattggctggctgccaaagga

SEQ ID NO: 5866 - protein, 841 aa, synthetic construct
  REGION 1..841: note = Variant of DNA polymerase I from Thermus sp. strain 2.9
MHHHHHHGGSGVLPVFEPKGRVLLVDGHHLAYRNFFALKGLTTSLGEPVQGVYGFAKSLLKALKEDGDVVIVVFDAKAPSFRHEAYEAYKAGRAPTPEDFPRQLALMKELVDLLGLERLEVPGFEADDVLATLAKKAEREGYEVQILTADRDLFQLLSPRISVLHPEGHRITPEWLWEKYGLRPEQWVDFRALAGDPSDNIPGVKGIGEKTALKLLKEWGSLENLLKNLDQVKPESVREKILAHLEDLKLSRELSRVRTDLPLEVDFGRRREPDWEGLKAFLERLEFGSLLHEFGLLESPLLAEEAPWPPPEGAFLGYRLSRPEPMWAELLALASSAQGRVYRAEDPHGALRGLFEVRGLLAKDLAVVALREGLDLPPTDDPMLLAYLLDPSNTTPEGVARRYGGEWTEDAAKRALLAERLHENLLGRLQGEERLLWLYEEVEKPLSRVLAHMEATGVKLDVAYLENLSLEVAAHMRRLEEEVFRLAGRSFRLNSRDQLERVLFDELGLPPIGKTEKTGKRSTSAAVLEALREVHPIVDKILQYREMAKLKGTYIDRLPALVHPKTGRLHTRFNQTATATGRLSSSDPNLQNIPVRTPLGQKIRRAFVAEEGWRLVALDYRQIELRVLAHLSGDENLIRVFQEGKDIHTQTASWMFGLSAEAIDPLMRRAAKTINFGVLYGMSAFRLSQELGIPYEEAQAFIQKYFQSYPKVKAWIEKTLREGRTRGYVETLFGRRRYVPDLNARVKGKREAAERMAFNMPVQGTAADLMKLAMVRLFPQLREVGARMLLQVHDELLLEAPKERAEEVAALAKEVMEGVWPLAVPLEVEVGIGEDWLAAKG

SEQ ID NO: 5867 - DNA, 2523 bp, synthetic construct
  misc_feature 1..2523: note = Variant of DNA polymerase I from Thermus sp. strain 2.9
  source 1..2523: mol_type = other DNA
atgcaccatcatcatcatcatggcggtagcggcgtgttaccggtgttcgagcctaaaggtcgcgtgcttctggttgatggccatcatctcgcgtatcgtaacttctttgccctgaaaggattaaccaccagcctgggcgagccggtacagggtgtctacggctttgcaaagtcgctcctgaaagctctgaaagaagacggtgatgtggtgattgttgtctttgatgcgaaagcgccaagttttcgccacgaagcgtacgaagcttacaaagccgggcgtgctccaacgccggaagactttcctcgccaattggcgcttatgaaggaattagtggatttgcttggcctcgaacgcttggaagttcccggtttcgaggcagacgacgtattagcgactctcgcaaagaaagccgaacgtgagggctatgaagtccagatcttgacagcagatcgcgatcttttccagcttttatctccgcgcatctcggtgttacacccggaagggcatcgtatcaccccggaatggctctgggagaaatatggtttgcgtcccgaacaatgggtggattttcgcgccttagcaggcgatccgagcgacaatattccgggagttaaaggtatcggcgagaagacggcgctcaagctccttaaagaatgggggtcgttggagaacttgcttaagaatttagatcaggtcaaaccagagtcagtgcgtgagaagattcttgctcacctcgaagacctcaaattaagccgcgaattgtcccgtgtacgcaccgatttgccgctcgaagttgatttcggtcgccgccgcgaacctgactgggagggtcttaaagcgtttttagagcgtcttgaatttggttcgctcttgcatgaattcggccttttagaaagcccgttactggccgaagaagcaccttggccaccgcccgagggcgcgtttttaggttaccgtttgagtcgcccggaaccgatgtgggccgaattactggctcttgcagcgtctgcccagggacgtgtgtatcgcgcggaagaccctcatggtgcgctccgcggcctcttcgaagtccgtggactccttgccaaagacttagctgttgttgcattgcgcgaaggtcttgatttacctccgactgatgatccaatgcttcttgcgtacctcttggacccgtcaaacacgacgcccgggggcgtagcccgtcgttacggcggcgagtggaccgaagatgcagcgaaacgcgcgttattggccgaacgtttgcacgaaaatttattaggacgtttgcaaggcgaggaacgtctcctctggctttacgaagaagtggagaaaccattgagtcgcgtgctcgcgcatatggaagctaccggtgtcaaattagacgtggcgtatttggagaatctcagccttgaagttgctgcccacatgcgccgcttggaggaagaagtattccgtttagcaggccgttcctttcgccttaactctcgcgatcagttagaacgtgtgttgttcgatgaacttggtctccctcctatcggcaagacagagaagaccggtaaacgtagcacttcagcggcggttttagaagctcttcgcgaagtccatcccattgtggacaagatcttgcagtaccgcgaaatggcgaaattgaaaggcacctatattgaccgtcttccggcattagtccacccgaaaacgggacgcctccatacccgcttcaaccaaacagccacggcgaccggtcgtttgtcctcctctgatccaaaccttcagaatattccagtacgtaccccattgggccagaagatccgccgtgcgtttgtagctgaggagggttggcgtttagtggccctcgattatcgtcaaattgaattacgtgtccttgcccatctttctggcgatgagaacctcatccgcgtgtttcaggaaggcaaagacattcacactcaaacggcaagctggatgtttggattatcagctgaagcgatcgatcctttgatgcgtcgtgcagcgaagaccatcaatttcggtgttctctacggtatgagtgcctttcgtttgtcgcaggaattaggcattccctatgaagaagctcaggcgttcattcagaaatactttcaaagctatcccaaagttaaagcatggatcgagaagactctccgtgaaggccgcacacgtggttacgtagagaccttatttggacgtcgccgctatgttcccgatttaaacgctcgcgtgaaaggcaagcgtgaagccgccgaacgcatggcgttcaacatgcctgtacagggcacggcagctgacctcatgaaacttgcaatggtgcgcctttttccacaattgcgtgaagttggtgcccgcatgctcttgcaggtccacgatgaactcttgttagaagcgccaaaagagcgtgcggaagaggtggcagccctcgcgaaagaagttatggaaggcgtgtggcccttagcggtgcctcttgaagtcgaagttggtattggcgaggattggctggctgccaaagga

SEQ ID NO: 5868 - protein, 841 aa, synthetic construct
  REGION 1..841: note = Variant of DNA polymerase I from Thermus sp. strain 2.9
MHHHHHHGGSGVLPVFEPKGRVLLVDGHHLAYRNFFALKGLTTSLGEPVQGVYGFAKSLLKALKEDGDVVIVVFDAKAPSFRHEAYEAYKAGRAPTPEDFPRQLALMKELVDLLGLERLEVPGFEADDVLATLAKKAEREGYEVQILTADRDLFQLLSPRISVLHPEGHRITPEWLWEKYGLRPEQWVDFRALAGDPSDNIPGVKGIGEKTALKLLKEWGSLENLLKNLDQVKPESVREKILAHLEDLKLSRELSRVRTDLPLEVDFGRRREPDWEGLKAFLERLEFGSLLHEFGLLESPLLAEEAPWPPPEGAFLGYRLSRPEPMWAELLALAASAQGRVYRAEDPHGALRGLFEVRGLLAKDLAVVALREGLDLPPTDDPMLLAYLLDPSNTTPGGVARRYGGEWTEDAAKRALLAERLHENLLGRLQGEERLLWLYEEVEKPLSRVLAHMEATGVKLDVAYLENLSLEVAAHMRRLEEEVFRLAGRSFRLNSRDQLERVLFDELGLPPIGKTEKTGKRSTSAAVLEALREVHPIVDKILQYREMAKLKGTYIDRLPALVHPKTGRLHTRFNQTATATGRLSSSDPNLQNIPVRTPLGQKIRRAFVAEEGWRLVALDYRQIELRVLAHLSGDENLIRVFQEGKDIHTQTASWMFGLSAEAIDPLMRRAAKTINFGVLYGMSAFRLSQELGIPYEEAQAFIQKYFQSYPKVKAWIEKTLREGRTRGYVETLFGRRRYVPDLNARVKGKREAAERMAFNMPVQGTAADLMKLAMVRLFPQLREVGARMLLQVHDELLLEAPKERAEEVAALAKEVMEGVWPLAVPLEVEVGIGEDWLAAKG

SEQ ID NO: 5869 - DNA, 2523 bp, synthetic construct
  misc_feature 1..2523: note = Variant of DNA polymerase I from Thermus sp. strain 2.9
  source 1..2523: mol_type = other DNA
atgcaccatcatcatcatcatggcggtagcggcgtgttaccggtgttcgagcctaaaggtcgcgtgcttctggttgatggccatcatctcgcgtatcgtaacttctttgccctgaaaggattaaccaccagccgcggcgagccggtacagggtgtctacggctttgcaaagtcgctcctgaaagctctgaaagaagacggtgatgtggtgattgttgtctttgatgcgaaagcgccaagttttcgccacgaagcgtacgaagcttacaaagccgggcgtgctccaacgccggaagactttcctcgccaattggcgcttatgaaggaattagtggatttgcttggcctcgaacgcttggaagttcccggtttcgaggcagacgacgtattagcgactctcgcaaagaaagccgaacgtgagggctatgaagtccagatcttgacagcagatcgcgatcttttccagcttttatctccgcgcatctcggtgttacacccggaagggcatcgtatcaccccggaatggctctgggagaaatatggtttgcgtcccgaacaatgggtggattttcgcgccttagcaggcgatccgagcgacaatattccgggagttaaaggtatcggcgagaagacggcgctcaagctccttaaagaatgggggtcgttggagaacttgcttaagaatttagatcaggtcaaaccagagtcagtgcgtgagaagattcttgctcacctcgaagacctcaaattaagccgcgaattgtcccgtgtacgcaccgatttgccgctcgaagttgatttcggccgccgccgcgaacctgactgggagggtcttaaagcgtttttagagcgtcttgaatttggttcgctcttgcatgaattcggccttttagaaagcccgttaccggccgaagaagcaccttggccaccgcccgagggcgcgtttttaggttaccgtttgagtcgcccggaaccgatgtgggccgaattactggctcttgcagcgtctgcccagggacgtgtgtatcgcgcggaagaccctcatggtgcgctccgcggcctcttcgaagtccgtggactccttgccaaagacttagctgttgttgcattgcgcgaaggtcttgatttacctccgactgatgatccaatgcttcttgcgtacctcttggacccgtcaaacacgacgcccgaaggcgtagcccgtcgttacggcggcgagtggaccgaagatgcagcgaaacgcgcgttattggccgaacgtttgcacgcaaatttattaggacgtttgcaaggcgaggaacgtctcctctggctttacgaagaagtggagaaaccattgagtcgcgtgctcgcgcatatggaagctaccggtgtcaaattagacgtggcgtatttggagaatcttcaccttgaagttgctgcccacatgcgccgcttggaggaagaagtattccgtttagcaggccgttcctttcgccttaactctcgcgatcagttagaacgtgtgttgttcgatgaacttggtctccctcctatcggcaagacagagaagaccggtaaacgtagcacttcagcggcggttttagaagctcttcgcgaagtccatcccattgtggacaagatcttgcagtaccgcgaaatggcgaaattgaaaggcacctatattgaccgtcttccggcattagtccacccgaaaacgggacgcctccatacccgcttcaaccaaacagccacggcgaccggtcgtttgtcctcctctgatccaaaccttcagaatattccagtacgtaccccattgggccagaagatccgccgtgcgtttgtagctgaggagggttggcgtttagtggccctcgattatagtcaaattgaattacgtgtccttgcccatctttctggcgatgagaacctcatccgcgtgtttcaggaaggcaaagacattcacactcaaacggcaagctggatgtttggattatcagctgaagcgatcgatcctttgatgcgtcgtgcagcgaagaccatcaatttcggtgttctctacggtatgagtgcctttcgtttgtcgcaggaattaggcattccctatgaagaagctcaggcgttcattcagaaatactttcaaagctatcccaaagttaaagcatggatcgagaagactctccgcgaaggccgcacacgtggttacgtagagaccttatttggacgtcgccgctatgttcccgatttaaacgctcgcgtgaaaggcaagcgtgaagccgccgaacgcatggcgttcaacatgcctgtacagggcacggcagctgacctcatgaaacttgcaatggtgcgcctttttccacaattgcgtgaagttggtgcccgcatgctcttgcaggtccacgatgaactcttgttagaagcgccaaaagagcgtgcggaagaggtggcagccctcgcgaaagaagttatggaaggcgtgtggcccttagcggtgcctcttgaagtcgaagttggtattggcgaggattggctggctgccaaagga

SEQ ID NO: 5870 - protein, 841 aa, synthetic construct
  REGION 1..841: note = Variant of DNA polymerase I from Thermus sp. strain 2.9
MHHHHHHGGSGVLPVFEPKGRVLLVDGHHLAYRNFFALKGLTTSRGEPVQGVYGFAKSLLKALKEDGDVVIVVFDAKAPSFRHEAYEAYKAGRAPTPEDFPRQLALMKELVDLLGLERLEVPGFEADDVLATLAKKAEREGYEVQILTADRDLFQLLSPRISVLHPEGHRITPEWLWEKYGLRPEQWVDFRALAGDPSDNIPGVKGIGEKTALKLLKEWGSLENLLKNLDQVKPESVREKILAHLEDLKLSRELSRVRTDLPLEVDFGRRREPDWEGLKAFLERLEFGSLLHEFGLLESPLPAEEAPWPPPEGAFLGYRLSRPEPMWAELLALAASAQGRVYRAEDPHGALRGLFEVRGLLAKDLAVVALREGLDLPPTDDPMLLAYLLDPSNTTPEGVARRYGGEWTEDAAKRALLAERLHANLLGRLQGEERLLWLYEEVEKPLSRVLAHMEATGVKLDVAYLENLHLEVAAHMRRLEEEVFRLAGRSFRLNSRDQLERVLFDELGLPPIGKTEKTGKRSTSAAVLEALREVHPIVDKILQYREMAKLKGTYIDRLPALVHPKTGRLHTRFNQTATATGRLSSSDPNLQNIPVRTPLGQKIRRAFVAEEGWRLVALDYSQIELRVLAHLSGDENLIRVFQEGKDIHTQTASWMFGLSAEAIDPLMRRAAKTINFGVLYGMSAFRLSQELGIPYEEAQAFIQKYFQSYPKVKAWIEKTLREGRTRGYVETLFGRRRYVPDLNARVKGKREAAERMAFNMPVQGTAADLMKLAMVRLFPQLREVGARMLLQVHDELLLEAPKERAEEVAALAKEVMEGVWPLAVPLEVEVGIGEDWLAAKG

SEQ ID NO: 5871 - DNA, 2523 bp, synthetic construct
  misc_feature 1..2523: note = Variant of DNA polymerase I from Thermus sp. strain 2.9
  source 1..2523: mol_type = other DNA
atgcaccatcatcatcatcatggcggtagcggcgtgttaccggtgttcgagcctaaaggtcgcgtgcttctggttgatggccatcatctcgcgtatcgtaacttctttgccctgaaaggattaaccaccagcctgggcgagccggtacagggtgtctacggctttgcaaagtcgctcctgaaagctctgaaagaagacggtgatgtggtgattgttgtctttgatgcgaaagcgccaagttttcgccacgaagcgtacgaagcttacaaagccgggcgtgctccaacgccggaagactttcctcgccaattggcgcttatgaaggaattagtggatttgcttggcctcgaacgcttggaagttcccggtttcgaggcagacgacgtattagcgactctcgcaaagaaagccgaacgtgagggctatgaagtccagatcttgacagcagatcgcgatcttttccagcttttatctccgcgcatctcggtgttacacccggaagggcatcgtatcaccccggaatggctctgggagaaatatggtttgcgtcccgaacaatgggtggattttcgcgccttagcaggcgatccgagcgacaatattccgggagttaaaggtatcggcgagaagacggcgctcaagctccttaaagaatgggggtcgttggagaacttgcttaagaatttagatcaggtcaaaccagagtcagtgcgtgagaagattcttgctcacctcgaagacctcaaattaagccgcgaattgtcccgtgtacgcaccgatttgccgctcgaagttgatttcggtcgccgccgcgaacctgactgggagggtcttaaagcgtttttagagcgtcttgaatttggttcgctcttgcatgaattcggccttttagaaagcccgttactggccgaagaagcaccttggccaccgcccgagggcgcgtttttaggttaccgtttgagtcgcccggaaccgatgtgggccgaattactggctcttgcagcgtctgcccagggacgtgtgtatcgcgcggaagaccctcatggtgcgctccgcggcctcttcgaagtccgtggcctccttgccaaagacttagctgttgttgcattgcgcgaaggtcttgatttacctccgactgatgatccaatgcttcttgcgtacctcttggacccgtcaaacacgacgcccgaaggcgtagcccgtcgttacggcggcgagtggtgggaagatgcagccaaacgcgcgttattggccgaacgtttgcacgaaaatttattaggacgtttgcaaggcgaggagcgtctccgttggctttacgaagaagtggagaaaccattgagtcgcgtgctcgcgcatatggaagctaccggtgtcaaattagacgtggcgtatttggagaatctcagccttgaagttgctgcccacatgcgccgcttggaggaagaagtattccgtttagcaggccgttcctttcgccttaactctcgcgatcagttagaacgtgtgttgttcgatgaacttggtctccctcctatcggcaagacagagaagaccggtaaacgtagcacttcagcggcggttttagaagctcttcgcgaagtccatcccattgtggacaagatcttgcagtaccgcgaaatggcgaaattgaaaggcacctatattgaccgtcttccggcattagtccacccgaaaacgggacgcctccatacccgcttcaaccaaacagccacggcgaccggtcgtttgtcctcctctgatccaaaccttcagaatattccagtacgtaccccattgggccagaagatccgccgtgcgtttgtagctgaggagggttggcgtttagtggccctcgattatcgtcaaattgaattacgtgtccttgcccatctttctggcgatgagaacctcatccgcgtgtttcaggaaggcaaagacattcacactcaaacggcaagctggatgtttggattatcagctgaagcgatcgatcctttgatgcgtcgtgcagcgaagaccatcaatttcggtgttctctacggtatgagtgcctttcgtttgtcgcaggaattaggcattcccctggaagaagctcaggctttcattcagaaatactttcaaggctatcccaaagttaaagcatggatcgagaagactctccgtgaaggccgcacacgtggttacgtagagaccttatttggacgtcgccgctatgttcccgatttaaacggtcgcgtgaaaggcaagcgtgaagccgccgaacgcatggcgttcaacatgcctgtacagggcacggcagctgacctcatgaaacttgcaatggtgcgcctttttccacaattgcgtgaagttggtgcccgcatgctgttgcaggtccacgatgaactcttgttagaagcgccaaaagagcgtgcggaagaggtggcagccctcgcgaaagaagttatggaaggcgtgtggcccttagcggtgcctcttgaagtcgaagttggtattggcgaggattggctggctgccaaagga

SEQ ID NO: 5872 - protein, 841 aa, synthetic construct
  REGION 1..841: note = Variant of DNA polymerase I from Thermus sp. strain 2.9
MHHHHHHGGSGVLPVFEPKGRVLLVDGHHLAYRNFFALKGLTTSLGEPVQGVYGFAKSLLKALKEDGDVVIVVFDAKAPSFRHEAYEAYKAGRAPTPEDFPRQLALMKELVDLLGLERLEVPGFEADDVLATLAKKAEREGYEVQILTADRDLFQLLSPRISVLHPEGHRITPEWLWEKYGLRPEQWVDFRALAGDPSDNIPGVKGIGEKTALKLLKEWGSLENLLKNLDQVKPESVREKILAHLEDLKLSRELSRVRTDLPLEVDFGRRREPDWEGLKAFLERLEFGSLLHEFGLLESPLLAEEAPWPPPEGAFLGYRLSRPEPMWAELLALAASAQGRVYRAEDPHGALRGLFEVRGLLAKDLAVVALREGLDLPPTDDPMLLAYLLDPSNTTPEGVARRYGGEWWEDAAKRALLAERLHENLLGRLQGEERLRWLYEEVEKPLSRVLAHMEATGVKLDVAYLENLSLEVAAHMRRLEEEVFRLAGRSFRLNSRDQLERVLFDELGLPPIGKTEKTGKRSTSAAVLEALREVHPIVDKILQYREMAKLKGTYIDRLPALVHPKTGRLHTRFNQTATATGRLSSSDPNLQNIPVRTPLGQKIRRAFVAEEGWRLVALDYRQIELRVLAHLSGDENLIRVFQEGKDIHTQTASWMFGLSAEAIDPLMRRAAKTINFGVLYGMSAFRLSQELGIPLEEAQAFIQKYFQGYPKVKAWIEKTLREGRTRGYVETLFGRRRYVPDLNGRVKGKREAAERMAFNMPVQGTAADLMKLAMVRLFPQLREVGARMLLQVHDELLLEAPKERAEEVAALAKEVMEGVWPLAVPLEVEVGIGEDWLAAKG

SEQ ID NO: 5873 - DNA, 2523 bp, synthetic construct
  misc_feature 1..2523: note = Variant of DNA polymerase I from Thermus sp. strain 2.9
  source 1..2523: mol_type = other DNA
atgcaccatcatcatcatcatggcggtagcggcgtgttaccggtgttcgagcctaaaggtcgcgtgcttctggttgatggccatcatctcgcgtatcgtaacttctttgccctgaaaggattaaccaccagcctgggcgagccggtacagggtgtctacggctttgcaaagtcgctcctgaaagctctgaaagaagacggtgatgtggtgattgttgtctttgatgcgaaagcgccaagttttcgccacgaagcgtacgaagcttacaaagccgggcgtgctccaacgccggaagactttcctcgccaattggcgcttatgaaggaattagtggatttgcttggcctcgaacgcttggaagttcccggtttcgaggcagacgacgtattagcgactctcgcaaagaaagccgaacgtgagggctatgaagtccagatcttgacagcagatcgcgatcttttccagcttttatctccgcgcatctcggtgttacacccggaagggcatcgtatcaccccggaatggctctgggagaaatatggtttgcgtcccgaacaatgggtggattttcgcgccttagcaggcgatccgagcgacaatattccgggagttaaaggtatcggcgagaagacggcgctcaagctccttaaagaatgggggtcgttggagaacttgcttaagaatttagatcaggtcaaaccagagtcagtgcgtgagaagattcttgctcacctcgaagacctcaaattaagccgcgaattgtcccgtgtacgcaccgatttgccgctcgaagttgatttcggtcgccgccgcgaacctgactgggagggtcttaaagcgtttttagagcgtcttgaatttggttcgctcttgcatgaattcggccttttagaaagcccgttactggccgaagaagcaccttggccaccgcccgagggcgcgtttttaggttaccgtttgagtcgcccggaaccgatgtgggccgaattactggctcttgcagcgtctgcccagggacgtgtgtatcgcgcggaagaccctcatggtgcgctccgcggcctcttcgaagtccgtggcctccttgccaaagacttagctgttgttgcattgcgcgaaggtcttgatttacctccgactgatgatccaatgcttcttgcgtacctcttggacccgtcaaacacgacgcccgaaggcgtagcccgtcgttacggcggcgagtggtgggaagatgcagccaaacgcgcgttattggccgaacgtttgcacgaaaatttattaggacgtttgcaaggcgaggaacgtctcctctggctttacgaagaagtggagaaaccattgagtcgcgtgctcgcgcatatggaagctaccggtgtcaaattagacgtggcgtatttggagaatctcagccttgaagttgctgcccacatgcgccgcttggaggaagaagtattccgtttagcaggccgttcctttcgccttaactctcgcgatcagttagaacgtgtgttgttcgatgaacttggtctccctcctatcggcaagacagagaagaccggtaaacgtagcacttcagcggcggttttagaagctcttcgcgaagtccatcccattgtggacaagatcttgcagtaccgcgaaatggcgaaattgaaaggcacctatattgaccgtcttccggcattagtccacccgaaaacgggacgcctccatacccgcttcaaccaaacagccacggcgaccggtcgtttgtcctcctctgatccaaaccttcagaatattccagtacgtaccccattgggccagaagatccgccgtgcgtttgtagctgagccgggttggcgtttagtggccctcgattatcgtcaaattgaattacgtgtccttgcccatctttctggcgatgagaacctcatccgcgtgtttcaggaaggcaaagacattcacactcaaacggcaagctggatgtttggattatcagctgaagcgatcgatcctttgatgcgtcgtgcagcgaagaccatcaatttcggtgttctctacggtatgagtgcctttcgtttgtcgcaggaattaggcattccctatgaagaagctcaggcgttcattcagaaatactttcaaagctatcccaaagttaaagcatggatcgagaagactctccgtgaaggccgcacacgtggttacgtagagaccttatttggacgtcgccgctatgttcccgatttaaactcgcgcgtgaaaggcaagcgtgaagccgccgaacgcatggcgttcaacatgcctgtacagggcacggcagctgacctcatgaaacttgcaatggtgcgcctttttccacaattgcgtgaagttggtgcccgcatgctgttgcaggtccacgatgaactcttgttagaagcgccaaaagagcgtgcggaagaggtggcagccctcgcgaaagaagttatggaaggcgtgtggcccttagcggtgcctcttgaagtcgaagttggtattggcgaggattggctggctgccaaagga

SEQ ID NO: 5874 - protein, 841 aa, synthetic construct
  REGION 1..841: note = Variant of DNA polymerase I from Thermus sp. strain 2.9
MHHHHHHGGSGVLPVFEPKGRVLLVDGHHLAYRNFFALKGLTTSLGEPVQGVYGFAKSLLKALKEDGDVVIVVFDAKAPSFRHEAYEAYKAGRAPTPEDFPRQLALMKELVDLLGLERLEVPGFEADDVLATLAKKAEREGYEVQILTADRDLFQLLSPRISVLHPEGHRITPEWLWEKYGLRPEQWVDFRALAGDPSDNIPGVKGIGEKTALKLLKEWGSLENLLKNLDQVKPESVREKILAHLEDLKLSRELSRVRTDLPLEVDFGRRREPDWEGLKAFLERLEFGSLLHEFGLLESPLLAEEAPWPPPEGAFLGYRLSRPEPMWAELLALAASAQGRVYRAEDPHGALRGLFEVRGLLAKDLAVVALREGLDLPPTDDPMLLAYLLDPSNTTPEGVARRYGGEWWEDAAKRALLAERLHENLLGRLQGEERLLWLYEEVEKPLSRVLAHMEATGVKLDVAYLENLSLEVAAHMRRLEEEVFRLAGRSFRLNSRDQLERVLFDELGLPPIGKTEKTGKRSTSAAVLEALREVHPIVDKILQYREMAKLKGTYIDRLPALVHPKTGRLHTRFNQTATATGRLSSSDPNLQNIPVRTPLGQKIRRAFVAEPGWRLVALDYRQIELRVLAHLSGDENLIRVFQEGKDIHTQTASWMFGLSAEAIDPLMRRAAKTINFGVLYGMSAFRLSQELGIPYEEAQAFIQKYFQSYPKVKAWIEKTLREGRTRGYVETLFGRRRYVPDLNSRVKGKREAAERMAFNMPVQGTAADLMKLAMVRLFPQLREVGARMLLQVHDELLLEAPKERAEEVAALAKEVMEGVWPLAVPLEVEVGIGEDWLAAKG

SEQ ID NO: 5875 - DNA, 2523 bp, synthetic construct
  misc_feature 1..2523: note = Variant of DNA polymerase I from Thermus sp. strain 2.9
  source 1..2523: mol_type = other DNA
atgcaccatcatcatcatcatggcggtagcggcgtgttaccggtgttcgagcctaaaggtcgcgtgcttctggttgatggccatcatctcgcgtatcgtaacttctttgccctgaaaggattaaccaccagcctgggcgagccggtacagggtgtctacggctttgcaaagtcgctcctgaaagctctgaaagaagacggtgatgtggtgattgttgtctttgatgcgaaagcgccaagttttcgccacgaagcgtacgaagcttacaaagccgggcgtgctccaacgccggaagactttcctcgccaattggcgcttatgaaggaattagtggatttgcttggcctcgaacgcttggaagttcccggtttcgaggcagacgacgtattagcgactctcgcaaagaaagccgaacgtgagggctatgaagtccagatcttgacagcagatcgcgatcttttccagcttttatctccgcgcatctcggtgttacacccggaagggcatcgtatcaccccggaatggctctgggagaaatatggtttgcgtcccgaacaatgggtggattttcgcgccttagcaggcgatccgagcgacaatattccgggagttaaaggtatcggcgagaagacggcgctcaagctccttaaagaatgggggtcgttggagaacttgcttaagaatttagatcaggtcaaaccagagtcagtgcgtgagaagattcttgctcacctcgaagacctcaaattaagccgcgaattgtcccgtgtacgcaccgatttgccgctcgaagttgatttcggtcgccgccgcgaacctgactgggagggtcttaaagcgtttttagagcgtcttgaatttggttcgctcttgcatgaattcggccttttagaaagcccgttactggccgaagaagcaccttggccaccgcccgagggcgcgtttttaggttaccgtttgagtcgcccggaaccgatgtgggccgaattactggctcttgcagcgtctgcccagggacgtgtgtatcgcgcggaagaccctcatggtgcgctccgcggcctcttcgaagtccgtggcctccttgccaaagacttagctgttgttgcattgcgcgaaggtcttgatttacctccgactgatgatccaatgcttcttgcgtacctcttggacccgtcaaacacgacgcccgaaggcgtagcccgtcgttacggcggcgagtggaccgaagatgcagccaaacgcgcgttattggccgaacgtttgcacggaaatttattaggacgtttgcaaggcgaggagcgtctcctgtggctttacgaagaagtggagaaaccattgagtcgcgtgctcgcgcatatggaagctaccggtgtcaaattagacgtggcgtatttggagaatctcagccttgaagttgctgcccacatgcgccgcttggaggaagaagtattccgtttagcaggccgttcctttcgccttaactctcgcgatcagttagaacgtgtgttgttcgatgaacttggtctccctcctatcggcaagacagagaagaccggtaaacgtagcacttcagcggcggttttagaagctcttcgcgaagtccatcccattgtggacaagatcttgcagtaccgcgaaatggcgaaattgaaaggcacctatattgaccgtcttccggcattagtccacccgaaaacgggacgcctccatacccgcttcaaccaaacagccacggcgaccggtcgtttgtcctcctctgatccaaaccttcagaatattccagtacgtacctttttgggccagaagatccgccgtgcgtttgtagctgaggagggttggcgtttagtggccctcgattatcgtcaaattgaattacgtgtccttgcccatctttctggcgatgagaacctcatccgcgtgtttcaggaaggcaaagacattcacactcaaacggcaagctggatgtttggattatcagctgaagcgatcgatcctttgatgcgtcgtgcagcgaagaccatcaatttcggtgttctctacggtatgagtgcctttcgtttgtcgcaggaattaggcattccctatgaagaagctcagggtttcattcagaaatactttcaaggctatcccaaagttaaagcatggatcgagaagactctccgtgaaggccgcacacgtggttacgtagagaccttatttggacgtcgccgctatgttcccgatttaaactcgcgcgtgaaaggcaagcgtgaagccgccgaacgcatggcgttcaacatgcctgtacagggcacggcagctgacctcatgaaacttgcaatggtgcgcctttttccacaattgcgtgaagttggtgcccgcatgctgttgcaggtccacgatgaactcttgttagaagcgccaaaagagcgtgcggaagaggtggcagccctcgcgaaagaagttatggaaggcgtgtggcccttagcggtgcctcttgaagtcgaagttggtattggcgaggattggctggctgccaaagga

SEQ ID NO: 5876 - protein, 841 aa, synthetic construct
  REGION 1..841: note = Variant of DNA polymerase I from Thermus sp. strain 2.9
MHHHHHHGGSGVLPVFEPKGRVLLVDGHHLAYRNFFALKGLTTSLGEPVQGVYGFAKSLLKALKEDGDVVIVVFDAKAPSFRHEAYEAYKAGRAPTPEDFPRQLALMKELVDLLGLERLEVPGFEADDVLATLAKKAEREGYEVQILTADRDLFQLLSPRISVLHPEGHRITPEWLWEKYGLRPEQWVDFRALAGDPSDNIPGVKGIGEKTALKLLKEWGSLENLLKNLDQVKPESVREKILAHLEDLKLSRELSRVRTDLPLEVDFGRRREPDWEGLKAFLERLEFGSLLHEFGLLESPLLAEEAPWPPPEGAFLGYRLSRPEPMWAELLALAASAQGRVYRAEDPHGALRGLFEVRGLLAKDLAVVALREGLDLPPTDDPMLLAYLLDPSNTTPEGVARRYGGEWTEDAAKRALLAERLHGNLLGRLQGEERLLWLYEEVEKPLSRVLAHMEATGVKLDVAYLENLSLEVAAHMRRLEEEVFRLAGRSFRLNSRDQLERVLFDELGLPPIGKTEKTGKRSTSAAVLEALREVHPIVDKILQYREMAKLKGTYIDRLPALVHPKTGRLHTRFNQTATATGRLSSSDPNLQNIPVRTFLGQKIRRAFVAEEGWRLVALDYRQIELRVLAHLSGDENLIRVFQEGKDIHTQTASWMFGLSAEAIDPLMRRAAKTINFGVLYGMSAFRLSQELGIPYEEAQGFIQKYFQGYPKVKAWIEKTLREGRTRGYVETLFGRRRYVPDLNSRVKGKREAAERMAFNMPVQGTAADLMKLAMVRLFPQLREVGARMLLQVHDELLLEAPKERAEEVAALAKEVMEGVWPLAVPLEVEVGIGEDWLAAKG

SEQ ID NO: 5877 - DNA, 2523 bp, synthetic construct
  misc_feature 1..2523: note = Variant of DNA polymerase I from Thermus sp. strain 2.9
  source 1..2523: mol_type = other DNA
atgcaccatcatcatcatcatggcggtagcggcgtgttaccggtgttcgagcctaaaggtcgcgtgcttctggttgatggccatcatctcgcgtatcgtaacttctttgccctgaaaggattaaccaccagcctgggcgagccggtacagggtgtctacggctttgcaaagtcgctcctgaaagctctgaaagaagacggtgatgtggtgattgttgtctttgatgcgaaagcgccaagttttcgccacgaagcgtacgaagcttacaaagccgggcgtgctccaacgccggaagactttcctcgccaattggcgcttatgaaggaattagtggatttgcttggcctcgaacgcttggaagttcccggtttcgaggcagacgacgtattagcgactctcgcaaagaaagccgaacgtgagggctatgaagtccagatcttgacagcagatcgcgatcttttccagcttttatctccgcgcatctcggtgttacacccggaagggcatcgtatcaccccggaatggctctgggagaaatatggtttgcgtcccgaacaatgggtggattttcgcgccttagcaggcgatccgagcgacaatattccgggagttaaaggtatcggcgagaagacggcgctcaagctccttaaagaatgggggtcgttggagaacttgcttaagaatttagatcaggtcaaaccagagtcagtgcgtgagaagattcttgctcacctcgaagacctcaaattaagccgcgaattgtcccgtgtacgcaccgatttgccgctcgaagttgatttcggtcgccgccgcgaacctgactgggagggtcttaaagcgtttttagagcgtcttgaatttggttcgctcttgcatgaattcggccttttagaaagcccgttactggccgaagaagcaccttggccaccgcccgagggcgcgtttttaggttaccgtttgagtcgcccggaaccgatgtgggccgaattactggctcttgcagcgtctgcccagggacgtgtgtatcgcgcggaagaccctcatggtgcgctccgcggcctcttcgaagtccgtggactccttgccaaagacttagctgttgttgcattgcgcgaaggtcttgatttacctccgactgatgatccaatgcttcttgcgtacctcttggacccgtcaaacacgacgcccgaaggcgtagcccgtcgttacggcggcgagtggaccgaagatgcagcgaaacgcgcgttattggccgaacgtttgcacgaaaatttattaggacgtttgcaaggcgaggaacgtctcgggtggctttacgaagaagtggagaaaccattgagtcgcgtgctcgcgcatatggaagctaccggtgtcaaattagacgtggcgtatttggagaatctcagccttgaagttgctgcccacatgcgccgcttggaggaagaagtattccgtttagcaggccgttcctttcgccttaactctcgcgatcagttagaacgtgtgttgttcgatgaacttggtctccctcctatcggcaagacagagaagaccggtaaacgtagcacttcagcggcggttttagaagctcttcgcgaagtccatcccattgtggacaagatcttgcagtaccgcgaaatggcgaaattgaaaggcacctatattgaccgtcttccggcattagtccacccgaaaacgggacgcctccatacccgcttcaaccaaacagccacggcgaccggtcgtttgtcctcctctgatccaaaccttcagaatattccagtacgtaccccattgggccagaagatccgccgtgcgtttgtagctgaggagggttggcgtttagtggccctcgattatcgtcaaattgaattacgtgtccttgcccatctttctggcgatgagaacctcatccgcgtgtttcaggaaggcaaagacattcacactcaaacggcaagctggatgtttggattatcagctgaagcgatcgatcctttgatgcgtcgtgcagcgaagaccatcaatttcggtgttctctacggtatgagtgcctttcgtttgtcgcaggaattaggcattccctatgaagaagctcaggcgttcattcagaaatactttcaaagctatcccaaagttaaagcatggatcgagaagactctccgtgaaggccgcacacgtggttacgtagagaccttatttggacgtcgccgctatgttcccgatttaaacgctcgcgtgaaaggcaagcgtgaagccgccgaacgcatggcgttcaacatgcctgtacagggcacggcagctgacctcatgaaacttgcaatggtgcgcctttttccacaattgcgtgaagttggtgcccgcatgctcttgcaggtccacgatgaactcttgttagaagcgccaaaagagcgtgcggaagaggtggcagccctcgcgaaagaagttatggaaggcgtgtggcccttagcggtgcctcttgaagtcgaagttggtattggcgaggattggctggctgccaaagga

SEQ ID NO: 5878 - protein, 841 aa, synthetic construct
  REGION 1..841: note = Variant of DNA polymerase I from Thermus sp. strain 2.9
MHHHHHHGGSGVLPVFEPKGRVLLVDGHHLAYRNFFALKGLTTSLGEPVQGVYGFAKSLLKALKEDGDVVIVVFDAKAPSFRHEAYEAYKAGRAPTPEDFPRQLALMKELVDLLGLERLEVPGFEADDVLATLAKKAEREGYEVQILTADRDLFQLLSPRISVLHPEGHRITPEWLWEKYGLRPEQWVDFRALAGDPSDNIPGVKGIGEKTALKLLKEWGSLENLLKNLDQVKPESVREKILAHLEDLKLSRELSRVRTDLPLEVDFGRRREPDWEGLKAFLERLEFGSLLHEFGLLESPLLAEEAPWPPPEGAFLGYRLSRPEPMWAELLALAASAQGRVYRAEDPHGALRGLFEVRGLLAKDLAVVALREGLDLPPTDDPMLLAYLLDPSNTTPEGVARRYGGEWTEDAAKRALLAERLHENLLGRLQGEERLGWLYEEVEKPLSRVLAHMEATGVKLDVAYLENLSLEVAAHMRRLEEEVFRLAGRSFRLNSRDQLERVLFDELGLPPIGKTEKTGKRSTSAAVLEALREVHPIVDKILQYREMAKLKGTYIDRLPALVHPKTGRLHTRFNQTATATGRLSSSDPNLQNIPVRTPLGQKIRRAFVAEEGWRLVALDYRQIELRVLAHLSGDENLIRVFQEGKDIHTQTASWMFGLSAEAIDPLMRRAAKTINFGVLYGMSAFRLSQELGIPYEEAQAFIQKYFQSYPKVKAWIEKTLREGRTRGYVETLFGRRRYVPDLNARVKGKREAAERMAFNMPVQGTAADLMKLAMVRLFPQLREVGARMLLQVHDELLLEAPKERAEEVAALAKEVMEGVWPLAVPLEVEVGIGEDWLAAKG

SEQ ID NO: 5879 - DNA, 2523 bp, synthetic construct
  misc_feature 1..2523: note = Variant of DNA polymerase I from Thermus sp. strain 2.9
  source 1..2523: mol_type = other DNA
atgcaccatcatcatcatcatggcggtagcggcgtgttaccggtgttcgagcctaaaggtcgcgtgcttctggttgatggccatcatctcgcgtatcgtaacttctttgccctgaaaggattaaccaccagcctgggcgagccggtacagggtgtctacggctttgcaaagtcgctcctgaaagctctgaaagaagacggtgatgtggtgattgttgtctttgatgcgaaagcgccaagttttcgccacgaagcgtacgaagcttacaaagccgggcgtgctccaacgccggaagactttcctcgccaattggcgcttatgaaggaattagtggatttgcttggcctcgaacgcttggaagttcccggtttcgaggcagacgacgtattagcgactctcgcaaagaaagccgaacgtgagggctatgaagtccagatcttgacagcagatcgcgatcttttccagcttttatctccgcgcatctcggtgttacacccggaagggcatcgtatcaccccggaatggctctgggagaaatatggtttgcgtcccgaacaatgggtggattttcgcgccttagcaggcgatccgagcgacaatattccgggagttaaaggtatcggcgagaagacggcgctcaagctccttaaagaatgggggtcgttggagaacttgcttaagaatttagatcaggtcaaaccagagtcagtgcgtgagaagattcttgctcacctcgaagacctcaaattaagccgcgaattgtcccgtgtacgcaccgatttgccgctcgaagttgatttcggtcgccgccgcgaacctgactgggagggtcttaaagcgtttttagagcgtcttgaatttggttcgctcttgcatgaattcggccttttagaaagcccgttaccggccgaagaagcaccttggccaccgcccgagggcgcgtttttaggttaccgtttgagtcgcccggaaccgatgtgggccgaattactggctcttgcagcgtctgcccagggacgtgtgtatcgcgcggaagaccctcatggtgcgctccgcggcctcttcgaagtccgtggactccttgccaaagacttagctgttgttgcattgcgcgaaggtcttgatttacctccgactgatgatccaatgcttcttgcgtacctcttggacccgtcaaacacgacgcccgaaggcgtagcccgtcgttacggcggcgagtggaccgaagatgcagcgaaacgcgcgttattggccgaacgtttgcacgcaaatttattaggacgtttgcaaggcgaggaacgtctcctctggctttacgaagaagtggagaaaccattgagtcgcgtgctcgcgcatatggaagctaccggtgtcaaattagacgtggcgtatttggagaatcttcaccttgaagttgctgcccacatgcgccgcttggaggaagaagtattccgtttagcaggccactcctttcgccttaactctcgcgatcagttagaacgtgtgttgttcgatgaacttggtctccctcctatcggcaagacagagaagaccggtaaacgtagcacttcagcggcggttttagaagctcttcgcgaagtccatcccattgtggacaagatcttgcagtaccgcgaaatggcgaaattgaaaggcacctatattgaccgtcttccggcattagtccacccgaaaacgggacgcctccatacccgcttcaaccaaacagccacggcgaccggtcgtttgtccagttctgatccaaaccttcagaatattccagtacgtaccccattgggccagaagatccgccgtgcgtttgtagctgaggagggttggcgtttagtggccctcgattatcgtcaaattgaattacgtgtccttgcccatctttctggcgatgagaacctcatccgcgtgtttcaggaaggcaaagacattcacactcaaacggcaagctggatgtttggattatcagctgaagcgatcgatcctttgatgcgtcgtgcagcgaagaccatcaatttcggtgttctctacggtatgagtgcctttcgtttgtcgcaggaattaggcattccctatgaagaagctcaggcgttcattcagaaatactttcaaagctatcccaaagttaaagcatggatcgagaagactctcgaggaaggccgcacacgtggttacgtagagaccttatttggacgtcgccgctatgttcccgatttaaacgctcgcgtgaaaagcgtacgtgaagccgccgaacgcatggcgttcaacatgcctgtacagggcacggcagctgacctcatgaaacttgcaatggtgcgcctttttccacaattgcgtgaagttggtgcccgcatgctcttgcaggtccacgatgaactcttgttagaagcgccaaaagagcgtgcggaagaggtggcagccctcgcgaaagaagttatggaaggcgtgtggcccttagcggtgcctcttgaagtcgaagttggtattggcgaggattggctggctgccaaagga

SEQ ID NO: 5880 - protein, 841 aa, synthetic construct
  REGION 1..841: note = Variant of DNA polymerase I from Thermus sp. strain 2.9
MHHHHHHGGSGVLPVFEPKGRVLLVDGHHLAYRNFFALKGLTTSLGEPVQGVYGFAKSLLKALKEDGDVVIVVFDAKAPSFRHEAYEAYKAGRAPTPEDFPRQLALMKELVDLLGLERLEVPGFEADDVLATLAKKAEREGYEVQILTADRDLFQLLSPRISVLHPEGHRITPEWLWEKYGLRPEQWVDFRALAGDPSDNIPGVKGIGEKTALKLLKEWGSLENLLKNLDQVKPESVREKILAHLEDLKLSRELSRVRTDLPLEVDFGRRREPDWEGLKAFLERLEFGSLLHEFGLLESPLPAEEAPWPPPEGAFLGYRLSRPEPMWAELLALAASAQGRVYRAEDPHGALRGLFEVRGLLAKDLAVVALREGLDLPPTDDPMLLAYLLDPSNTTPEGVARRYGGEWTEDAAKRALLAERLHANLLGRLQGEERLLWLYEEVEKPLSRVLAHMEATGVKLDVAYLENLHLEVAAHMRRLEEEVFRLAGHSFRLNSRDQLERVLFDELGLPPIGKTEKTGKRSTSAAVLEALREVHPIVDKILQYREMAKLKGTYIDRLPALVHPKTGRLHTRFNQTATATGRLSSSDPNLQNIPVRTPLGQKIRRAFVAEEGWRLVALDYRQIELRVLAHLSGDENLIRVFQEGKDIHTQTASWMFGLSAEAIDPLMRRAAKTINFGVLYGMSAFRLSQELGIPYEEAQAFIQKYFQSYPKVKAWIEKTLEEGRTRGYVETLFGRRRYVPDLNARVKSVREAAERMAFNMPVQGTAADLMKLAMVRLFPQLREVGARMLLQVHDELLLEAPKERAEEVAALAKEVMEGVWPLAVPLEVEVGIGEDWLAAKG

SEQ ID NO: 5881 - DNA, 2523 bp, synthetic construct
  misc_feature 1..2523: note = Variant of DNA polymerase I from Thermus sp. strain 2.9
  source 1..2523: mol_type = other DNA
atgcaccatcatcatcatcatggcggtagcggcgtgttaccggtgttcgagcctaaaggtcgcgtgcttctggttgatggccatcatctcgcgtatcgtaacttctttgccctgaaaggattaaccaccagcctgggcgagccggtacagggtgtctacggctttgcaaagtcgctcctgaaagctctgaaagaagacggtgatgtggtgattgttgtctttgatgcgaaagcgccaagttttcgccacgaagcgtacgaagcttacaaagccgggcgtgctccaacgccggaagactttcctcgccaattggcgcttatgaaggaattagtggatttgcttggcctcgaacgcttggaagttcccggtttcgaggcagacgacgtattagcgactctcgcaaagaaagccgaacgtgagggctatgaagtccagatcttgacagcagatcgcgatcttttccagcttttatctccgcgcatctcggtgttacacccggaagggcatcgtatcaccccggaatggctctgggagaaatatggtttgcgtcccgaacaatgggtggattttcgcgccttagcaggcgatccgagcgacaatattccgggagttaaaggtatcggcgagaagacggcgctcaagctccttaaagaatgggggtcgttggagaacttgcttaagaatttagatcaggtcaaaccagagtcagtgcgtgagaagattcttgctcacctcgaagacctcaaattaagccgcgaattgtcccgtgtacgcaccgatttgccgctcgaagttgatttcggtcgccgccgcgaacctgactgggagggtcttaaagcgtttttagagcgtcttgaatttggttcgctcttgcatgaattcggccttttagaaagcccgttaccggccgaagaagcaccttggccaccgcccgagggcgcgtttttaggttaccgtttgagtcgcccggaaccgatgtgggccgaattactggctcttgcagcgtctgcccagggacgtgtgtatcgcgcggaagaccctcatggtgcgctccgcggcctcttcgaagtccgtggactccttgccaaagacttagctgttgttgcattgcgcgaaggtcttgatttacctccgactgatgatccaatgcttcttgcgtacctcttggacccgtcaaacacgacgcccgaaggcgtagcccgtcgttacggcggcgagtggaccgaagatgcagcgaaacgcgcgttattggccgaacgtttgcacgcaaatttattaggacgtttgcaaggcgaggaacgtctcctctggctttacgaagaagtggagaaaccattgagtcgcgtgctcgcgcatatggaagctaccggtgtcaaattagacgtggcgtatttggaggcccttagccttgaagttgctgcccatatgcgccgcttggaggaagaagtattccgtttagcaggccgttcctttcgccttaactctcgcgatcagttagaacgtgtgttgttcgatgaacttggtctccctcctatcggcaagacagagaagaccggtaaacgtagcacttcagcggcggttttagaagctcttcgcgaagtccatcccattgtggacaagatcttgcagtaccgcgaaatggcgaaattgaaaggcacctatattgaccgtcttccggcattagtccacccgaaaacgggacgcctccatacccgcttcaaccaaacagccacggcgaccggtcgtttgtcctcctctgatccaaaccttcagaatattccagtacgtaccccattgggccagaagatccgccgtgcgtttgtagctgaggagggttggcgtttagtggccctcgattatagtcaaattgaattacgtgtccttgcccatctttctggcgatgagaacctcatccgcgtgtttcaggaaggcaaagacattcacactcaaacggcaagctggatgtttggattatcagctgaagcgatcgatcctttgatgcgtcgtgcagcgaagaccatcaatttcggtgttctctacggtatgagtgcctttcgtttgtcgcaggaattaggcattccctatgaagaagctcaggcgttcattcagaaatactttcaaagctatcccaaagttaaagcatggatcgagaagactctccgcgaaggccgcacacgtggttacgtagagaccttatttggacgtcgccgctatgttcccgatttaaacgctcgcgtgaaaagcaaacgtgaagccgccgaacgcatggcgttcaacatgcctgtacagggcacggcagctgacctcatgaaacttgcaatggtgcgcctttttccacaattgcgtgaagttggtgcccgcatgctcttgcaggtccacgatgaactcttgttagaagcgccaaaagagcgtgcggaagaggtggcagccctcgcgaaagaagttatggaaggcgtgtggcccttagcggtgcctcttgaagtcgaagttggtattggcgaggattggctggctgccaaagga

SEQ ID NO: 5882 - protein, 841 aa, synthetic construct
  REGION 1..841: note = Variant of DNA polymerase I from Thermus sp. strain 2.9
MHHHHHHGGSGVLPVFEPKGRVLLVDGHHLAYRNFFALKGLTTSLGEPVQGVYGFAKSLLKALKEDGDVVIVVFDAKAPSFRHEAYEAYKAGRAPTPEDFPRQLALMKELVDLLGLERLEVPGFEADDVLATLAKKAEREGYEVQILTADRDLFQLLSPRISVLHPEGHRITPEWLWEKYGLRPEQWVDFRALAGDPSDNIPGVKGIGEKTALKLLKEWGSLENLLKNLDQVKPESVREKILAHLEDLKLSRELSRVRTDLPLEVDFGRRREPDWEGLKAFLERLEFGSLLHEFGLLESPLPAEEAPWPPPEGAFLGYRLSRPEPMWAELLALAASAQGRVYRAEDPHGALRGLFEVRGLLAKDLAVVALREGLDLPPTDDPMLLAYLLDPSNTTPEGVARRYGGEWTEDAAKRALLAERLHANLLGRLQGEERLLWLYEEVEKPLSRVLAHMEATGVKLDVAYLEALSLEVAAHMRRLEEEVFRLAGRSFRLNSRDQLERVLFDELGLPPIGKTEKTGKRSTSAAVLEALREVHPIVDKILQYREMAKLKGTYIDRLPALVHPKTGRLHTRFNQTATATGRLSSSDPNLQNIPVRTPLGQKIRRAFVAEEGWRLVALDYSQIELRVLAHLSGDENLIRVFQEGKDIHTQTASWMFGLSAEAIDPLMRRAAKTINFGVLYGMSAFRLSQELGIPYEEAQAFIQKYFQSYPKVKAWIEKTLREGRTRGYVETLFGRRRYVPDLNARVKSKREAAERMAFNMPVQGTAADLMKLAMVRLFPQLREVGARMLLQVHDELLLEAPKERAEEVAALAKEVMEGVWPLAVPLEVEVGIGEDWLAAKG

SEQ ID NO: 5883 - DNA, 2523 bp, synthetic construct
  misc_feature 1..2523: note = Variant of DNA polymerase I from Thermus sp. strain 2.9
  source 1..2523: mol_type = other DNA
atgcaccatcatcatcatcatggcggtagcggcgtgttaccggtgttcgagcctaaaggtcgcgtgcttctggttgatggccatcatctcgcgtatcgtaacttctttgccctgaaaggattaaccaccagcctgggcgagccggtacagggtgtctacggctttgcaaagtcgctcctgaaagctctgaaagaagacggtgatgtggtgattgttgtctttgatgcgaaagcgccaagttttcgccacgaagcgtacgaagcttacaaagccgggcgtgctccaacgccggaagactttcctcgccaattggcgcttatgaaggaattagtggatttgcttggcctcgaacgcttggaagttcccggtttcgaggcagacgacgtattagcgactctcgcaaagaaagccgaacgtgagggctatgaagtccagatcttgacagcagatcgcgatcttttccagcttttatctccgcgcatctcggtgttacacccggaagggcatcgtatcaccccggaatggctctgggagaaatatggtttgcgtcccgaacaatgggtggattttcgcgccttagcaggcgatccgagcgacaatattccgggagttaaaggtatcggcgagaagacggcgctcaagctccttaaagaatgggggtcgttggagaacttgcttaagaatttagatcaggtcaaaccagagtcagtgcgtgagaagattcttgctcacctcgaagacctcaaattaagccgcgaattgtcccgtgtacgcaccgatttgccgctcgaagttgatttcggtcgccgccgcgaacctgactgggagggtcttaaagcgtttttagagcgtcttgaatttggttcgctcttgcatgaattcggccttttagaaagcccgttactggccgaagaagcaccttggccaccgcccgagggcgcgtttttaggttaccgtttgagtcgcccggaaccgatgtgggccgaattactggctcttgcagcgtctgcccagggacgtgtgtatcgcgcggaagaccctcatggtgcgctccgcggcctcttcgaagtccgtaccctccttgccaaagacttagctgttgttgcattgcgcgaaggtcttgatttacctccgactgatgatccaatgcttcttgcgtacctcttggacccgtcaaacacgacgcccgaaggcgtagcccgtcgttacggcggcgagtggtgggaagatgcaggcaaacgcgcgttattggccgaacgtttgcacgaaaatttattaggacgtttgcaaggcgaggaacgtctcctctggctttacgaagaagtggagaaaccattgagtcgcgtgctcgcgcatatggaagctaccggtgtcaaattagacgtggcgtatttggagaatctcagccttgaagttgctgcccacatgcgccgcttggaggaagaagtattccgtttagcaggccgttcctttcgccttaactctcgcgatcagttagaacgtgtgttgttcgatgaacttggtctccctcctatcggcaagacagagaagaccggtaaacgtagcacttcagcggcggttttagaagctcttcgcgaagtccatcccattgtggacaagatcttgcagtaccgcgaaatggcgaaattgaaaggcacctatattgaccgtcttccggcattagtccacccgaaaacgggacgcctccatacccgcttcaaccaaacagccacggcgaccggtcgtttgtcctcctctgatccaaaccttcagaatattccagtacgtaccccattgggccagaagatccgccgtgcgtttgtagctgagaagggttgggcgttagtggccctcgattatcgtcaaattgaattacgtgtccttgcccatctttctggcgatgagaacctcatccgcgtgtttcaggaaggcaaagacattcacactcaaacggcaagctggatgtttggattatcagctgaagcgatcgatcctttgatgcgtcgtgcagcgaagaccatcaatttcggtgttctctacggtatgagtgcctttcgtttgtcgcaggaattaggcattccctatgaagaagctcaggcgttcattcagaaatactttcaaagctatcccaaagttaaagcatggatcgagaagactctccgtgaaggccgcacacgtggttacgtagagaccttatttggacgtcgccgctatgttcccgatttaaactcgcgcgtgaaaggcaagcgtgaagccgccgaacgcatggcgttcaacatgcctgtacagggcacggcagctgacctcatgaaacttgcaatggtgcgcctttttccacaattgcgtgaagttggtgcccgcatgctcttgcaggtccacgatgaactcttgttagaagcgccaaaagagcgtgcggaagaggtggcagccctcgcgaaagaagttatggaaggcgtgtggcccttagcggtgcctcttgaagtcgaagttggtattggcgaggattggctggctgccaaagga

SEQ ID NO: 5884 - protein, 841 aa, synthetic construct
  REGION 1..841: note = Variant of DNA polymerase I from Thermus sp. strain 2.9
MHHHHHHGGSGVLPVFEPKGRVLLVDGHHLAYRNFFALKGLTTSLGEPVQGVYGFAKSLLKALKEDGDVVIVVFDAKAPSFRHEAYEAYKAGRAPTPEDFPRQLALMKELVDLLGLERLEVPGFEADDVLATLAKKAEREGYEVQILTADRDLFQLLSPRISVLHPEGHRITPEWLWEKYGLRPEQWVDFRALAGDPSDNIPGVKGIGEKTALKLLKEWGSLENLLKNLDQVKPESVREKILAHLEDLKLSRELSRVRTDLPLEVDFGRRREPDWEGLKAFLERLEFGSLLHEFGLLESPLLAEEAPWPPPEGAFLGYRLSRPEPMWAELLALAASAQGRVYRAEDPHGALRGLFEVRTLLAKDLAVVALREGLDLPPTDDPMLLAYLLDPSNTTPEGVARRYGGEWWEDAGKRALLAERLHENLLGRLQGEERLLWLYEEVEKPLSRVLAHMEATGVKLDVAYLENLSLEVAAHMRRLEEEVFRLAGRSFRLNSRDQLERVLFDELGLPPIGKTEKTGKRSTSAAVLEALREVHPIVDKILQYREMAKLKGTYIDRLPALVHPKTGRLHTRFNQTATATGRLSSSDPNLQNIPVRTPLGQKIRRAFVAEKGWALVALDYRQIELRVLAHLSGDENLIRVFQEGKDIHTQTASWMFGLSAEAIDPLMRRAAKTINFGVLYGMSAFRLSQELGIPYEEAQAFIQKYFQSYPKVKAWIEKTLREGRTRGYVETLFGRRRYVPDLNSRVKGKREAAERMAFNMPVQGTAADLMKLAMVRLFPQLREVGARMLLQVHDELLLEAPKERAEEVAALAKEVMEGVWPLAVPLEVEVGIGEDWLAAKG

SEQ ID NO: 5885 - DNA, 2523 bp, synthetic construct
  misc_feature 1..2523: note = Variant of DNA polymerase I from Thermus sp. strain 2.9
  source 1..2523: mol_type = other DNA
atgcaccatcatcatcatcatggcggtagcggcgtgttaccggtgttcgagcctaaaggtcgcgtgcttctggttgatggccatcatctcgcgtatcgtaacttctttgccctgaaaggattaaccaccagcctgggcgagccggtacagggtgtctacggctttgcaaagtcgctcctgaaagctctgaaagaagacggtgatgtggtgattgttgtctttgatgcgaaagcgccaagttttcgccacgaagcgtacgaagcttacaaagccgggcgtgctccaacgccggaagactttcctcgccaattggcgcttatgaaggaattagtggatttgcttggcctcgaacgcttggaagttcccggtttcgaggcagacgacgtattagcgactctcgcaaagaaagccgaacgtgagggctatgaagtccagatcttgacagcagatcgcgatcttttccagcttttatctccgcgcatctcggtgttacacccggaagggcatcgtatcaccccggaatggctctgggagaaatatggtttgcgtcccgaacaatgggtggattttcgcgccttagcaggcgatccgagcgacaatattccgggagttaaaggtatcggcgagaagacggcgctcaagctccttaaagaatgggggtcgttggagaacttgcttaagaatttagatcaggtcaaaccagagtcagtgcgtgagaagattcttgctcacctcgaagacctcaaattaagccgcgaattgtcccgtgtacgcaccgatttgccgctcgaagttgatttcggtcgccgccgcgaacctgactgggagggtcttaaagcgtttttagagcgtcttgaatttggttcgctcttgcatgaattcggccttttagaaagcccgttactggccgaagaagcaccttggccaccgcccgagggcgcgtttttaggttaccgtttgagtcgcccggaaccgatgtgggccgaattactggctcttgcagcgtctgcccagggacgtgtgtatcgcgcggaagaccctcatggtgcgctccgcggcctcttcgaagtccgtggcctccttgccaaagacttagctgttgttgcattgcgcgaaggtcttgatttacctccgactgatgatccaatgcttcttgcgtacctcttggacccgtcaaacacgacgcccgaaggcgtagcccgtcgttacggcggcgagtggtgggaagatgcaggcaaacgcgcgttattggccgaacgtttgcacgaaaatttattaggacgtttgcaaggcgaggaacgtctcctctggctttacgaagaagtggagaaaccattgagtcgcgtgctcgcgcatatggaagctaccggtgtcaaattagacgtggcgtatttggagaatctcagccttgaagttgctgcccacatgcgccgcttggaggaagaagtattccgtttagcaggccgttcctttcgccttaactctcgcgatcagttagaacgtgtgttgttcgatgaacttggtctccctcctatcggcaagacagagaagaccggtaaacgtagcacttcagcggcggttttagaagctcttcgcgaagtccatcccattgtggacaagatcttgcagtaccgcgaaatggcgaaattgaaaggcacctatattgaccgtcttccggcattagtccacccgaaaacgggacgcctccatacccgcttcaaccaaacagccacggcgaccggtcgtttgtcctcctctgatccaaaccttcagaatattccagtacgtaccccattgggccagaagatccgccgtgcgtttgtagctgaggagggttggcgtttagtggccctcgattatcgtcaaattgaattacgtgtccttgcccatctttctggcgatgagaacctcatccgcgtgtttcaggaaggcaaagacattcacactcaaacggcaagctggatgtttggattatcagctgaagcgatcgatcctttgatgcgtcgtgcagcgaagaccatcaatttcggtgttctctacggtatgagtgcctttcgtttgtcgcaggaattaggcattccctatgaagaagctcaggcgttcattcagaaatactttcaaggctatcccaaagttaaagcatggatcgagaagactctccgtgaaggccgcacacgtggttacgtagagaccttatttggacgtcgccgctatgttcccgatttaaacggtcgcgtgaaaggcaagcgtgaagccgccgaacgcatggcgttcaacatgcctgtacagggcacggcagctgacctcatgaaacttgcaatggtgcgcctttttccacaattgcgtgaagttggtgcccgcatgctgttgcaggtccacgatgaactcttgttagaagcgccaaaagagcgtgcggaagaggtggcagccctcgcgaaagaagttatggaaggcgtgtggcccttagcggtgcctcttgaagtcgaagttggtattggcgaggattggctggctgccaaagga

SEQ ID NO: 5886 - protein, 841 aa, synthetic construct
  REGION 1..841: note = Variant of DNA polymerase I from Thermus sp. strain 2.9
MHHHHHHGGSGVLPVFEPKGRVLLVDGHHLAYRNFFALKGLTTSLGEPVQGVYGFAKSLLKALKEDGDVVIVVFDAKAPSFRHEAYEAYKAGRAPTPEDFPRQLALMKELVDLLGLERLEVPGFEADDVLATLAKKAEREGYEVQILTADRDLFQLLSPRISVLHPEGHRITPEWLWEKYGLRPEQWVDFRALAGDPSDNIPGVKGIGEKTALKLLKEWGSLENLLKNLDQVKPESVREKILAHLEDLKLSRELSRVRTDLPLEVDFGRRREPDWEGLKAFLERLEFGSLLHEFGLLESPLLAEEAPWPPPEGAFLGYRLSRPEPMWAELLALAASAQGRVYRAEDPHGALRGLFEVRGLLAKDLAVVALREGLDLPPTDDPMLLAYLLDPSNTTPEGVARRYGGEWWEDAGKRALLAERLHENLLGRLQGEERLLWLYEEVEKPLSRVLAHMEATGVKLDVAYLENLSLEVAAHMRRLEEEVFRLAGRSFRLNSRDQLERVLFDELGLPPIGKTEKTGKRSTSAAVLEALREVHPIVDKILQYREMAKLKGTYIDRLPALVHPKTGRLHTRFNQTATATGRLSSSDPNLQNIPVRTPLGQKIRRAFVAEEGWRLVALDYRQIELRVLAHLSGDENLIRVFQEGKDIHTQTASWMFGLSAEAIDPLMRRAAKTINFGVLYGMSAFRLSQELGIPYEEAQAFIQKYFQGYPKVKAWIEKTLREGRTRGYVETLFGRRRYVPDLNGRVKGKREAAERMAFNMPVQGTAADLMKLAMVRLFPQLREVGARMLLQVHDELLLEAPKERAEEVAALAKEVMEGVWPLAVPLEVEVGIGEDWLAAKG

SEQ ID NO: 5887 - DNA, 2523 bp, synthetic construct
  misc_feature 1..2523: note = Variant of DNA polymerase I from Thermus sp. strain 2.9
  source 1..2523: mol_type = other DNA
atgcaccatcatcatcatcatggcggtagcggcgtgttaccggtgttcgagcctaaaggtcgcgtgcttctggttgatggccatcatctcgcgtatcgtaacttctttgccctgaaaggattaaccaccagcctgggcgagccggtacagggtgtctacggctttgcaaagtcgctcctgaaagctctgaaagaagacggtgatgtggtgattgttgtctttgatgcgaaagcgccaagttttcgccacgaagcgtacgaagcttacaaagccgggcgtgctccaacgccggaagactttcctcgccaattggcgcttatgaaggaattagtggatttgcttggcctcgaacgcttggaagttcccggtttcgaggcagacgacgtattagcgactctcgcaaagaaagccgaacgtgagggctatgaagtccagatcttgacagcagatcgcgatcttttccagcttttatctccgcgcatctcggtgttacacccggaagggcatcgtatcaccccggaatggctctgggagaaatatggtttgcgtcccgaacaatgggtggattttcgcgccttagcaggcgatccgagcgacaatattccgggagttaaaggtatcggcgagaagacggcgctcaagctccttaaagaatgggggtcgttggagaacttgcttaagaatttagatcaggtcaaaccagagtcagtgcgtgagaagattcttgctcacctcgaagacctcaaattaagccgcgaattgtcccgtgtacgcaccgatttgccgctcgaagttgatttcggtcgccgccgcgaacctgactgggagggtcttaaagcgtttttagagcgtcttgaatttggttcgctcttgcatgaattcggccttttagaaagcccgttactggccgaagaagcaccttggccaccgcccgagggcgcgtttttaggttaccgtttgagtcgcccggaaccgatgtgggccgaattactggctcttgcagcgtctgcccagggacgtgtgtatcgcgcggaagaccctcatggtgcgctccgcggcctcttcgaagtccgtggcctccttgccaaagacttagctgttgttgcattgcgcgaaggtcttgatttacctccgactgatgatccaatgcttcttgcgtacctcttggacccgtcaaacacgacgcccgaaggcgtagcccgtcgttacggcggcgagtggtgggaagatgcagccaaacgcgcgttattggccgaacgtttgcacgaaaatttattaggacgtttgcaaggcgaggaacgtctcctctggctttacgaagaagtggagaaaccattgagtcgcgtgctcgcgcatatggaagctaccggtgtcaaattagacgtggcgtatttggagaatctcagccttgaagttgctgcccacatgcgccgcttggaggaagaagtattccgtttagcaggccgttcctttcgccttaactctcgcgatcagttagaacgtgtgttgttcgatgaacttggtctccctcctatcggcaagacagagaagaccggtaaacgtagcacttcagcggcggttttagaagctcttcgcgaagtccatcccattgtggacaagatcttgcagtaccgcgaaatggcgaaattgaaaggcacctatattgaccgtcttccggcattagtccacccgaaaacgggacgcctccatacccgcttcaaccaaacagccacggcgaccggtcgtttgtcctcctctgatccaaaccttcagaatattccagtacgtaccccattgggccagaagatccgccgtgcgtttgtagctgaggagggttggcgtttagtggccctcgattatcgtcaaattgaattacgtgtccttgcccatctttctggcgatgagaacctcatccgcgtgtttcaggaaggcaaagacattcacactcaaacggcaagctggatgtttggattatcagctgaagcgatcgatcctttgatgcgtcgtgcagcgaagaccatcaatttcggtgttctctacggtatgagtgcctttcgtttgtcgcaggaattaggcattccctatgaagaagctcaggcgttcattcagaaatactttcaaagctatcccaaagttaaagcatggatcgagaagactctccgtgaaggccgcacacgtggttacgtagagaccttatttggacgtcgccgctatgttcccgatttaaacggtcgcgtgaaaggcaagcgtgaagccgccgaacgcatggcgttcaacatgcctgtacagggcacggcagctgacctcatgaaacttgcaatggtgcgcctttttccacaattgcgtgaagttggtgcccgcatgctgttgcaggtccacgatgaactcttgttagaagcgccaaaagagcgtgcggaagaggtggcagccctcgcgaaagaagttatggaaggcgtgtggcccttagcggtgcctcttgaagtcgaagttggtattggcgaggattggctggctgccaaagga

SEQ ID NO: 5888 - protein, 841 aa, synthetic construct
  REGION 1..841: note = Variant of DNA polymerase I from Thermus sp. strain 2.9
MHHHHHHGGSGVLPVFEPKGRVLLVDGHHLAYRNFFALKGLTTSLGEPVQGVYGFAKSLLKALKEDGDVVIVVFDAKAPSFRHEAYEAYKAGRAPTPEDFPRQLALMKELVDLLGLERLEVPGFEADDVLATLAKKAEREGYEVQILTADRDLFQLLSPRISVLHPEGHRITPEWLWEKYGLRPEQWVDFRALAGDPSDNIPGVKGIGEKTALKLLKEWGSLENLLKNLDQVKPESVREKILAHLEDLKLSRELSRVRTDLPLEVDFGRRREPDWEGLKAFLERLEFGSLLHEFGLLESPLLAEEAPWPPPEGAFLGYRLSRPEPMWAELLALAASAQGRVYRAEDPHGALRGLFEVRGLLAKDLAVVALREGLDLPPTDDPMLLAYLLDPSNTTPEGVARRYGGEWWEDAAKRALLAERLHENLLGRLQGEERLLWLYEEVEKPLSRVLAHMEATGVKLDVAYLENLSLEVAAHMRRLEEEVFRLAGRSFRLNSRDQLERVLFDELGLPPIGKTEKTGKRSTSAAVLEALREVHPIVDKILQYREMAKLKGTYIDRLPALVHPKTGRLHTRFNQTATATGRLSSSDPNLQNIPVRTPLGQKIRRAFVAEEGWRLVALDYRQIELRVLAHLSGDENLIRVFQEGKDIHTQTASWMFGLSAEAIDPLMRRAAKTINFGVLYGMSAFRLSQELGIPYEEAQAFIQKYFQSYPKVKAWIEKTLREGRTRGYVETLFGRRRYVPDLNGRVKGKREAAERMAFNMPVQGTAADLMKLAMVRLFPQLREVGARMLLQVHDELLLEAPKERAEEVAALAKEVMEGVWPLAVPLEVEVGIGEDWLAAKG

SEQ ID NO: 5889 - DNA, 2523 bp, synthetic construct
  misc_feature 1..2523: note = Variant of DNA polymerase I from Thermus sp. strain 2.9
  source 1..2523: mol_type = other DNA
atgcaccatcatcatcatcatggcggtagcggcgtgttaccggtgttcgagcctaaaggtcgcgtgcttctggttgatggccatcatctcgcgtatcgtaacttctttgccctgaaaggattaaccaccagcctgggcgagccggtacagggtgtctacggctttgcaaagtcgctcctgaaagctctgaaagaagacggtgatgtggtgattgttgtctttgatgcgaaagcgccaagttttcgccacgaagcgtacgaagcttacaaagccgggcgtgctccaacgccggaagactttcctcgccaattggcgcttatgaaggaattagtggatttgcttggcctcgaacgcttggaagttcccggtttcgaggcagacgacgtattagcgactctcgcaaagaaagccgaacgtgagggctatgaagtccagatcttgacagcagatcgcgatcttttccagcttttatctccgcgcatctcggtgttacacccggaagggcatcgtatcaccccggaatggctctgggagaaatatggtttgcgtcccgaacaatgggtggattttcgcgccttagcaggcgatccgagcgacaatattccgggagttaaaggtatcggcgagaagacggcgctcaagctccttaaagaatgggggtcgttggagaacttgcttaagaatttagatcaggtcaaaccagagtcagtgcgtgagaagattcttgctcacctcgaagacctcaaattaagccgcgaattgtcccgtgtacgcaccgatttgccgctcgaagttgatttcggtcgccgccgcgaacctgactgggagggtcttaaagcgtttttagagcgtcttgaatttggttcgctcttgcatgaattcggccttttagaaagcccgttactggccgaagaagcaccttggccaccgcccgagggcgcgtttttaggttaccgtttgagtcgcccggaaccgatgtgggccgaattactggctcttgcagcgtctgcccagggacgtgtgtatcgcgcggaagaccctcatggtgcgctccgcggcctcttcgaagtccgtggactccttgccaaagacttagctgttgttgcattgcgcgaaggtcttgatttacctccgactgatgatccaatgcttcttgcgtacctcttggacccgtcaaacacgacgcccgaaggcgtagcccgtcgttacggcggcgagtggaccgaagatgcagcgaaacgcgcgttattggccgaacgtttgcacgaaaatttattaggacgtttgcaaggcgaggaacgtctcctctggctttacgaagaagtggagaaaccattgagtcgcgtgctcgcgcatatggaagctaccggtgtcaaattagacgtggcgtatttggagaatctcagccttgaagttgctgcccacatgcgccgcttggaggaagaagtattccgtttagcaggccgttcctttcgccttaactctcgcgatcagttagaacgtgtgttgttcgatgaacttggtctccctcctatcggcaagacagagaagaccggtaaacgtagcacttcagcggcggttttagaagctcttcgcgaagtccatcccattgtggacaagatcttgcagtaccgcgaaatggcgaaattgaaaggcacctatattgaccgtcttccggcattagtccacccgaaaacgggacgcctccatacccgcttcaaccaaacagccacggcgaccggtcgtttgtcctcctctgatccaaaccttcagaatattccagtacgtaccccattgggccagaagatccgccgtgcgtttgtagctgaggagggttggcgtttagtggccctcgattatcgtcaaattgaattacgtgtccttgcccatctttctggcgatgagaacctcatccgcgtgtttcaggaaggcaaagacattcacactcaaacggcaagctggatgtttggattatcagctgaagcgatcgatcctttgatgcgtcgtgcagcgaagaccatcaatttcggtgttctctacggtatgagtgcctttcgtttgtcgcaggaattaggcattccctatgaagaagctcaggcgttcattcagaaatactttcaaagctatcccaaagttaaagcatggatcgagaagactctccgtgaaggccgcacacgtggttacgtagagaccttatttggacgtcgccgctatgttcccgatttaaacgctcgcgtgaaaggcaagcgtgaagccgccgaacgcatggcgttcaacatgcctgtacagggcacggcagctgacctcatgaaacttgcaatggtgcgcctttttccacaattgcgtgaagttggtgcccgcatgctcttgcaggtccacgatgaactcttgttagaagcgccaaaagagcgtgcggaagaggtggcagccctcgcgaaagaagttatggaaggcgtgtggtctttagcggtgcctcttgaagtcgaagttggtattggcgaggattggctggctgccaaagga

SEQ ID NO: 5890 - protein, 841 aa, synthetic construct
  REGION 1..841: note = Variant of DNA polymerase I from Thermus sp. strain 2.9
MHHHHHHGGSGVLPVFEPKGRVLLVDGHHLAYRNFFALKGLTTSLGEPVQGVYGFAKSLLKALKEDGDVVIVVFDAKAPSFRHEAYEAYKAGRAPTPEDFPRQLALMKELVDLLGLERLEVPGFEADDVLATLAKKAEREGYEVQILTADRDLFQLLSPRISVLHPEGHRITPEWLWEKYGLRPEQWVDFRALAGDPSDNIPGVKGIGEKTALKLLKEWGSLENLLKNLDQVKPESVREKILAHLEDLKLSRELSRVRTDLPLEVDFGRRREPDWEGLKAFLERLEFGSLLHEFGLLESPLLAEEAPWPPPEGAFLGYRLSRPEPMWAELLALAASAQGRVYRAEDPHGALRGLFEVRGLLAKDLAVVALREGLDLPPTDDPMLLAYLLDPSNTTPEGVARRYGGEWTEDAAKRALLAERLHENLLGRLQGEERLLWLYEEVEKPLSRVLAHMEATGVKLDVAYLENLSLEVAAHMRRLEEEVFRLAGRSFRLNSRDQLERVLFDELGLPPIGKTEKTGKRSTSAAVLEALREVHPIVDKILQYREMAKLKGTYIDRLPALVHPKTGRLHTRFNQTATATGRLSSSDPNLQNIPVRTPLGQKIRRAFVAEEGWRLVALDYRQIELRVLAHLSGDENLIRVFQEGKDIHTQTASWMFGLSAEAIDPLMRRAAKTINFGVLYGMSAFRLSQELGIPYEEAQAFIQKYFQSYPKVKAWIEKTLREGRTRGYVETLFGRRRYVPDLNARVKGKREAAERMAFNMPVQGTAADLMKLAMVRLFPQLREVGARMLLQVHDELLLEAPKERAEEVAALAKEVMEGVWSLAVPLEVEVGIGEDWLAAKG

SEQ ID NO: 5891 - DNA, 2523 bp, synthetic construct
  misc_feature 1..2523: note = Variant of DNA polymerase I from Thermus sp. strain 2.9
  source 1..2523: mol_type = other DNA
atgcaccatcatcatcatcatggcggtagcggcgtgttaccggtgttcgagcctaaaggtcgcgtgcttctggttgatggccatcatctcgcgtatcgtaacttctttgccctgaaaggattaaccaccagcctgggcgagccggtacagggtgtctacggctttgcaaagtcgctcctgaaagctctgaaagaagacggtgatgtggtgattgttgtctttgatgcgaaagcgccaagttttcgccacgaagcgtacgaagcttacaaagccgggcgtgctccaacgccggaagactttcctcgccaattggcgcttatgaaggaattagtggatttgcttggcctcgaacgcttggaagttcccggtttcgaggcagacgacgtattagcgactctcgcaaagaaagccgaacgtgagggctatgaagtccagatcttgacagcagatcgcgatcttttccagcttttatctccgcgcatctcggtgttacacccggaagggcatcgtatcaccccggaatggctctgggagaaatatggtttgcgtcccgaacaatgggtggattttcgcgccttagcaggcgatccgagcgacaatattccgggagttaaaggtatcggcgagaagacggcgctcaagctccttaaagaatgggggtcgttggagaacttgcttaagaatttagatcaggtcaaaccagagtcagtgcgtgagaagattcttgctcacctcgaagacctcaaattaagccgcgaattgtcccgtgtacgcaccgatttgccgctcgaagttgatttcggtcgccgccgcgaacctgactgggagggtcttaaagcgtttttagagcgtcttgaatttggttcgctcttgcatgaattcggccttttagaaagcccgttactggccgaagaagcaccttggccaccgcccgagggcgcgtttttaggttaccgtttgagtcgcccggaaccgatgtgggccgaattactggctcttgcagcgtctgcccagggacgtgtgtatcgcgcggaagaccctcatggtgcgctccgcggcctcttcgaagtccgtggactccttgccaaagacttagctgttgttgcattgcgcgaaggtcttgatttacctccgactgatgatccaatgcttcttgcgtacctcttggacccgtcaaacacgacgcccgaaggcgtagcccgtcgttacggcggcgagtggaccgaagatgcagcgaaacgcgcgttattggccgaacgtttgcacgaaaatttattaggacgtttgcaaggcgaggaacgtctcctctggctttacgaagaagtggagaaaccattgagtcgcgtgctcgcgcatatggaagctaccggtgtcaaattagacgtggcgtatttggagaatctcagccttgaagttgctgcccacatgcgccgcttggaggaagaagtattccgtttagcaggccgttcctttcgccttaactctcgcgatcagttagaacgtgtgttgttcgatgaacttggtctccctcctatcggcaagacagagaagaccggtaaacgtagcacttcagcggcggttttagaagctcttcgcgaagtccatcccattgtggacaagatcttgcagtaccgcgaaatggcgaaattgaaaggcacctatattgaccgtcttccggcattagtccacccgaaaacgggacgcctccatacccgcttcaaccaaacagccacggcgaccggtcgtttgtcctcctctgatccaaaccttcagaatattccagtacgtaccccattgggccagaagatccgccgtgcgtttgtagctgaggagggttggcgtttagtggccctcgattatcgtcaaattgaattacgtgtccttgcccatctttctggcgatgagaacctcatccgcgtgtttcaggaaggcaaagacattcacactcaaacgggtagctggatgtttggattatcagctgaagcgatcgatcctttgatgcgtcgtgcagcgaagaccatcaatttcggtgttctctacggtatgagtgcctttcgtttgtcgcaggaattaggcattccctatgaagaagctcaggcgttcattcagaaatactttcaaagctatcccaaagttaaagcatggatcgagaagactctccgtgaaggccgcacacgtggttacgtagagaccttatttggacgtcgccgctatgttcccgatttaaacgctcgcgtgaaaggcaagcgtgaagccgccgaacgcatggcgttcaacatgcctgtacagggcacggcagctgacctcatgaaacttgcaatggtgcgcctttttccacaattgcgtgaagttggtgcccgcatgctcttgcaggtccacgatgaactcttgttagaagcgccaaaagagcgtgcggaagaggtggcagccctcgcgaaagaagttatggaaggcgtgtggcccttagcggtgcctcttgaagtcgaagttggtattggcgaggattggctggctgccaaagga

SEQ ID NO: 5892 - protein, 841 aa, synthetic construct
  REGION 1..841: note = Variant of DNA polymerase I from Thermus sp. strain 2.9
MHHHHHHGGSGVLPVFEPKGRVLLVDGHHLAYRNFFALKGLTTSLGEPVQGVYGFAKSLLKALKEDGDVVIVVFDAKAPSFRHEAYEAYKAGRAPTPEDFPRQLALMKELVDLLGLERLEVPGFEADDVLATLAKKAEREGYEVQILTADRDLFQLLSPRISVLHPEGHRITPEWLWEKYGLRPEQWVDFRALAGDPSDNIPGVKGIGEKTALKLLKEWGSLENLLKNLDQVKPESVREKILAHLEDLKLSRELSRVRTDLPLEVDFGRRREPDWEGLKAFLERLEFGSLLHEFGLLESPLLAEEAPWPPPEGAFLGYRLSRPEPMWAELLALAASAQGRVYRAEDPHGALRGLFEVRGLLAKDLAVVALREGLDLPPTDDPMLLAYLLDPSNTTPEGVARRYGGEWTEDAAKRALLAERLHENLLGRLQGEERLLWLYEEVEKPLSRVLAHMEATGVKLDVAYLENLSLEVAAHMRRLEEEVFRLAGRSFRLNSRDQLERVLFDELGLPPIGKTEKTGKRSTSAAVLEALREVHPIVDKILQYREMAKLKGTYIDRLPALVHPKTGRLHTRFNQTATATGRLSSSDPNLQNIPVRTPLGQKIRRAFVAEEGWRLVALDYRQIELRVLAHLSGDENLIRVFQEGKDIHTQTGSWMFGLSAEAIDPLMRRAAKTINFGVLYGMSAFRLSQELGIPYEEAQAFIQKYFQSYPKVKAWIEKTLREGRTRGYVETLFGRRRYVPDLNARVKGKREAAERMAFNMPVQGTAADLMKLAMVRLFPQLREVGARMLLQVHDELLLEAPKERAEEVAALAKEVMEGVWPLAVPLEVEVGIGEDWLAAKG

SEQ ID NO: 5893 - DNA, 2523 bp, synthetic construct
  misc_feature 1..2523: note = Variant of DNA polymerase I from Thermus sp. strain 2.9
  source 1..2523: mol_type = other DNA
atgcaccatcatcatcatcatggcggtagcggcgtgttaccggtgttcgagcctaaaggtcgcgtgcttctggttgatggccatcatctcgcgtatcgtaacttctttgccctgaaaggattaaccaccagcctgggcgagccggtacagggtgtctacggctttgcaaagtcgctcctgaaagctctgaaagaagacggtgatgtggtgattgttgtctttgatgcgaaagcgccaagttttcgccacgaagcgtacgaagcttacaaagccgggcgtgctccaacgccggaagactttcctcgccaattggcgcttatgaaggaattagtggatttgcttggcctcgaacgcttggaagttcccggtttcgaggcagacgacgtattagcgactctcgcaaagaaagccgaacgtgagggctatgaagtccagatcttgacagcagatcgcgatcttttccagcttttatctccgcgcatctcggtgttacacccggaagggcatcgtatcaccccggaatggctctgggagaaatatggtttgcgtcccgaacaatgggtggattttcgcgccttagcaggcgatccgagcgacaatattccgggagttaaaggtatcggcgagaagacggcgctcaagctccttaaagaatgggggtcgttggagaacttgcttaagaatttagatcaggtcaaaccagagtcagtgcgtgagaagattcttgctcacctcgaagacctcaaattaagccgcgaattgtcccgtgtacgcaccgatttgccgctcgaagttgatttcggtcgccgccgcgaacctgactgggagggtcttaaagcgtttttagagcgtcttgaatttggttcgctcttgcatgaattcggccttttagaaagcccgttactggccgaagaagcaccttggccaccgcccgagggcgcgtttttaggttaccgtttgagtcgcccggaaccgatgtgggccgaattactggctcttgcagcgtctgcccagggacgtgtgtatcgcgcggaagaccctcatggtgcgctccgcggcctcttcgaagtccgtggactccttgccaaagacttagctgttgttgcattgcgcgaaggtcttgatttacctccgactgatgatccaatgcttcttgcgtacctcttggacccgtcaaacacgacgcccgaaggcgtagcccgtcgttacggcggcgagtggaccgaagatgcagcgaaacgcgcgttattggccgaacgtttgcacgaaaatttattaggacgtttgcaaggcgaggaacgtctcctctggctttacgaagaagtggagaaaccattgagtcgcgtgctcgcgcatatggaagctaccggtgtcaaattagacgtggcgtatttggagaatctcagccttgaagttgctgcccacatgcgccgcttggaggaagaagtattccgtttatcgggccgttcctttcgccttaactctcgcgatcagttagaacgtgtgttgttcgatgaacttggtctccctcctatcggcaagacagagaagaccggtaaacgtagcacttcagcggcggttttagaagctcttcgcgaagtccatcccattgtggacaagatcttgcagtaccgcgaaatggcgaaattgaaaggcacctatattgaccgtcttccggcattagtccacccgaaaacgggacgcctccatacccgcttcaaccaaacagccacggcgaccggtcgtttgtcctcctctgatccaaaccttcagaatattccagtacgtaccccattgggccagaagatccgccgtgcgtttgtagctgaggagggttggcgtttagtggccctcgattatcgtcaaattgaattacgtgtccttgcccatctttctggcgatgagaacctcatccgcgtgtttcaggaaggcaaagacattcacactcaaacggcaagctggatgtttggattatcagctgaagcgatcgatcctttgatgcgtcgtgcagcgaagaccatcaatttcggtgttctctacggtatgagtgcctttcgtttgtcgcaggaattaggcattccctatgaagaagctcaggcgttcattcagaaatactttcaaagctatcccaaagttaaagcatggatcgagaagactctccgtgaaggccgcacacgtggttacgtagagaccttatttggacgtcgccgctatgttcccgatttaaacgctcgcgtgaaaggcaagcgtgaagccgccgaacgcatggcgttcaacatgcctgtacagggcacggcagctgacctcatgaaacttgcaatggtgcgcctttttccacaattgcgtgaagttggtgcccgcatgctcttgcaggtccacgatgaactcttgttagaagcgccaaaagagcgtgcggaagaggtggcagccctcgcgaaagaagttatggaaggcgtgtggcccttagcggtgcctcttgaagtcgaagttggtattggcgaggattggctggctgccaaagga

SEQ ID NO: 5894 - protein, 841 aa, synthetic construct
  REGION 1..841: note = Variant of DNA polymerase I from Thermus sp. strain 2.9
MHHHHHHGGSGVLPVFEPKGRVLLVDGHHLAYRNFFALKGLTTSLGEPVQGVYGFAKSLLKALKEDGDVVIVVFDAKAPSFRHEAYEAYKAGRAPTPEDFPRQLALMKELVDLLGLERLEVPGFEADDVLATLAKKAEREGYEVQILTADRDLFQLLSPRISVLHPEGHRITPEWLWEKYGLRPEQWVDFRALAGDPSDNIPGVKGIGEKTALKLLKEWGSLENLLKNLDQVKPESVREKILAHLEDLKLSRELSRVRTDLPLEVDFGRRREPDWEGLKAFLERLEFGSLLHEFGLLESPLLAEEAPWPPPEGAFLGYRLSRPEPMWAELLALAASAQGRVYRAEDPHGALRGLFEVRGLLAKDLAVVALREGLDLPPTDDPMLLAYLLDPSNTTPEGVARRYGGEWTEDAAKRALLAERLHENLLGRLQGEERLLWLYEEVEKPLSRVLAHMEATGVKLDVAYLENLSLEVAAHMRRLEEEVFRLSGRSFRLNSRDQLERVLFDELGLPPIGKTEKTGKRSTSAAVLEALREVHPIVDKILQYREMAKLKGTYIDRLPALVHPKTGRLHTRFNQTATATGRLSSSDPNLQNIPVRTPLGQKIRRAFVAEEGWRLVALDYRQIELRVLAHLSGDENLIRVFQEGKDIHTQTASWMFGLSAEAIDPLMRRAAKTINFGVLYGMSAFRLSQELGIPYEEAQAFIQKYFQSYPKVKAWIEKTLREGRTRGYVETLFGRRRYVPDLNARVKGKREAAERMAFNMPVQGTAADLMKLAMVRLFPQLREVGARMLLQVHDELLLEAPKERAEEVAALAKEVMEGVWPLAVPLEVEVGIGEDWLAAKG

SEQ ID NO: 5895 - DNA, 2523 bp, synthetic construct
  misc_feature 1..2523: note = Variant of DNA polymerase I from Thermus sp. strain 2.9
  source 1..2523: mol_type = other DNA
atgcaccatcatcatcatcatggcggtagcggcgtgttaccggtgttcgagcctaaaggtcgcgtgcttctggttgatggccatcatctcgcgtatcgtaacttctttgccctgaaaggattaaccaccagcctgggcgagccggtacagggtgtctacggctttgcaaagtcgctcctgaaagctctgaaagaagacggtgatgtggtgattgttgtctttgatgcgaaagcgccaagttttcgccacgaagcgtacgaagcttacaaagccgggcgtgctccaacgccggaagactttcctcgccaattggcgcttatgaaggaattagtggatttgcttggcctcgaacgcttggaagttcccggtttcgaggcagacgacgtattagcgactctcgcaaagaaagccgaacgtgagggctatgaagtccagatcttgacagcagatcgcgatcttttccagcttttatctccgcgcatctcggtgttacacccggaagggcatcgtatcaccccggaatggctctgggagaaatatggtttgcgtcccgaacaatgggtggattttcgcgccttagcaggcgatccgagcgacaatattccgggagttaaaggtatcggcgagaagacggcgctcaagctccttaaagaatgggggtcgttggagaacttgcttaagaatttagatcaggtcaaaccagagtcagtgcgtgagaagattcttgctcacctcgaagacctcaaattaagccgcgaattgtcccgtgtacgcaccgatttgccgctcgaagttgatttcggtcgccgccgcgaacctgactgggagggtcttaaagcgtttttagagcgtcttgaatttggttcgctcttgcatgaattcggccttttagaaagcccgttactggccgaagaagcaccttggccaccgcccgagggcgcgtttttaggttaccgtttgagtcgcccggaaccgatgtgggccgaattactggctcttgcagcgtctgcccagggacgtgtgtatcgcgcggaagaccctcatggtgcgctccgcggcctcttcgaagtccgtggactccttgccaaagacttagctgttgttgcattgcgcgaaggtcttgatttacctccgactgatgatccaatgcttcttgcgtacctcttggacccgtcaaacacgacgcccgaaggcgtagcccgtcgttacggcggcgagtggaccgaagatgcagcgaaacgcgcgttattggccgaacgtttgcacgaaaatttattaggacgtttgcaaggcgaggaacgtctcctctggctttacgaagaagtggagaaaccattgagtcgcgtgctcgcgcatatggaagctaccggtgtcaaattagacgtggcgtatttggagaatctcagccttgaagttgctgcccacatgcgccgcttggaggaagaagtattccgtttagcaggccgttcctttcgccttaactctcgcgatcagttagaacgtgtgttgttcgatgaacttggtctccctcctatcggcaagacagagaagaccggtaaacgtagcacttcagcggcggttttagaagctcttcgcgaagtccatcccattgtggacaagatcttgcagtaccgcgaaatggcgaaattgaaaggcacctatattgaccgtcttccggcattagtccacccgaaaacgggacgcctccatacccgcttcaaccaaacagccacggcgaccggtcgtttgtcctcctctgatccaaaccttcagaatattccagtacgtaccccattgggccagaagatccgccgtgcgtttgtagctgagtgtggttggcgtttagtggccctcgattatcgtcaaattgaattacgtgtccttgcccatctttctggcgatgagaacctcatccgcgtgtttcaggaaggcaaagacattcacactcaaacggcaagctggatgtttggattatcagctgaagcgatcgatcctttgatgcgtcgtgcagcgaagaccatcaatttcggtgttctctacggtatgagtgcctttcgtttgtcgcaggaattaggcattccctatgaagaagctcaggcgttcattcagaaatactttcaaagctatcccaaagttaaagcatggatcgagaagactctccgtgaaggccgcacacgtggttacgtagagaccttatttggacgtcgccgctatgttcccgatttaaacgctcgcgtgaaaggcaagcgtgaagccgccgaacgcatggcgttcaacatgcctgtacagggcacggcagctgacctcatgaaacttgcaatggtgcgcctttttccacaattgcgtgaagttggtgcccgcatgctcttgcaggtccacgatgaactcttgttagaagcgccaaaagagcgtgcggaagaggtggcagccctcgcgaaagaagttatggaaggcgtgtggcccttagcggtgcctcttgaagtcgaagttggtattggcgaggattggctggctgccaaagga

SEQ ID NO: 5896 - protein, 841 aa, synthetic construct
  REGION 1..841: note = Variant of DNA polymerase I from Thermus sp. strain 2.9
MHHHHHHGGSGVLPVFEPKGRVLLVDGHHLAYRNFFALKGLTTSLGEPVQGVYGFAKSLLKALKEDGDVVIVVFDAKAPSFRHEAYEAYKAGRAPTPEDFPRQLALMKELVDLLGLERLEVPGFEADDVLATLAKKAEREGYEVQILTADRDLFQLLSPRISVLHPEGHRITPEWLWEKYGLRPEQWVDFRALAGDPSDNIPGVKGIGEKTALKLLKEWGSLENLLKNLDQVKPESVREKILAHLEDLKLSRELSRVRTDLPLEVDFGRRREPDWEGLKAFLERLEFGSLLHEFGLLESPLLAEEAPWPPPEGAFLGYRLSRPEPMWAELLALAASAQGRVYRAEDPHGALRGLFEVRGLLAKDLAVVALREGLDLPPTDDPMLLAYLLDPSNTTPEGVARRYGGEWTEDAAKRALLAERLHENLLGRLQGEERLLWLYEEVEKPLSRVLAHMEATGVKLDVAYLENLSLEVAAHMRRLEEEVFRLAGRSFRLNSRDQLERVLFDELGLPPIGKTEKTGKRSTSAAVLEALREVHPIVDKILQYREMAKLKGTYIDRLPALVHPKTGRLHTRFNQTATATGRLSSSDPNLQNIPVRTPLGQKIRRAFVAECGWRLVALDYRQIELRVLAHLSGDENLIRVFQEGKDIHTQTASWMFGLSAEAIDPLMRRAAKTINFGVLYGMSAFRLSQELGIPYEEAQAFIQKYFQSYPKVKAWIEKTLREGRTRGYVETLFGRRRYVPDLNARVKGKREAAERMAFNMPVQGTAADLMKLAMVRLFPQLREVGARMLLQVHDELLLEAPKERAEEVAALAKEVMEGVWPLAVPLEVEVGIGEDWLAAKG

SEQ ID NO: 5897 - DNA, 2523 bp, synthetic construct
  misc_feature 1..2523: note = Variant of DNA polymerase I from Thermus sp. strain 2.9
  source 1..2523: mol_type = other DNA
atgcaccatcatcatcatcatggcggtagcggcgtgttaccggtgttcgagcctaaaggtcgcgtgcttctggttgatggccatcatctcgcgtatcgtaacttctttgccctgaaaggattaaccaccagcctgggcgagccggtacagggtgtctacggctttgcaaagtcgctcctgaaagctctgaaagaagacggtgatgtggtgattgttgtctttgatgcgaaagcgccaagttttcgccacgaagcgtacgaagcttacaaagccgggcgtgctccaacgccggaagactttcctcgccaattggcgcttatgaaggaattagtggatttgcttggcctcgaacgcttggaagttcccggtttcgaggcagacgacgtattagcgactctcgcaaagaaagccgaacgtgagggctatgaagtccagatcttgacagcagatcgcgatcttttccagcttttatctccgcgcatctcggtgttacacccggaagggcatcgtatcaccccggaatggctctgggagaaatatggtttgcgtcccgaacaatgggtggattttcgcgccttagcaggcgatccgagcgacaatattccgggagttaaaggtatcggcgagaagacggcgctcaagctccttaaagaatgggggtcgttggagaacttgcttaagaatttagatcaggtcaaaccagagtcagtgcgtgagaagattcttgctcacctcgaagacctcaaattaagccgcgaattgtcccgtgtacgcaccgatttgccgctcgaagttgatttccgccgccgccgcgaacctgactgggagggtcttaaagcgtttttagagcgtcttgaatttggttcgctcttgcatgaattcggccttttagaaagcccgttactggccgaagaagcaccttggccaccgcccgagggcgcgtttttaggttaccgtttgagtcgcccggaaccgatgtgggccgaattactggctcttgcagcgtctgcccagggacgtgtgtatcgcgcggaagaccctcatggtgcgctccgcggcctcttcgaagtccgtggactccttgccaaagacttagctgttgttgcattgcgcgaaggtcttgatttacctccgactgatgatccaatgcttcttgcgtacctcttggacccgtcaaacacgacgcccgaaggcgtagcccgtcgttacggcggcgagtggaccgaagatgcagcgaaacgcgcgttattggccgaacgtttgcacgaaaatttattaggacgtttgcaaggcgaggaacgtctcctctggctttacgaagaagtggagaaaccattgagtcgcgtgctcgcgcatatggaagctaccggtgtcaaattagacgtggcgtatttggagaatctcagccttgaagttgctgccgaaatgcgccgcttggaggaagaagtattccgtttagcaggccgttcctttcgccttaactctcgcgatcagttagaacgtgtgttgttcgatgaacttggtctccctcctatcggcaagacagagaagaccggtaaacgtagcacttcagcggcggttttagaagctcttcgcgaagtccatcccattgtggacaagatcttgcagtaccgcgaaatggcgaaattgaaaggcacctatattgaccctcttccggcattagtccacccgaaaacgggacgcctccatacccgcttcaaccaaacagccacggcgaccggtcgtttgtcctcctctgatccaaaccttcagaatattccagtacgtaccccattgggccagaagatccgccgtgcgtttgtagctgaggagggttggcgtttagtggccctcgattatcgtcaaattgaattacgtgtccttgcccatctttctggcgatgagaacctcatccgcgtgtttcaggaaggcaaagacattcacactcaaacggcaagctggatgtttggattatcagctgaagcgatcgatcctttgatgcgtcgtgcagcgaagaccatcaatttcggtgttctctacggtatgagtgcctttcgtttgtcgcaggaattaggcattccctatgaagaagctcaggcgttcattcagaaatactttcaaagctatcccaaagttaaagcatggatcgagaagactctcgaggaaggccgcacacgtggttacgtagagaccttatttggacgtcgccgctatgttcccgatttaaacgctcgcgtgaaaggcgtacgtgaagccgccgaacgcatggcgttcaacatgcctgtacagggcacggcagctgacctcatgaaacttgcaatggtgcgcctttttccacaattgcgtgaagttggtgcccgcatgctcttgcaggtccacgatgaactcttgttagaagcgccaaaagagcgtgcggaagaggtggcagccctcgcgaaagaagttatggaaggcgtgtggcccttagcggtgcctcttgaagtcgaagttggtattggcgaggattggctggctgccaaagga

SEQ ID NO: 5898 - protein, 841 aa, synthetic construct
  REGION 1..841: note = Variant of DNA polymerase I from Thermus sp. strain 2.9
MHHHHHHGGSGVLPVFEPKGRVLLVDGHHLAYRNFFALKGLTTSLGEPVQGVYGFAKSLLKALKEDGDVVIVVFDAKAPSFRHEAYEAYKAGRAPTPEDFPRQLALMKELVDLLGLERLEVPGFEADDVLATLAKKAEREGYEVQILTADRDLFQLLSPRISVLHPEGHRITPEWLWEKYGLRPEQWVDFRALAGDPSDNIPGVKGIGEKTALKLLKEWGSLENLLKNLDQVKPESVREKILAHLEDLKLSRELSRVRTDLPLEVDFRRRREPDWEGLKAFLERLEFGSLLHEFGLLESPLLAEEAPWPPPEGAFLGYRLSRPEPMWAELLALAASAQGRVYRAEDPHGALRGLFEVRGLLAKDLAVVALREGLDLPPTDDPMLLAYLLDPSNTTPEGVARRYGGEWTEDAAKRALLAERLHENLLGRLQGEERLLWLYEEVEKPLSRVLAHMEATGVKLDVAYLENLSLEVAAEMRRLEEEVFRLAGRSFRLNSRDQLERVLFDELGLPPIGKTEKTGKRSTSAAVLEALREVHPIVDKILQYREMAKLKGTYIDPLPALVHPKTGRLHTRFNQTATATGRLSSSDPNLQNIPVRTPLGQKIRRAFVAEEGWRLVALDYRQIELRVLAHLSGDENLIRVFQEGKDIHTQTASWMFGLSAEAIDPLMRRAAKTINFGVLYGMSAFRLSQELGIPYEEAQAFIQKYFQSYPKVKAWIEKTLEEGRTRGYVETLFGRRRYVPDLNARVKGVREAAERMAFNMPVQGTAADLMKLAMVRLFPQLREVGARMLLQVHDELLLEAPKERAEEVAALAKEVMEGVWPLAVPLEVEVGIGEDWLAAKG

SEQ ID NO: 5899 - DNA, 2523 bp, synthetic construct
  misc_feature 1..2523: note = Variant of DNA polymerase I from Thermus sp. strain 2.9
  source 1..2523: mol_type = other DNA
atgcaccatcatcatcatcatggcggtagcggcgtgttaccggtgttcgagcctaaaggtcgcgtgcttctggttgatggccatcatctcgcgtatcgtaacttctttgccctgaaaggattaaccaccagcctgggcgagccggtacagggtgtctacggctttgcaaagtcgctcctgaaagctctgaaagaagacggtgatgtggtgattgttgtctttgatgcgaaagcgccaagttttcgccacgaagcgtacgaagcttacaaagccgggcgtgctccaacgccggaagactttcctcgccaattggcgcttatgaaggaattagtggatttgcttggcctcgaacgcttggaagttcccggtttcgaggcagacgacgtattagcgactctcgcaaagaaagccgaacgtgagggctatgaagtccagatcttgacagcagatcgcgatcttttccagcttttatctccgcgcatctcggtgttacacccggaagggcatcgtatcaccccggaatggctctgggagaaatatggtttgcgtcccgaacaatgggtggattttcgcgccttagcaggcgatccgagcgacaatattccgggagttaaaggtatcggcgagaagacggcgctcaagctccttaaagaatgggggtcgttggagaacttgcttaagaatttagatcaggtcaaaccagagtcagtgcgtgagaagattcttgctcacctcgaagacctcaaattaagccgcgaattgtcccgtgtacgcaccgatttgccgctcgaagttgatttcggtcgccgccgcgaacctgactgggagggtcttaaagcgtttttagagcgtcttgaatttggttcgctcttgcatgaattcggccttttagaaagcccgttactggccgaagaagcaccttggccaccgcccgagggcgcgtttttaggttaccgtttgagtcgcccggaaccgatgtgggccgaattactggctcttgcagcgtctgcccagggacgtgtgtatcgcgcggaagaccctcatggtgcgctccgcggcctcttcgaagtccgtggcctccttgccaaagacttagctgttgttgcattgcgcgaaggtcttgatttacctccgactgatgatccaatgcttcttgcgtacctcttggacccgtcaaacacgacgcccgaaggcgtagcccgtcgttacggcggcgagtggaccgaagatgcaggcaaacgcgcgttattggccgaacgtttgcacgaaaatttattaggacgtttgcaaggcgaggagcgtctccgttggctttacgaagaagtggagaaaccattgagtcgcgtgctcgcgcatatggaagctaccggtgtcaaattagacgtggcgtatttggagaatctcagccttgaagttgctgcccacatgcgccgcttggaggaagaagtattccgtttagcaggccgttcctttcgccttaactctcgcgatcagttagaacgtgtgttgttcgatgaacttggtctccctcctatcggcaagacagagaagaccggtaaacgtagcacttcagcggcggttttagaagctcttcgcgaagtccatcccattgtggacaagatcttgcagtaccgcgaaatggcgaaattgaaaggcacctatattgaccgtcttccggcattagtccacccgaaaacgggacgcctccatacccgcttcaaccaaacagccacggcgaccggtcgtttgtcctcctctgatccaaaccttcagaatattccagtacgtaccccattgggccagaagatccgccgtgcgtttgtagctgagaagggttgggcgttagtggccctcgattatcgtcaaattgaattacgtgtccttgcccatctttctggcgatgagaacctcatccgcgtgtttcaggaaggcaaagacattcacactcaaacggcaagctggatgtttggattatcagctgaagcgatcgatcctttgatgcgtcgtgcagcgaagaccatcaatttcggtgttctctacggtatgagtgcctttcgtttgtcgcaggaattaggcattccctatgaagaagctcaggctttcattcagaaatactttcaaagctatcccaaagttaaagcatggatcgagaagactctccgtgaaggccgcacacgtggttacgtagagaccttatttggacgtcgccgctatgttcccgatttaaactcgcgcgtgaaaggcaagcgtgaagccgccgaacgcatggcgttcaacatgcctgtacagggcacggcagctgacctcatgaaacttgcaatggtgcgcctttttccacaattgcgtgaagttggtgcccgcatggatttgcaggtccacgatgaactcttgttagaagcgccaaaagagcgtgcggaagaggtggcagccctcgcgaaagaagttatggaaggcgtgtggcccttagcggtgcctcttgaagtcgaagttggtattggcgaggattggctggctgccaaagga

SEQ ID NO: 5900 - protein, 841 aa, synthetic construct
  REGION 1..841: note = Variant of DNA polymerase I from Thermus sp. strain 2.9
MHHHHHHGGSGVLPVFEPKGRVLLVDGHHLAYRNFFALKGLTTSLGEPVQGVYGFAKSLLKALKEDGDVVIVVFDAKAPSFRHEAYEAYKAGRAPTPEDFPRQLALMKELVDLLGLERLEVPGFEADDVLATLAKKAEREGYEVQILTADRDLFQLLSPRISVLHPEGHRITPEWLWEKYGLRPEQWVDFRALAGDPSDNIPGVKGIGEKTALKLLKEWGSLENLLKNLDQVKPESVREKILAHLEDLKLSRELSRVRTDLPLEVDFGRRREPDWEGLKAFLERLEFGSLLHEFGLLESPLLAEEAPWPPPEGAFLGYRLSRPEPMWAELLALAASAQGRVYRAEDPHGALRGLFEVRGLLAKDLAVVALREGLDLPPTDDPMLLAYLLDPSNTTPEGVARRYGGEWTEDAGKRALLAERLHENLLGRLQGEERLRWLYEEVEKPLSRVLAHMEATGVKLDVAYLENLSLEVAAHMRRLEEEVFRLAGRSFRLNSRDQLERVLFDELGLPPIGKTEKTGKRSTSAAVLEALREVHPIVDKILQYREMAKLKGTYIDRLPALVHPKTGRLHTRFNQTATATGRLSSSDPNLQNIPVRTPLGQKIRRAFVAEKGWALVALDYRQIELRVLAHLSGDENLIRVFQEGKDIHTQTASWMFGLSAEAIDPLMRRAAKTINFGVLYGMSAFRLSQELGIPYEEAQAFIQKYFQSYPKVKAWIEKTLREGRTRGYVETLFGRRRYVPDLNSRVKGKREAAERMAFNMPVQGTAADLMKLAMVRLFPQLREVGARMDLQVHDELLLEAPKERAEEVAALAKEVMEGVWPLAVPLEVEVGIGEDWLAAKG

SEQ ID NO: 5901 - DNA, 2523 bp, synthetic construct
  misc_feature 1..2523: note = Variant of DNA polymerase I from Thermus sp. strain 2.9
  source 1..2523: mol_type = other DNA
atgcaccatcatcatcatcatggcggtagcggcgtgttaccggtgttcgagcctaaaggtcgcgtgcttctggttgatggccatcatctcgcgtatcgtaacttctttgccctgaaaggattaaccaccagcctgggcgagccggtacagggtgtctacggctttgcaaagtcgctcctgaaagctctgaaagaagacggtgatgtggtgattgttgtctttgatgcgaaagcgccaagttttcgccacgaagcgtacgaagcttacaaagccgggcgtgctccaacgccggaagactttcctcgccaattggcgcttatgaaggaattagtggatttgcttggcctcgaacgcttggaagttcccggtttcgaggcagacgacgtattagcgactctcgcaaagaaagccgaacgtgagggctatgaagtccagatcttgacagcagatcgcgatcttttccagcttttatctccgcgcatctcggtgttacacccggaagggcatcgtatcaccccggaatggctctgggagaaatatggtttgcgtcccgaacaatgggtggattttcgcgccttagcaggcgatccgagcgacaatattccgggagttaaaggtatcggcgagaagacggcgctcaagctccttaaagaatgggggtcgttggagaacttgcttaagaatttagatcaggtcaaaccagagtcagtgcgtgagaagattcttgctcacctcgaagacctcaaattaagccgcgaattgtcccgtgtacgcaccgatttgccgctcgaagttgatttcggtcgccgccgcgaacctgactgggagggtcttaaagcgtttttagagcgtcttgaatttggttcgctcttgcatgaattcggccttttagaaagcccgttactggccgaagaagcaccttggccaccgcccgagggcgcgtttttaggttaccgtttgagtcgcccggaaccgatgtgggccgaattactggctcttgcagcgtctgcccagggacgtgtgtatcgcgcggaagaccctcatggtgcgctccgcggcctcttcgaagtccgtggcctccttgccaaagacttagctgttgttgcattgcgcgaaggtcttgatttacctccgactgatgatccaatgcttcttgcgtacctcttggacccgtcaaacacgacgcccgaaggcgtagcccgtcgttacggcggcgagtggtgggaagatgcagccaaacgcgcgttattggccgaacgtttgcacgaaaatttattaggacgtttgcaaggcgaggaacgtctcctctggctttacgaagaagtggagaaaccattgagtcgcgtgctcgcgcatatggaagctaccggtgtcaaattagacgtggcgtatttggagaatctcagccttgaagttgctgcccacatgcgccgcttggaggaagaagtattccgtttagcaggccgttcctttcgccttaactctcgcgatcagttagaacgtgtgttgttcgatgaacttggtctccctcctatcggcaagacagagaagaccggtaaacgtagcacttcagcggcggttttagaagctcttcgcgaagtccatcccattgtggacaagatcttgcagtaccgcgaaatggcgaaattgaaaggcacctatattgaccgtcttccggcattagtccacccgaaaacgggacgcctccatacccgcttcaaccaaacagccacggcgaccggtcgtttgtcctcctctgatccaaaccttcagaatattccagtacgtacctttttgggccagaagatccgccgtgcgtttgtagctgagccgggttgggcgttagtggccctcgattatcgtcaaattgaattacgtgtccttgcccatctttctggcgatgagaacctcatccgcgtgtttcaggaaggcaaagacattcacactcaaacggcaagctggatgtttggattatcagctgaagcgatcgatcctttgatgcgtcgtgcagcgaagaccatcaatttcggtgttctctacggtatgagtgcctttcgtttgtcgcaggaattaggcattccctatgaagaagctcagggtttcattcagaaatactttcaaagctatcccaaagttaaagcatggatcgagaagactctccgtgaaggccgcacacgtggttacgtagagaccttatttggacgtcgccgctatgttcccgatttaaacgctcgcgtgaaaggcaagcgtgaagccgccgaacgcatggcgttcaacatgcctgtacagggcacggcagctgacctcatgaaacttgcaatggtgcgcctttttccacaattgcgtgaagttggtgcccgcatgctgttgcaggtccacgatgaactcttgttagaagcgccaaaagagcgtgcggaagaggtggcagccctcgcgaaagaagttatggaaggcgtgtggcccttagcggtgcctcttgaagtcgaagttggtattggcgaggattggctggctgccaaagga

SEQ ID NO: 5902 - protein, 841 aa, synthetic construct
  REGION 1..841: note = Variant of DNA polymerase I from Thermus sp. strain 2.9
MHHHHHHGGSGVLPVFEPKGRVLLVDGHHLAYRNFFALKGLTTSLGEPVQGVYGFAKSLLKALKEDGDVVIVVFDAKAPSFRHEAYEAYKAGRAPTPEDFPRQLALMKELVDLLGLERLEVPGFEADDVLATLAKKAEREGYEVQILTADRDLFQLLSPRISVLHPEGHRITPEWLWEKYGLRPEQWVDFRALAGDPSDNIPGVKGIGEKTALKLLKEWGSLENLLKNLDQVKPESVREKILAHLEDLKLSRELSRVRTDLPLEVDFGRRREPDWEGLKAFLERLEFGSLLHEFGLLESPLLAEEAPWPPPEGAFLGYRLSRPEPMWAELLALAASAQGRVYRAEDPHGALRGLFEVRGLLAKDLAVVALREGLDLPPTDDPMLLAYLLDPSNTTPEGVARRYGGEWWEDAAKRALLAERLHENLLGRLQGEERLLWLYEEVEKPLSRVLAHMEATGVKLDVAYLENLSLEVAAHMRRLEEEVFRLAGRSFRLNSRDQLERVLFDELGLPPIGKTEKTGKRSTSAAVLEALREVHPIVDKILQYREMAKLKGTYIDRLPALVHPKTGRLHTRFNQTATATGRLSSSDPNLQNIPVRTFLGQKIRRAFVAEPGWALVALDYRQIELRVLAHLSGDENLIRVFQEGKDIHTQTASWMFGLSAEAIDPLMRRAAKTINFGVLYGMSAFRLSQELGIPYEEAQGFIQKYFQSYPKVKAWIEKTLREGRTRGYVETLFGRRRYVPDLNARVKGKREAAERMAFNMPVQGTAADLMKLAMVRLFPQLREVGARMLLQVHDELLLEAPKERAEEVAALAKEVMEGVWPLAVPLEVEVGIGEDWLAAKG

SEQ ID NO: 5903 - DNA, 2523 bp, synthetic construct
  misc_feature 1..2523: note = Variant of DNA polymerase I from Thermus sp. strain 2.9
  source 1..2523: mol_type = other DNA
atgcaccatcatcatcatcatggcggtagcggcgtgttaccggtgttcgagcctaaaggtcgcgtgcttctggttgatggccatcatctcgcgtatcgtaacttctttgccctgaaaggattaaccaccagcctgggcgagccggtacagggtgtctacggctttgcaaagtcgctcctgaaagctctgaaagaagacggtgatgtggtgattgttgtctttgatgcgaaagcgccaagttttcgccacgaagcgtacgaagcttacaaagccgggcgtgctccaacgccggaagactttcctcgccaattggcgcttatgaaggaattagtggatttgcttggcctcgaacgcttggaagttcccggtttcgaggcagacgacgtattagcgactctcgcaaagaaagccgaacgtgagggctatgaagtccagatcttgacagcagatcgcgatcttttccagcttttatctccgcgcatctcggtgttacacccggaagggcatcgtatcaccccggaatggctctgggagaaatatggtttgcgtcccgaacaatgggtggattttcgcgccttagcaggcgatccgagcgacaatattccgggagttaaaggtatcggcgagaagacggcgctcaagctccttaaagaatgggggtcgttggagaacttgcttaagaatttagatcaggtcaaaccagagtcagtgcgtgagaagattcttgctcacctcgaagacctcaaattaagccgcgaattgtcccgtgtacgcaccgatttgccgctcgaagttgatttcggtcgccgccgcgaacctgactgggagggtcttaaagcgtttttagagcgtcttgaatttggttcgctcttgcatgaattcggccttttagaaagcccgttactggccgaagaagcaccttggccaccgcccgagggcgcgtttttaggttaccgtttgagtcgcccggaaccgatgtgggccgaattactggctcttgcagcgtctgcccagggacgtgtgtatcgcgcggaagaccctcatggtgcgctccgcggcctcttcgaagtccgtaccctccttgccaaagacttagctgttgttgcattgcgcgaaggtcttgatttacctccgactgatgatccaatgcttcttgcgtacctcttggacccgtcaaacacgacgcccgaaggcgtagcccgtcgttacggcggcgagtggtgggaagatgcaggcaaacgcgcgttattggccgaacgtttgcacgaaaatttattaggacgtttgcaaggcgaggaacgtctcctctggctttacgaagaagtggagaaaccattgagtcgcgtgctcgcgcatatggaagctaccggtgtcaaattagacgtggcgtatttggagaatctcagccttgaagttgctgcccacatgcgccgcttggaggaagaagtattccgtttagcaggccgttcctttcgccttaactctcgcgatcagttagaacgtgtgttgttcgatgaacttggtctccctcctatcggcaagacagagaagaccggtaaacgtagcacttcagcggcggttttagaagctcttcgcgaagtccatcccattgtggacaagatcttgcagtaccgcgaaatggcgaaattgaaaggcacctatattgaccgtcttccggcattagtccacccgaaaacgggacgcctccatacccgcttcaaccaaacagccacggcgaccggtcgtttgtcctcctctgatccaaaccttcagaatattccagtacgtaccccattgggccagaagatccgccgtgcgtttgtagctgaggagggttggcgtttagtggccctcgattatcgtcaaattgaattacgtgtccttgcccatctttctggcgatgagaacctcatccgcgtgtttcaggaaggcaaagacattcacactcaaacggcaagctggatgtttggattatcagctgaagcgatcgatcctttgatgcgtcgtgcagcgaagaccatcaatttcggtgttctctacggtatgagtgcctttcgtttgtcgcaggaattaggcattccctatgaagaagctcagggtttcattcagaaatactttcaaagctatcccaaagttaaagcatggatcgagaagactctccgtgaaggccgcacacgtggttacgtagagaccttatttggacgtcgccgctatgttcccgatttaaacggtcgcgtgaaaggcaagcgtgaagccgccgaacgcatggcgttcaacatgcctgtacagggcacggcagctgacctcatgaaacttgcaatggtgcgcctttttccacaattgcgtgaagttggtgcccgcatgctgttgcaggtccacgatgaactcttgttagaagcgccaaaagagcgtgcggaagaggtggcagccctcgcgaaagaagttatggaaggcgtgtggcccttagcggtgcctcttgaagtcgaagttggtattggcgaggattggctggctgccaaagga

SEQ ID NO: 5904 - protein, 841 aa, synthetic construct
  REGION 1..841: note = Variant of DNA polymerase I from Thermus sp. strain 2.9
MHHHHHHGGSGVLPVFEPKGRVLLVDGHHLAYRNFFALKGLTTSLGEPVQGVYGFAKSLLKALKEDGDVVIVVFDAKAPSFRHEAYEAYKAGRAPTPEDFPRQLALMKELVDLLGLERLEVPGFEADDVLATLAKKAEREGYEVQILTADRDLFQLLSPRISVLHPEGHRITPEWLWEKYGLRPEQWVDFRALAGDPSDNIPGVKGIGEKTALKLLKEWGSLENLLKNLDQVKPESVREKILAHLEDLKLSRELSRVRTDLPLEVDFGRRREPDWEGLKAFLERLEFGSLLHEFGLLESPLLAEEAPWPPPEGAFLGYRLSRPEPMWAELLALAASAQGRVYRAEDPHGALRGLFEVRTLLAKDLAVVALREGLDLPPTDDPMLLAYLLDPSNTTPEGVARRYGGEWWEDAGKRALLAERLHENLLGRLQGEERLLWLYEEVEKPLSRVLAHMEATGVKLDVAYLENLSLEVAAHMRRLEEEVFRLAGRSFRLNSRDQLERVLFDELGLPPIGKTEKTGKRSTSAAVLEALREVHPIVDKILQYREMAKLKGTYIDRLPALVHPKTGRLHTRFNQTATATGRLSSSDPNLQNIPVRTPLGQKIRRAFVAEEGWRLVALDYRQIELRVLAHLSGDENLIRVFQEGKDIHTQTASWMFGLSAEAIDPLMRRAAKTINFGVLYGMSAFRLSQELGIPYEEAQGFIQKYFQSYPKVKAWIEKTLREGRTRGYVETLFGRRRYVPDLNGRVKGKREAAERMAFNMPVQGTAADLMKLAMVRLFPQLREVGARMLLQVHDELLLEAPKERAEEVAALAKEVMEGVWPLAVPLEVEVGIGEDWLAAKG

SEQ ID NO: 5905 - DNA, 2523 bp, synthetic construct
  misc_feature 1..2523: note = Variant of DNA polymerase I from Thermus sp. strain 2.9
  source 1..2523: mol_type = other DNA
atgcaccatcatcatcatcatggcggtagcggcgtgttaccggtgttcgagcctaaaggtcgcgtgcttctggttgatggccatcatctcgcgtatcgtaacttctttgccctgaaaggattaaccaccagcctgggcgagccggtacagggtgtctacggctttgcaaagtcgctcctgaaagctctgaaagaagacggtgatgtggtgattgttgtctttgatgcgaaagcgccaagttttcgccacgaagcgtacgaagcttacaaagccgggcgtgctccaacgccggaagactttcctcgccaattggcgcttatgaaggaattagtggatttgcttggcctcgaacgcttggaagttcccggtttcgaggcagacgacgtattagcgactctcgcaaagaaagccgaacgtgagggctatgaagtccagatcttgacagcagatcgcgatcttttccagcttttatctccgcgcatctcggtgttacacccggaagggcatcgtatcaccccggaatggctctgggagaaatatggtttgcgtcccgaacaatgggtggattttcgcgccttagcaggcgatccgagcgacaatattccgggagttaaaggtatcggcgagaagacggcgctcaagctccttaaagaatgggggtcgttggagaacttgcttaagaatttagatcaggtcaaaccagagtcagtgcgtgagaagattcttgctcacctcgaagacctcaaattaagccgcgaattgtcccgtgtacgcaccgatttgccgctcgaagttgatttcggtcgccgccgcgaacctgactgggagggtcttaaagcgtttttagagcgtcttgaatttggttcgctcttgcatgaattcggccttttagaaagcccgttactggccgaagaagcaccttggccaccgcccgagggcgcgtttttaggttaccgtttgagtcgcccggaaccgatgtgggccgaattactggctcttgcagcgtctgcccagggacgtgtgtatcgcgcggaagaccctcatggtgcgctccgcggcctcttcgaagtccgtggactccttgccaaagacttagctgttgttgcattgcgcgaaggtcttgatttacctccgactgatgatccaatgcttcttgcgtacctcttggacccgtcaaacacgacgcccgaaggcgtagcccgtcgttacggcggcgagtggaccgaagatgcagcgaaacgcgcgttattggccgaacgtttgcacgaaaatttattaggacgtttgcaaggcgaggaacgtctcctctggctttacgaagaagtggagaaaccatcgagtcgcgtgctcgcgcatatggaagctaccggtgtcaaattagacgtggcgtatttggagaatctcagccttgaagttgctgcccacatgcgccgcttggaggaagaagtattccgtttagcaggccgttcctttcgccttaactctcgcgatcagttagaacgtgtgttgttcgatgaacttggtctccctcctatcggcaagacagagaagaccggtaaacgtagcacttcagcggcggttttagaagctcttcgcgaagtccatcccattgtggacaagatcttgcagtaccgcgaaatggcgaaattgaaaggcacctatattgaccgtcttccggcattagtccacccgaaaacgggacgcctccatacccgcttcaaccaaacagccacggcgaccggtcgtttgtcctcctctgatccaaaccttcagaatattccagtacgtaccccattgggccagaagatccgccgtgcgtttgtagctgaggagggttggcgtttagtggccctcgattatcgtcaaattgaattacgtgtccttgcccatctttctggcgatgagaacctcatccgcgtgtttcaggaaggcaaagacattcacactcaaacggcaagctggatgtttggattatcagctgaagcgatcgatcctttgatgcgtcgtgcagcgaagaccatcaatttcggtgttctctacggtatgagtgcctttcgtttgtcgcaggaattaggcattccctatgaagaagctcaggcgttcattcagaaatactttcaaagctatcccaaagttaaagcatggatcgagaagactctccgtgaaggccgcacacgtggttacgtagagaccttatttggacgtcgccgctatgttcccgatttaaacgctcgcgtgaaaggcaagcgtgaagccgccgaacgcatggcgttcaacatgcctgtacagggcacggcagctgacctcatgaaacttgcaatggtgcgcctttttccacaattgcgtgaagttggtgcccgcatgctcttgcaggtccacgatgaactcttgttagaagcgccaaaagagcgtgcggaagaggtggcagccctcgcgaaagaagttatggaaggcgtgtggcccttagcggtgcctcttgaagtcgaagttggtattggcgaggattggctggctgccaaagga

SEQ ID NO: 5906 - protein, 841 aa, synthetic construct
  REGION 1..841: note = Variant of DNA polymerase I from Thermus sp. strain 2.9
MHHHHHHGGSGVLPVFEPKGRVLLVDGHHLAYRNFFALKGLTTSLGEPVQGVYGFAKSLLKALKEDGDVVIVVFDAKAPSFRHEAYEAYKAGRAPTPEDFPRQLALMKELVDLLGLERLEVPGFEADDVLATLAKKAEREGYEVQILTADRDLFQLLSPRISVLHPEGHRITPEWLWEKYGLRPEQWVDFRALAGDPSDNIPGVKGIGEKTALKLLKEWGSLENLLKNLDQVKPESVREKILAHLEDLKLSRELSRVRTDLPLEVDFGRRREPDWEGLKAFLERLEFGSLLHEFGLLESPLLAEEAPWPPPEGAFLGYRLSRPEPMWAELLALAASAQGRVYRAEDPHGALRGLFEVRGLLAKDLAVVALREGLDLPPTDDPMLLAYLLDPSNTTPEGVARRYGGEWTEDAAKRALLAERLHENLLGRLQGEERLLWLYEEVEKPSSRVLAHMEATGVKLDVAYLENLSLEVAAHMRRLEEEVFRLAGRSFRLNSRDQLERVLFDELGLPPIGKTEKTGKRSTSAAVLEALREVHPIVDKILQYREMAKLKGTYIDRLPALVHPKTGRLHTRFNQTATATGRLSSSDPNLQNIPVRTPLGQKIRRAFVAEEGWRLVALDYRQIELRVLAHLSGDENLIRVFQEGKDIHTQTASWMFGLSAEAIDPLMRRAAKTINFGVLYGMSAFRLSQELGIPYEEAQAFIQKYFQSYPKVKAWIEKTLREGRTRGYVETLFGRRRYVPDLNARVKGKREAAERMAFNMPVQGTAADLMKLAMVRLFPQLREVGARMLLQVHDELLLEAPKERAEEVAALAKEVMEGVWPLAVPLEVEVGIGEDWLAAKG

SEQ ID NO: 5907 - DNA, 2523 bp, synthetic construct
  misc_feature 1..2523: note = Variant of DNA polymerase I from Thermus sp. strain 2.9
  source 1..2523: mol_type = other DNA
atgcaccatcatcatcatcatggcggtagcggcgtgttaccggtgttcgagcctaaaggtcgcgtgcttctggttgatggccatcatctcgcgtatcgtaacttctttgccctgaaaggattaaccaccagcctgggcgagccggtacagggtgtctacggctttgcaaagtcgctcctgaaagctctgaaagaagacggtgatgtggtgattgttgtctttgatgcgaaagcgccaagttttcgccacgaagcgtacgaagcttacaaagccgggcgtgctccaacgccggaagactttcctcgccaattggcgcttatgaaggaattagtggatttgcttggcctcgaacgcttggaagttcccggtttcgaggcagacgacgtattagcgactctcgcaaagaaagccgaacgtgagggctatgaagtccagatcttgacagcagatcgcgatcttttccagcttttatctccgcgcatctcggtgttacacccggaagggcatcgtatcaccccggaatggctctgggagaaatatggtttgcgtcccgaacaatgggtggattttcgcgccttagcaggcgatccgagcgacaatattccgggagttaaaggtatcggcgagaagacggcgctcaagctccttaaagaatgggggtcgttggagaacttgcttaagaatttagatcaggtcaaaccagagtcagtgcgtgagaagattcttgctcacctcgaagacctcaaattaagccgcgaattgtcccgtgtacgcaccgatttgccgctcgaagttgatttcggtcgccgccgcgaacctgactgggagggtcttaaagcgtttttagagcgtcttgaatttggttcgctcttgcatgaattcggccttttagaaagcccgttactggccgaagaagcaccttggccaccgcccgagggcgcgtttttaggttaccgtttgagtcgcccggaaccgatgtgggccgaattactggctcttgcagcgtctgcccagggacgtgtgtatcgcgcggaagaccctcatggtgcgctccgcggcctcttcgaagtccgtggactccttgccaaagacttagctgttgttgcattgcgcgaaggtcttgatttacctccgactgatgatccaatgcttcttgcgtacctcttggacccgtcaaacacgacgcccgaaggcgtagcccgtcgttacggcggcgagtggaccgaagatgcagcgaaacgcgcgttattggccgaacgtttgcacgaaaatttattaggacgtttgcaaggcgaggaacgtctcctctggctttacgaagaagtggagaaaccattgagtcgcgtgctcgcgcatatggaagctaccggtgtcaaattagacgtggcgtatttggagaatctcagccttgaagttgctgcccacatgcgccgcttggaggaagaagtattccgtttagcaggccgttcctttcgccttaactctcgcgatcagttagaacgtgtgttgttcgatgaacttggtctccctcctatcggcgggacagagaagaccggtaaacgtagcacttcagcggcggttttagaagctcttcgcgaagtccatcccattgtggacaagatcttgcagtaccgcgaaatggcgaaattgaaaggcacctatattgaccgtcttccggcattagtccacccgaaaacgggacgcctccatacccgcttcaaccaaacagccacggcgaccggtcgtttgtcctcctctgatccaaaccttcagaatattccagtacgtaccccattgggccagaagatccgccgtgcgtttgtagctgaggagggttggcgtttagtggccctcgattatcgtcaaattgaattacgtgtccttgcccatctttctggcgatgagaacctcatccgcgtgtttcaggaaggcaaagacattcacactcaaacggcaagctggatgtttggattatcagctgaagcgatcgatcctttgatgcgtcgtgcagcgaagaccatcaatttcggtgttctctacggtatgagtgcctttcgtttgtcgcaggaattaggcattccctatgaagaagctcaggcgttcattcagaaatactttcaaagctatcccaaagttaaagcatggatcgagaagactctccgtgaaggccgcacacgtggttacgtagagaccttatttggacgtcgccgctatgttcccgatttaaacgctcgcgtgaaaggcaagcgtgaagccgccgaacgcatggcgttcaacatgcctgtacagggcacggcagctgacctcatgaaacttgcaatggtgcgcctttttccacaattgcgtgaagttggtgcccgcatgctcttgcaggtccacgatgaactcttgttagaagcgccaaaagagcgtgcggaagaggtggcagccctcgcgaaagaagttatggaaggcgtgtggcccttagcggtgcctcttgaagtcgaagttggtattggcgaggattggctggctgccaaagga

SEQ ID NO: 5908 - protein, 841 aa, synthetic construct
  REGION 1..841: note = Variant of DNA polymerase I from Thermus sp. strain 2.9
MHHHHHHGGSGVLPVFEPKGRVLLVDGHHLAYRNFFALKGLTTSLGEPVQGVYGFAKSLLKALKEDGDVVIVVFDAKAPSFRHEAYEAYKAGRAPTPEDFPRQLALMKELVDLLGLERLEVPGFEADDVLATLAKKAEREGYEVQILTADRDLFQLLSPRISVLHPEGHRITPEWLWEKYGLRPEQWVDFRALAGDPSDNIPGVKGIGEKTALKLLKEWGSLENLLKNLDQVKPESVREKILAHLEDLKLSRELSRVRTDLPLEVDFGRRREPDWEGLKAFLERLEFGSLLHEFGLLESPLLAEEAPWPPPEGAFLGYRLSRPEPMWAELLALAASAQGRVYRAEDPHGALRGLFEVRGLLAKDLAVVALREGLDLPPTDDPMLLAYLLDPSNTTPEGVARRYGGEWTEDAAKRALLAERLHENLLGRLQGEERLLWLYEEVEKPLSRVLAHMEATGVKLDVAYLENLSLEVAAHMRRLEEEVFRLAGRSFRLNSRDQLERVLFDELGLPPIGGTEKTGKRSTSAAVLEALREVHPIVDKILQYREMAKLKGTYIDRLPALVHPKTGRLHTRFNQTATATGRLSSSDPNLQNIPVRTPLGQKIRRAFVAEEGWRLVALDYRQIELRVLAHLSGDENLIRVFQEGKDIHTQTASWMFGLSAEAIDPLMRRAAKTINFGVLYGMSAFRLSQELGIPYEEAQAFIQKYFQSYPKVKAWIEKTLREGRTRGYVETLFGRRRYVPDLNARVKGKREAAERMAFNMPVQGTAADLMKLAMVRLFPQLREVGARMLLQVHDELLLEAPKERAEEVAALAKEVMEGVWPLAVPLEVEVGIGEDWLAAKG

SEQ ID NO: 5909 - DNA, 2523 bp, synthetic construct
  misc_feature 1..2523: note = Variant of DNA polymerase I from Thermus sp. strain 2.9
  source 1..2523: mol_type = other DNA
atgcaccatcatcatcatcatggcggtagcggcgtgttaccggtgttcgagcctaaaggtcgcgtgcttctggttgatggccatcatctcgcgtatcgtaacttctttgccctgaaaggattaaccaccagcctgggcgagccggtacagggtgtctacggctttgcaaagtcgctcctgaaagctctgaaagaagacggtgatgtggtgattgttgtctttgatgcgaaagcgccaagttttcgccacgaagcgtacgaagcttacaaagccgggcgtgctccaacgccggaagactttcctcgccaattggcgcttatgaaggaattagtggatttgcttggcctcgaacgcttggaagttcccggtttcgaggcagacgacgtattagcgactctcgcaaagaaagccgaacgtgagggctatgaagtccagatcttgacagcagatcgcgatcttttccagcttttatctccgcgcatctcggtgttacacccggaagggcatcgtatcaccccggaatggctctgggagaaatatggtttgcgtcccgaacaatgggtggattttcgcgccttagcaggcgatccgagcgacaatattccgggagttaaaggtatcggcgagaagacggcgctcaagctccttaaagaatgggggtcgttggagaacttgcttaagaatttagatcaggtcaaaccagagtcagtgcgtgagaagattcttgctcacctcgaagacctcaaattaagccgcgaattgtcccgtgtacgcaccgatttgccgctcgaagttgatttcggtcgccgccgcgaacctgactgggagggtcttaaagcgtttttagagcgtcttgaatttggttcgctcttgcatgaattcggccttttagaaagcccgttactggccgaagaagcaccttggccaccgcccgagggcgcgtttttaggttaccgtttgagtcgcccggaaccgatgtgggccgaattactggctcttgcagcgtctgcccagggacgtgtgtatcgcgcggaagaccctcatggtgcgctccgcggcctcttcgaagtccgtggactccttgccaaagacttagctgttgttgcattgcgcgaaggtcttgatttacctccgactgatgatccaatgcttcttgcgtacctcttggacccgtcaaacacgacgcccgaaggcgtagcccgtcgttacggcggcgagtggaccgaagatgcagcgaaacgcgcgttattggccgaacgtttgcacgaaaatttattaggacgtttgcaaggcgaggaacgtctcctctggctttacgaagaagtggagaaaccattgagtcgcgtgctcgcgcatatggaagctaccggtgtcaaattagacgtggcgtatttggagaatctcagccttgaagttgctgcccacatgcgccgcttggaggaagaagtattccgtttagcaggccgttcctttcgccttaactctcgcgatcagttagaacgtgtgttgttcgatgaacttggtctccctcctatcggcaagacagagaagaccggtaaacgtagcacttcagcggcggttttagaagctcttcgcgaagtccatcccattgtggacaagatcttgcagtaccgcgaaatggcgaaattgaaaggcacctatattgaccgtcttccggcattagtccacccgaaaacgggacgcctccatacccgcttcaaccaaacagccacggcgaccggtcgtttgtcctcctctgatccaaaccttcagaatattccagtacgtaccccattgggccagaagatccgccgtgcgtttgtagctgaggagggttggcgtttagtggccctcgattatcgtcaaattgaattacgtgtccttgcccatctttctggcgatgagaacctcatccgcgtgtttcaggaaggcaaagacattcacactcaaacggcaagctggatgtttggattatcagctgaagcgatcgatcctttgatgcgtcgtgcagcgaagaccatcaatttcggtgttctctacggtatgagtgcctttcgtttgtcgcaggaattaggcattccctatgaagaagctcaggcgttcattcagaaatactttcaaagctatcccaaagttaaagcatggatcgagaagactctccgtgaaacgcgcacacgtggttacgtagagaccttatttggacgtcgccgctatgttcccgatttaaacgctcgcgtgaaaggcaagcgtgaagccgccgaacgcatggcgttcaacatgcctgtacagggcacggcagctgacctcatgaaacttgcaatggtgcgcctttttccacaattgcgtgaagttggtgcccgcatgctcttgcaggtccacgatgaactcttgttagaagcgccaaaagagcgtgcggaagaggtggcagccctcgcgaaagaagttatggaaggcgtgtggcccttagcggtgcctcttgaagtcgaagttggtattggcgaggattggctggctgccaaagga

SEQ ID NO: 5910 - protein, 841 aa, synthetic construct
  REGION 1..841: note = Variant of DNA polymerase I from Thermus sp. strain 2.9
MHHHHHHGGSGVLPVFEPKGRVLLVDGHHLAYRNFFALKGLTTSLGEPVQGVYGFAKSLLKALKEDGDVVIVVFDAKAPSFRHEAYEAYKAGRAPTPEDFPRQLALMKELVDLLGLERLEVPGFEADDVLATLAKKAEREGYEVQILTADRDLFQLLSPRISVLHPEGHRITPEWLWEKYGLRPEQWVDFRALAGDPSDNIPGVKGIGEKTALKLLKEWGSLENLLKNLDQVKPESVREKILAHLEDLKLSRELSRVRTDLPLEVDFGRRREPDWEGLKAFLERLEFGSLLHEFGLLESPLLAEEAPWPPPEGAFLGYRLSRPEPMWAELLALAASAQGRVYRAEDPHGALRGLFEVRGLLAKDLAVVALREGLDLPPTDDPMLLAYLLDPSNTTPEGVARRYGGEWTEDAAKRALLAERLHENLLGRLQGEERLLWLYEEVEKPLSRVLAHMEATGVKLDVAYLENLSLEVAAHMRRLEEEVFRLAGRSFRLNSRDQLERVLFDELGLPPIGKTEKTGKRSTSAAVLEALREVHPIVDKILQYREMAKLKGTYIDRLPALVHPKTGRLHTRFNQTATATGRLSSSDPNLQNIPVRTPLGQKIRRAFVAEEGWRLVALDYRQIELRVLAHLSGDENLIRVFQEGKDIHTQTASWMFGLSAEAIDPLMRRAAKTINFGVLYGMSAFRLSQELGIPYEEAQAFIQKYFQSYPKVKAWIEKTLRETRTRGYVETLFGRRRYVPDLNARVKGKREAAERMAFNMPVQGTAADLMKLAMVRLFPQLREVGARMLLQVHDELLLEAPKERAEEVAALAKEVMEGVWPLAVPLEVEVGIGEDWLAAKG

SEQ ID NO: 5911 - DNA, 2523 bp, synthetic construct
  misc_feature 1..2523: note = Variant of DNA polymerase I from Thermus sp. strain 2.9
  source 1..2523: mol_type = other DNA
atgcaccatcatcatcatcatggcggtagcggcgtgttaccggtgttcgagcctaaaggtcgcgtgcttctggttgatggccatcatctcgcgtatcgtaacttctttgccctgaaaggattaaccaccagcctgggcgagccggtacagggtgtctacggctttgcaaagtcgctcctgaaagctctgaaagaagacggtgatgtggtgattgttgtctttgatgcgaaagcgccaagttttcgccacgaagcgtacgaagcttacaaagccgggcgtgctccaacgccggaagactttcctcgccaattggcgcttatgaaggaattagtggatttgcttggcctcgaacgcttggaagttcccggtttcgaggcagacgacgtattagcgactctcgcaaagaaagccgaacgtgagggctatgaagtccagatcttgacagcagatcgcgatcttttccagcttttatctccgcgcatctcggtgttacacccggaagggcatcgtatcaccccggaatggctctgggagaaatatggtttgcgtcccgaacaatgggtggattttcgcgccttagcaggcgatccgagcgacaatattccgggagttaaaggtatcggcgagaagacggcgctcaagctccttaaagaatgggggtcgttggagaacttgcttaagaatttagatcaggtcaaaccagagtcagtgcgtgagaagattcttgctcacctcgaagacctcaaattaagccgcgaattgtcccgtgtacgcaccgatttgccgctcgaagttgatttcggtcgccgccgcgaacctgactgggagggtcttaaagcgtttttagagcgtcttgaatttggttcgctcttgcatgaattcggccttttagaaagcccgttactggccgaagaagcaccttggccaccgcccgagggcgcgtttttaggttaccgtttgagtcgcccggaaccgatgtgggccgaattactggctcttgcagcgtctgcccagggacgtgtgtatcgcgcggaagaccctcatggtgcgctccgcggcctcttcgaagtccgtggactccttgccaaagacttagctgttgttgcattgcgcgaaggtcttgatttacctccgactgatgatccaatgcttcttgcgtacctcttggacccgtcaaacacgacgcccgaaggcgtagcccgtcgttacggcggcgagtggaccgaagatgcagcgaaacgcgcgttattggccgaacgtttgcacgaaaatttattaggacgtttgcaaggcgaggaacgtctcctctggctttacgaagaagtggagaaaccattgagtcgcgtgctcgcgcatatggaagctaccggtgtcaaattagacgtggcgtatttggagaatctcagccttgaagttgctgcccacatgcgccgcttggaggaagaagtattccgtttagcaggccgttcctttcgccttaactctcgcgatcagttagaacgtgtgttgttcgatgaacttggtctccctcctatcggcaagacagaggcgaccggtaaacgtagcacttcagcggcggttttagaagctcttcgcgaagtccatcccattgtggacaagatcttgcagtaccgcgaaatggcgaaattgaaaggcacctatattgaccgtcttccggcattagtccacccgaaaacgggacgcctccatacccgcttcaaccaaacagccacggcgaccggtcgtttgtcctcctctgatccaaaccttcagaatattccagtacgtaccccattgggccagaagatccgccgtgcgtttgtagctgaggagggttggcgtttagtggccctcgattatcgtcaaattgaattacgtgtccttgcccatctttctggcgatgagaacctcatccgcgtgtttcaggaaggcaaagacattcacactcaaacggcaagctggatgtttggattatcagctgaagcgatcgatcctttgatgcgtcgtgcagcgaagaccatcaatttcggtgttctctacggtatgagtgcctttcgtttgtcgcaggaattaggcattccctatgaagaagctcaggcgttcattcagaaatactttcaaagctatcccaaagttaaagcatggatcgagaagactctccgtgaaggccgcacacgtggttacgtagagaccttatttggacgtcgccgctatgttcccgatttaaacgctcgcgtgaaaggcaagcgtgaagccgccgaacgcatggcgttcaacatgcctgtacagggcacggcagctgacctcatgaaacttgcaatggtgcgcctttttccacaattgcgtgaagttggtgcccgcatgctcttgcaggtccacgatgaactcttgttagaagcgccaaaagagcgtgcggaagaggtggcagccctcgcgaaagaagttatggaaggcgtgtggcccttagcggtgcctcttgaagtcgaagttggtattggcgaggattggctggctgccaaagga

SEQ ID NO: 5912 - protein, 841 aa, synthetic construct
  REGION 1..841: note = Variant of DNA polymerase I from Thermus sp. strain 2.9
MHHHHHHGGSGVLPVFEPKGRVLLVDGHHLAYRNFFALKGLTTSLGEPVQGVYGFAKSLLKALKEDGDVVIVVFDAKAPSFRHEAYEAYKAGRAPTPEDFPRQLALMKELVDLLGLERLEVPGFEADDVLATLAKKAEREGYEVQILTADRDLFQLLSPRISVLHPEGHRITPEWLWEKYGLRPEQWVDFRALAGDPSDNIPGVKGIGEKTALKLLKEWGSLENLLKNLDQVKPESVREKILAHLEDLKLSRELSRVRTDLPLEVDFGRRREPDWEGLKAFLERLEFGSLLHEFGLLESPLLAEEAPWPPPEGAFLGYRLSRPEPMWAELLALAASAQGRVYRAEDPHGALRGLFEVRGLLAKDLAVVALREGLDLPPTDDPMLLAYLLDPSNTTPEGVARRYGGEWTEDAAKRALLAERLHENLLGRLQGEERLLWLYEEVEKPLSRVLAHMEATGVKLDVAYLENLSLEVAAHMRRLEEEVFRLAGRSFRLNSRDQLERVLFDELGLPPIGKTEATGKRSTSAAVLEALREVHPIVDKILQYREMAKLKGTYIDRLPALVHPKTGRLHTRFNQTATATGRLSSSDPNLQNIPVRTPLGQKIRRAFVAEEGWRLVALDYRQIELRVLAHLSGDENLIRVFQEGKDIHTQTASWMFGLSAEAIDPLMRRAAKTINFGVLYGMSAFRLSQELGIPYEEAQAFIQKYFQSYPKVKAWIEKTLREGRTRGYVETLFGRRRYVPDLNARVKGKREAAERMAFNMPVQGTAADLMKLAMVRLFPQLREVGARMLLQVHDELLLEAPKERAEEVAALAKEVMEGVWPLAVPLEVEVGIGEDWLAAKG

SEQ ID NO: 5913 - DNA, 2523 bp, synthetic construct
  misc_feature 1..2523: note = Variant of DNA polymerase I from Thermus sp. strain 2.9
  source 1..2523: mol_type = other DNA
atgcaccatcatcatcatcatggcggtagcggcgtgttaccggtgttcgagcctaaaggtcgcgtgcttctggttgatggccatcatctcgcgtatcgtaacttctttgccctgaaaggattaaccaccagcctgggcgagccggtacagggtgtctacggctttgcaaagtcgctcctgaaagctctgaaagaagacggtgatgtggtgattgttgtctttgatgcgaaagcgccaagttttcgccacgaagcgtacgaagcttacaaagccgggcgtgctccaacgccggaagactttcctcgccaattggcgcttatgaaggaattagtggatttgcttggcctcgaacgcttggaagttcccggtttcgaggcagacgacgtattagcgactctcgcaaagaaagccgaacgtgagggctatgaagtccagatcttgacagcagatcgcgatcttttccagcttttatctccgcgcatctcggtgttacacccggaagggcatcgtatcaccccggaatggctctgggagaaatatggtttgcgtcccgaacaatgggtggattttcgcgccttagcaggcgatccgagcgacaatattccgggagttaaaggtatcggcgagaagacggcgctcaagctccttaaagaatgggggtcgttggagaacttgcttaagaatttagatcaggtcaaaccagagtcagtgcgtgagaagattcttgctcacctcgaagacctcaaattaagccgcgaattgtcccgtgtacgcaccgatttgccgctcgaagttgatttcggtcgccgccgcgaacctgactgggagggtcttaaagcgtttttagagcgtcttgaatttggttcgctcttgcatgaattcggccttttagaaagcccgttactggccgaagaagcaccttggccaccgcccgagggcgcgtttttaggttaccgtttgagtcgcccggaaccgatgtgggccgaattactggctcttgcagcgtctgcccagggacgtgtgtatcgcgcggaagaccctcatggtgcgctccgcggcctcttcgaagtccgtggcctccttgccaaagacttagctgttgttgcattgcgcgaaggtcttgatttacctccgactgatgatccaatgcttcttgcgtacctcttggacccgtcaaacacgacgcccgaaggcgtagcccgtcgttacggcggcgagtggaccgaagatgcagccaaacgcgcgttattggccgaacgtttgcacgaaaatttattaggacgtttgcaaggcgaggagcgtctcctgtggctttacgaagaagtggagaaaccattgagtcgcgtgctcgcgcatatggaagctaccggtgtcaaattagacgtggcgtatttggagaatctcagccttgaagttgctgcccacatgcgccgcttggaggaagaagtattccgtttagcaggccgttcctttcgccttaactctcgcgatcagttagaacgtgtgttgttcgatgaacttggtctccctcctatcggcaagacagagaagaccggtaaacgtagcacttcagcggcggttttagaagctcttcgcgaagtccatcccattgtggacaagatcttgcagtaccgcgaaatggcgaaattgaaaggcacctatattgaccgtcttccggcattagtccacccgaaaacgggacgcctccatacccgcttcaaccaaacagccacggcgaccggtcgtttgtcctcctctgatccaaaccttcagaatattccagtacgtaccccattgggccagaagatccgccgtgcgtttgtagctgaggagggttggcgtttagtggccctcgattatcgtcaaattgaattacgtgtccttgcccatctttctggcgatgagaacctcatccgcgtgtttcaggaaggcaaagacattcacactcaaacggcaagctggatgtttggattatcagctgaagcgatcgatcctttgatgcgtcgtgcagcgaagaccatcaatttcggtgttctctacggtatgagtgcctttcgtttgtcgcaggaattaggcattcccctggaagaagctcaggctttcattcagaaatactttcaaggctatcccaaagttaaagcatggatcgagaagactctccgtgaaggccgcacacgtggttacgtagagaccttatttggacgtcgccgctatgttcccgatttaaacggtcgcgtgaaaggcaagcgtgaagccgccgaacgcatggcgttcaacatgcctgtacagggcacggcagctgacctcatgaaacttgcaatggtgcgcctttttccacaattgcgtgaagttggtgcccgcatgctgttgcaggtccacgatgaactcttgttagaagcgccaaaagagcgtgcggaagaggtggcagccctcgcgaaagaagttatggaaggcgtgtggcccttagcggtgcctcttgaagtcgaagttggtattggcgaggattggctggctgccaaagga

SEQ ID NO: 5914 - protein, 841 aa, synthetic construct
  REGION 1..841: note = Variant of DNA polymerase I from Thermus sp. strain 2.9
MHHHHHHGGSGVLPVFEPKGRVLLVDGHHLAYRNFFALKGLTTSLGEPVQGVYGFAKSLLKALKEDGDVVIVVFDAKAPSFRHEAYEAYKAGRAPTPEDFPRQLALMKELVDLLGLERLEVPGFEADDVLATLAKKAEREGYEVQILTADRDLFQLLSPRISVLHPEGHRITPEWLWEKYGLRPEQWVDFRALAGDPSDNIPGVKGIGEKTALKLLKEWGSLENLLKNLDQVKPESVREKILAHLEDLKLSRELSRVRTDLPLEVDFGRRREPDWEGLKAFLERLEFGSLLHEFGLLESPLLAEEAPWPPPEGAFLGYRLSRPEPMWAELLALAASAQGRVYRAEDPHGALRGLFEVRGLLAKDLAVVALREGLDLPPTDDPMLLAYLLDPSNTTPEGVARRYGGEWTEDAAKRALLAERLHENLLGRLQGEERLLWLYEEVEKPLSRVLAHMEATGVKLDVAYLENLSLEVAAHMRRLEEEVFRLAGRSFRLNSRDQLERVLFDELGLPPIGKTEKTGKRSTSAAVLEALREVHPIVDKILQYREMAKLKGTYIDRLPALVHPKTGRLHTRFNQTATATGRLSSSDPNLQNIPVRTPLGQKIRRAFVAEEGWRLVALDYRQIELRVLAHLSGDENLIRVFQEGKDIHTQTASWMFGLSAEAIDPLMRRAAKTINFGVLYGMSAFRLSQELGIPLEEAQAFIQKYFQGYPKVKAWIEKTLREGRTRGYVETLFGRRRYVPDLNGRVKGKREAAERMAFNMPVQGTAADLMKLAMVRLFPQLREVGARMLLQVHDELLLEAPKERAEEVAALAKEVMEGVWPLAVPLEVEVGIGEDWLAAKG

SEQ ID NO: 5915 - DNA, 2523 bp, synthetic construct
  misc_feature 1..2523: note = Variant of DNA polymerase I from Thermus sp. strain 2.9
  source 1..2523: mol_type = other DNA
atgcaccatcatcatcatcatggcggtagcggcgtgttaccggtgttcgagcctaaaggtcgcgtgcttctggttgatggccatcatctcgcgtatcgtaacttctttgccctgaaaggattaaccaccagcctgggcgagccggtacagggtgtctacggctttgcaaagtcgctcctgaaagctctgaaagaagacggtgatgtggtgattgttgtctttgatgcgaaagcgccaagttttcgccacgaagcgtacgaagcttacaaagccgggcgtgctccaacgccggaagactttcctcgccaattggcgcttatgaaggaattagtggatttgcttggcctcgaacgcttggaagttcccggtttcgaggcagacgacgtattagcgactctcgcaaagaaagccgaacgtgagggctatgaagtccagatcttgacagcagatcgcgatcttttccagcttttatctccgcgcatctcggtgttacacccggaagggcatcgtatcaccccggaatggctctgggagaaatatggtttgcgtcccgaacaatgggtggattttcgcgccttagcaggcgatccgagcgacaatattccgggagttaaaggtatcggcgagaagacggcgctcaagctccttaaagaatgggggtcgttggagaacttgcttaagaatttagatcaggtcaaaccagagtcagtgcgtgagaagattcttgctcacctcgaagacctcaaattaagccgcgaattgtcccgtgtacgcaccgatttgccgctcgaagttgatttcggtcgccgccgcgaacctgactgggagggtcttaaagcgtttttagagcgtcttgaatttggttcgctcttgcatgaattcggccttttagaaagcccgttactggccgaagaagcaccttggccaccgcccgagggcgcgtttttaggttaccgtttgagtcgcccggaaccgatgtgggccgaattactggctcttgcagcgtctgcccagggacgtgtgtatcgcgcggaagaccctcatggtgcgctccgcggcctcttcgaagtccgtggactccttgccaaagacttagctgttgttgcattgcgcgaaggtcttgatttacctccgactgatgatccaatgcttcttgcgtacctcttggacccgtcaaacacgacgcccgaaggcgtagcccgtcgttacggcggcgagtggaccgaagatgcagcgaaacgcgcgttattggccgaacgtttgcacgaaacgttattaggacgtttgcaaggcgaggaacgtctcctctggctttacgaagaagtggagaaaccattgagtcgcgtgctcgcgcatatggaagctaccggtgtcaaattagacgtggcgtatttggagaatctcagccttgaagttgctgcccacatgcgccgcttggaggaagaagtattccgtttagcaggccgttcctttcgccttaactctcgcgatcagttagaacgtgtgttgttcgatgaacttggtctccctcctatcggcaagacagagaagaccggtaaacgtagcacttcagcggcggttttagaagctcttcgcgaagtccatcccattgtggacaagatcttgcagtaccgcgaaatggcgaaattgaaaggcacctatattgaccgtcttccggcattagtccacccgaaaacgggacgcctccatacccgcttcaaccaaacagccacggcgaccggtcgtttgtcctcctctgatccaaaccttcagaatattccagtacgtaccccattgggccagaagatccgccgtgcgtttgtagctgaggagggttggcgtttagtggccctcgattatcgtcaaattgaattacgtgtccttgcccatctttctggcgatgagaacctcatccgcgtgtttcaggaaggcaaagacattcacactcaaacggcaagctggatgtttggattatcagctgaagcgatcgatcctttgatgcgtcgtgcagcgaagaccatcaatttcggtgttctctacggtatgagtgcctttcgtttgtcgcaggaattaggcattccctatgaagaagctcaggcgttcattcagaaatactttcaaagctatcccaaagttaaagcatggatcgagaagactctccgtgaaggccgcacacgtggttacgtagagaccttatttggacgtcgccgctatgttcccgatttaaacgctcgcgtgaaaggcaagcgtgaagccgccgaacgcatggcgttcaacatgcctgtacagggcacggcagctgacctcatgaaacttgcaatggtgcgcctttttccacaattgcgtgaagttggtgcccgcatgctcttgcaggtccacgatgaactcttgttagaagcgccaaaagagcgtgcggaagaggtggcagccctcgcgaaagaagttatggaaggcgtgtggcccttagcggtgcctcttgaagtcgaagttggtattggcgaggattggctggctgccaaagga

SEQ ID NO: 5916 - protein, 841 aa, synthetic construct
  REGION 1..841: note = Variant of DNA polymerase I from Thermus sp. strain 2.9
MHHHHHHGGSGVLPVFEPKGRVLLVDGHHLAYRNFFALKGLTTSLGEPVQGVYGFAKSLLKALKEDGDVVIVVFDAKAPSFRHEAYEAYKAGRAPTPEDFPRQLALMKELVDLLGLERLEVPGFEADDVLATLAKKAEREGYEVQILTADRDLFQLLSPRISVLHPEGHRITPEWLWEKYGLRPEQWVDFRALAGDPSDNIPGVKGIGEKTALKLLKEWGSLENLLKNLDQVKPESVREKILAHLEDLKLSRELSRVRTDLPLEVDFGRRREPDWEGLKAFLERLEFGSLLHEFGLLESPLLAEEAPWPPPEGAFLGYRLSRPEPMWAELLALAASAQGRVYRAEDPHGALRGLFEVRGLLAKDLAVVALREGLDLPPTDDPMLLAYLLDPSNTTPEGVARRYGGEWTEDAAKRALLAERLHETLLGRLQGEERLLWLYEEVEKPLSRVLAHMEATGVKLDVAYLENLSLEVAAHMRRLEEEVFRLAGRSFRLNSRDQLERVLFDELGLPPIGKTEKTGKRSTSAAVLEALREVHPIVDKILQYREMAKLKGTYIDRLPALVHPKTGRLHTRFNQTATATGRLSSSDPNLQNIPVRTPLGQKIRRAFVAEEGWRLVALDYRQIELRVLAHLSGDENLIRVFQEGKDIHTQTASWMFGLSAEAIDPLMRRAAKTINFGVLYGMSAFRLSQELGIPYEEAQAFIQKYFQSYPKVKAWIEKTLREGRTRGYVETLFGRRRYVPDLNARVKGKREAAERMAFNMPVQGTAADLMKLAMVRLFPQLREVGARMLLQVHDELLLEAPKERAEEVAALAKEVMEGVWPLAVPLEVEVGIGEDWLAAKG

SEQ ID NO: 5917 - DNA, 2523 bp, synthetic construct
  misc_feature 1..2523: note = Variant of DNA polymerase I from Thermus sp. strain 2.9
  source 1..2523: mol_type = other DNA
atgcaccatcatcatcatcatggcggtagcggcgtgttaccggtgttcgagcctaaaggtcgcgtgcttctggttgatggccatcatctcgcgtatcgtaacttctttgccctgaaaggattaaccaccagcctgggcgagccggtacagggtgtctacggctttgcaaagtcgctcctgaaagctctgaaagaagacggtgatgtggtgattgttgtctttgatgcgaaagcgccaagttttcgccacgaagcgtacgaagcttacaaagccgggcgtgctccaacgccggaagactttcctcgccaattggcgcttatgaaggaattagtggatttgcttggcctcgaacgcttggaagttcccggtttcgaggcagacgacgtattagcgactctcgcaaagaaagccgaacgtgagggctatgaagtccagatcttgacagcagatcgcgatcttttccagcttttatctccgcgcatctcggtgttacacccggaagggcatcgtatcaccccggaatggctctgggagaaatatggtttgcgtcccgaacaatgggtggattttcgcgccttagcaggcgatccgagcgacaatattccgggagttaaaggtatcggcgagaagacggcgctcaagctccttaaagaatgggggtcgttggagaacttgcttaagaatttagatcaggtcaaaccagagtcagtgcgtgagaagattcttgctcacctcgaagacctcaaattaagccgcgaattgtcccgtgtacgcaccgatttgccgctcgaagttgatttcggtcgccgccgcgaacctgactgggagggtcttaaagcgtttttagagcgtcttgaatttggttcgctcttgcatgaattcggccttttagaaagcccgttactggccgaagaagcaccttggccaccgcccgagggcgcgtttttaggttaccgtttgagtcgcccggaaccgatgtgggccgaattactgcgtcttgcagcgtctgcccagggacgtgtgtatcgcgcggaagaccctcatggtgcgctccgcggcctcttcgaagtccgtggactccttgccaaagacttagctgttgttgcattgcgcgaaggtcttgatttacctccgactgatgatccaatgcttcttgcgtacctcttggacccgtcaaacacgacgcccgaaggcgtagcccgtcgttacggcggcgagtggaccgaagatgcagcgaaacgcgcgttattggccgaacgtttgcacgaaaatttattaggacgtttgcaaggcgaggaacgtctcctctggctttacgaagaagtggagaaaccattgagtcgcgtgctcgcgcatatggaagctaccggtgtcaaattagacgtggcgtatttggagaatctcagccttgaagttgctgcccacatgcgccgcttggaggaagaagtattccgtttagcaggccgttcctttcgccttaactctcgcgatcagttagaacgtgtgttgttcgatgaacttggtctccctcctatcggcaagacagagaagaccggtaaacgtagcacttcagcggcggttttagaagctcttcgcgaagtccatcccattgtggacaagatcttgcagtaccgcgaaatggcgaaattgaaaggcacctatattgaccgtcttccggcattagtccacccgaaaacgggacgcctccatacccgcttcaaccaaacagccacggcgaccggtcgtttgtcctcctctgatccaaaccttcagaatattccagtacgtaccccattgggccagaagatccgccgtgcgtttgtagctgaggagggttggcgtttagtggccctcgattatcgtcaaattgaattacgtgtccttgcccatctttctggcgatgagaacctcatccgcgtgtttcaggaaggcaaagacattcacactcaaacggcaagctggatgtttggattatcagctgaagcgatcgatcctttgatgcgtcgtgcagcgaagaccatcaatttcggtgttctctacggtatgagtgcctttcgtttgtcgcaggaattaggcattccctatgaagaagctcaggcgttcattcagaaatactttcaaagctatcccaaagttaaagcatggatcgagaagactctccgtgaaggccgcacacgtggttacgtagagaccttatttggacgtcgccgctatgttcccgatttaaacgctcgcgtgaaaggcaagcgtgaagccgccgaacgcatggcgttcaacatgcctgtacagggcacggcagctgacctcatgaaacttgcaatggtgcgcctttttccacaattgcgtgaagttggtgcccgcatgctcttgcaggtccacgatgaactcttgttagaagcgccaaaagagcgtgcggaagaggtggcagccctcgcgaaagaagttatggaaggcgtgtggcccttagcggtgcctcttgaagtcgaagttggtattggcgaggattggctggctgccaaagga

SEQ ID NO: 5918 - protein, 841 aa, synthetic construct
  REGION 1..841: note = Variant of DNA polymerase I from Thermus sp. strain 2.9
MHHHHHHGGSGVLPVFEPKGRVLLVDGHHLAYRNFFALKGLTTSLGEPVQGVYGFAKSLLKALKEDGDVVIVVFDAKAPSFRHEAYEAYKAGRAPTPEDFPRQLALMKELVDLLGLERLEVPGFEADDVLATLAKKAEREGYEVQILTADRDLFQLLSPRISVLHPEGHRITPEWLWEKYGLRPEQWVDFRALAGDPSDNIPGVKGIGEKTALKLLKEWGSLENLLKNLDQVKPESVREKILAHLEDLKLSRELSRVRTDLPLEVDFGRRREPDWEGLKAFLERLEFGSLLHEFGLLESPLLAEEAPWPPPEGAFLGYRLSRPEPMWAELLRLAASAQGRVYRAEDPHGALRGLFEVRGLLAKDLAVVALREGLDLPPTDDPMLLAYLLDPSNTTPEGVARRYGGEWTEDAAKRALLAERLHENLLGRLQGEERLLWLYEEVEKPLSRVLAHMEATGVKLDVAYLENLSLEVAAHMRRLEEEVFRLAGRSFRLNSRDQLERVLFDELGLPPIGKTEKTGKRSTSAAVLEALREVHPIVDKILQYREMAKLKGTYIDRLPALVHPKTGRLHTRFNQTATATGRLSSSDPNLQNIPVRTPLGQKIRRAFVAEEGWRLVALDYRQIELRVLAHLSGDENLIRVFQEGKDIHTQTASWMFGLSAEAIDPLMRRAAKTINFGVLYGMSAFRLSQELGIPYEEAQAFIQKYFQSYPKVKAWIEKTLREGRTRGYVETLFGRRRYVPDLNARVKGKREAAERMAFNMPVQGTAADLMKLAMVRLFPQLREVGARMLLQVHDELLLEAPKERAEEVAALAKEVMEGVWPLAVPLEVEVGIGEDWLAAKG

SEQ ID NO: 5919 - DNA, 2523 bp, synthetic construct
  misc_feature 1..2523: note = Variant of DNA polymerase I from Thermus sp. strain 2.9
  source 1..2523: mol_type = other DNA
atgcaccatcatcatcatcatggcggtagcggcgtgttaccggtgttcgagcctaaaggtcgcgtgcttctggttgatggccatcatctcgcgtatcgtaacttctttgccctgaaaggattaaccaccagcctgggcgagccggtacagggtgtctacggctttgcaaagtcgctcctgaaagctctgaaagaagacggtgatgtggtgattgttgtctttgatgcgaaagcgccaagttttcgccacgaagcgtacgaagcttacaaagccgggcgtgctccaacgccggaagactttcctcgccaattggcgcttatgaaggaattagtggatttgcttggcctcgaacgcttggaagttcccggtttcgaggcagacgacgtattagcgactctcgcaaagaaagccgaacgtgagggctatgaagtccagatcttgacagcagatcgcgatcttttccagcttttatctccgcgcatctcggtgttacacccggaagggcatcgtatcaccccggaatggctctgggagaaatatggtttgcgtcccgaacaatgggtggattttcgcgccttagcaggcgatccgagcgacaatattccgggagttaaaggtatcggcgagaagacggcgctcaagctccttaaagaatgggggtcgttggagaacttgcttaagaatttagatcaggtcaaaccagagtcagtgcgtgagaagattcttgctcacctcgaagacctcaaattaagccgcgaattgtcccgtgtacgcaccgatttgccgctcgaagttgatttcggtcgccgccgcgaacctgactgggagggtcttaaagcgtttttagagcgtcttgaatttggttcgctcttgcatgaattcggccttttagaaagcccgttactggccgaagaagcaccttggccaccgcccgagggcgcgtttttaggttaccgtttgagtcgcccggaaccgatgtgggccgaattactggctcttgcagcgtctgcccagggacgtgtgtatcgcgcggaagaccctcatggtgcgctccgcggcctcttcgaagtccgtggactccttgccaaagacttagctgttgttgcattgcgcgaaggtcttgatttacctccgactgatgatccaatgcttcttgcgtacctcttggacccgtcaaacacgacgcccgaaggcgtagcccgtcgttacggcggcgagtggaccgaagatgcagcgaaacgcgcgttattggccgaacgtttgcacgaaaatttattaggacgtttgcaaggcgaggaacgtctcctctggctttacgaagaagtggagaaaccattgagtcgcgtgctcgcgcatatggaagctaccggtgtcaaattagacgtggcgtatttggagaatctcagccttgaagttgctgcccacatgcgccgcttggaggaagaagtattccgtttagcaggccgttcctttcgccttaactctcgcgatcagttagaacgtgtgttgttcgatgaacttggtctccctcctatcggcaagacagagaagaccggtaaacgtagcacttcagcggcggttttagaagctcttcgcgaagtccatcccattgtggacaagatcttgcagtaccgcgaaatggcgaaattgaaaggcacctatattgaccgtcttccggcattagtccacccgaaaacgggacgcctccatacccgcttcaaccaaacagccacggcgaccggtcgtttgtcctcctctgatccaaaccttcagaatattccagtacgtaccccattgggccagaagatccgccgtgcgtttgtagctgaggagggttggcgtttagtggccctcgattatcgtcaaattgaattacgtgtccttgcccatctttctggcgatgagaacctcatccgcgtgtttcaggaaggcaaagacattcacactcaaacggcaagctggatgtttggattatcagctgaagcgatcgatcctttgatgcgtcgtgcagcgaagaccatcaatttcggtgttctctacggtatgagtgcctttcgtttgtcgcaggaattaggcattccctatgaagaagctcaggcgttcattcagaaatactttcaaagctatcccaaagttaaagcatggatcgagaagactctccgtgaaggccgcgagcgtggttacgtagagaccttatttggacgtcgccgctatgttcccgatttaaacgctcgcgtgaaaggcaagcgtgaagccgccgaacgcatggcgttcaacatgcctgtacagggcacggcagctgacctcatgaaacttgcaatggtgcgcctttttccacaattgcgtgaagttggtgcccgcatgctcttgcaggtccacgatgaactcttgttagaagcgccaaaagagcgtgcggaagaggtggcagccctcgcgaaagaagttatggaaggcgtgtggcccttagcggtgcctcttgaagtcgaagttggtattggcgaggattggctggctgccaaagga

SEQ ID NO: 5920 - protein, 841 aa, synthetic construct
  REGION 1..841: note = Variant of DNA polymerase I from Thermus sp. strain 2.9
MHHHHHHGGSGVLPVFEPKGRVLLVDGHHLAYRNFFALKGLTTSLGEPVQGVYGFAKSLLKALKEDGDVVIVVFDAKAPSFRHEAYEAYKAGRAPTPEDFPRQLALMKELVDLLGLERLEVPGFEADDVLATLAKKAEREGYEVQILTADRDLFQLLSPRISVLHPEGHRITPEWLWEKYGLRPEQWVDFRALAGDPSDNIPGVKGIGEKTALKLLKEWGSLENLLKNLDQVKPESVREKILAHLEDLKLSRELSRVRTDLPLEVDFGRRREPDWEGLKAFLERLEFGSLLHEFGLLESPLLAEEAPWPPPEGAFLGYRLSRPEPMWAELLALAASAQGRVYRAEDPHGALRGLFEVRGLLAKDLAVVALREGLDLPPTDDPMLLAYLLDPSNTTPEGVARRYGGEWTEDAAKRALLAERLHENLLGRLQGEERLLWLYEEVEKPLSRVLAHMEATGVKLDVAYLENLSLEVAAHMRRLEEEVFRLAGRSFRLNSRDQLERVLFDELGLPPIGKTEKTGKRSTSAAVLEALREVHPIVDKILQYREMAKLKGTYIDRLPALVHPKTGRLHTRFNQTATATGRLSSSDPNLQNIPVRTPLGQKIRRAFVAEEGWRLVALDYRQIELRVLAHLSGDENLIRVFQEGKDIHTQTASWMFGLSAEAIDPLMRRAAKTINFGVLYGMSAFRLSQELGIPYEEAQAFIQKYFQSYPKVKAWIEKTLREGRERGYVETLFGRRRYVPDLNARVKGKREAAERMAFNMPVQGTAADLMKLAMVRLFPQLREVGARMLLQVHDELLLEAPKERAEEVAALAKEVMEGVWPLAVPLEVEVGIGEDWLAAKG

SEQ ID NO: 5921 - DNA, 2523 bp, synthetic construct
  misc_feature 1..2523: note = Variant of DNA polymerase I from Thermus sp. strain 2.9
  source 1..2523: mol_type = other DNA
atgcaccatcatcatcatcatggcggtagcggcgtgttaccggtgttcgagcctaaaggtcgcgtgcttctggttgatggccatcatctcgcgtatcgtaacttctttgccctgaaaggattaaccaccagcctgggcgagccggtacagggtgtctacggctttgcaaagtcgctcctgaaagctctgaaagaagacggtgatgtggtgattgttgtctttgatgcgaaagcgccaagttttcgccacgaagcgtacgaagcttacaaagccgggcgtgctccaacgccggaagactttcctcgccaattggcgcttatgaaggaattagtggatttgcttggcctcgaacgcttggaagttcccggtttcgaggcagacgacgtattagcgactctcgcaaagaaagccgaacgtgagggctatgaagtccagatcttgacagcagatcgcgatcttttccagcttttatctccgcgcatctcggtgttacacccggaagggcatcgtatcaccccggaatggctctgggagaaatatggtttgcgtcccgaacaatgggtggattttcgcgccttagcaggcgatccgagcgacaatattccgggagttaaaggtatcggcgagaagacggcgctcaagctccttaaagaatgggggtcgttggagaacttgcttaagaatttagatcaggtcaaaccagagtcagtgcgtgagaagattcttgctcacctcgaagacctcaaattaagccgcgaattgtcccgtgtacgcaccgatttgccgctcgaagttgatttcggtcgccgccgcgaacctgactgggagggtcttaaagcgtttttagagcgtcttgaatttggttcgctcttgcatgaattcggccttttagaaagcccgttactggccgaagaagcaccttggccaccgcccgagggcgcgtttttaggttaccgtttgagtcgcccggaaccgatgtgggccgaattactggctcttgcagcgtctgcccagggacgtgtgtatcgcgcggaagaccctcatggtgcgctccgcggcctcttcgaagtccgtggactccttgccaaagacttagctgttgttgcattgcgcgaaggtcttgatttacctccgactgatgatccaatgcttcttgcgtacctcttggacccgtcaaacacgacgcccgaaggcgtagcccgtcgttacggcggcgagtggaccgaagatgcagcgaaacgcgcgttattggccgaacgtttgcacgaaaattgtttaggacgtttgcaaggcgaggaacgtctcctctggctttacgaagaagtggagaaaccattgagtcgcgtgctcgcgcatatggaagctaccggtgtcaaattagacgtggcgtatttggagaatctcagccttgaagttgctgcccacatgcgccgcttggaggaagaagtattccgtttagcaggccgttcctttcgccttaactctcgcgatcagttagaacgtgtgttgttcgatgaacttggtctccctcctatcggcaagacagagaagaccggtaaacgtagcacttcagcggcggttttagaagctcttcgcgaagtccatcccattgtggacaagatcttgcagtaccgcgaaatggcgaaattgaaaggcacctatattgaccgtcttccggcattagtccacccgaaaacgggacgcctccatacccgcttcaaccaaacagccacggcgaccggtcgtttgtcctcctctgatccaaaccttcagaatattccagtacgtaccccattgggccagaagatccgccgtgcgtttgtagctgaggagggttggcgtttagtggccctcgattatcgtcaaattgaattacgtgtccttgcccatctttctggcgatgagaacctcatccgcgtgtttcaggaaggcaaagacattcacactcaaacggcaagctggatgtttggattatcagctgaagcgatcgatcctttgatgcgtcgtgcagcgaagaccatcaatttcggtgttctctacggtatgagtgcctttcgtttgtcgcaggaattaggcattccctatgaagaagctcaggcgttcattcagaaatactttcaaagctatcccaaagttaaagcatggatcgagaagactctccgtgaaggccgcacacgtggttacgtagagaccttatttggacgtcgccgctatgttcccgatttaaacgctcgcgtgaaaggcaagcgtgaagccgccgaacgcatggcgttcaacatgcctgtacagggcacggcagctgacctcatgaaacttgcaatggtgcgcctttttccacaattgcgtgaagttggtgcccgcatgctcttgcaggtccacgatgaactcttgttagaagcgccaaaagagcgtgcggaagaggtggcagccctcgcgaaagaagttatggaaggcgtgtggcccttagcggtgcctcttgaagtcgaagttggtattggcgaggattggctggctgccaaagga

SEQ ID NO: 5922 - protein, 841 aa, synthetic construct
  REGION 1..841: note = Variant of DNA polymerase I from Thermus sp. strain 2.9
MHHHHHHGGSGVLPVFEPKGRVLLVDGHHLAYRNFFALKGLTTSLGEPVQGVYGFAKSLLKALKEDGDVVIVVFDAKAPSFRHEAYEAYKAGRAPTPEDFPRQLALMKELVDLLGLERLEVPGFEADDVLATLAKKAEREGYEVQILTADRDLFQLLSPRISVLHPEGHRITPEWLWEKYGLRPEQWVDFRALAGDPSDNIPGVKGIGEKTALKLLKEWGSLENLLKNLDQVKPESVREKILAHLEDLKLSRELSRVRTDLPLEVDFGRRREPDWEGLKAFLERLEFGSLLHEFGLLESPLLAEEAPWPPPEGAFLGYRLSRPEPMWAELLALAASAQGRVYRAEDPHGALRGLFEVRGLLAKDLAVVALREGLDLPPTDDPMLLAYLLDPSNTTPEGVARRYGGEWTEDAAKRALLAERLHENCLGRLQGEERLLWLYEEVEKPLSRVLAHMEATGVKLDVAYLENLSLEVAAHMRRLEEEVFRLAGRSFRLNSRDQLERVLFDELGLPPIGKTEKTGKRSTSAAVLEALREVHPIVDKILQYREMAKLKGTYIDRLPALVHPKTGRLHTRFNQTATATGRLSSSDPNLQNIPVRTPLGQKIRRAFVAEEGWRLVALDYRQIELRVLAHLSGDENLIRVFQEGKDIHTQTASWMFGLSAEAIDPLMRRAAKTINFGVLYGMSAFRLSQELGIPYEEAQAFIQKYFQSYPKVKAWIEKTLREGRTRGYVETLFGRRRYVPDLNARVKGKREAAERMAFNMPVQGTAADLMKLAMVRLFPQLREVGARMLLQVHDELLLEAPKERAEEVAALAKEVMEGVWPLAVPLEVEVGIGEDWLAAKG

SEQ ID NO: 5923 - DNA, 2523 bp, synthetic construct
  misc_feature 1..2523: note = Variant of DNA polymerase I from Thermus sp. strain 2.9
  source 1..2523: mol_type = other DNA
atgcaccatcatcatcatcatggcggtagcggcgtgttaccggtgttcgagcctaaaggtcgcgtgcttctggttgatggccatcatctcgcgtatcgtaacttctttgccctgaaaggattaaccaccagcctgggcgagccggtacagggtgtctacggctttgcaaagtcgctcctgaaagctctgaaagaagacggtgatgtggtgattgttgtctttgatgcgaaagcgccaagttttcgccacgaagcgtacgaagcttacaaagccgggcgtgctccaacgccggaagactttcctcgccaattggcgcttatgaaggaattagtggatttgcttggcctcgaacgcttggaagttcccggtttcgaggcagacgacgtattagcgactctcgcaaagaaagccgaacgtgagggctatgaagtccagatcttgacagcagatcgcgatcttttccagcttttatctccgcgcatctcggtgttacacccggaagggcatcgtatcaccccggaatggctctgggagaaatatggtttgcgtcccgaacaatgggtggattttcgcgccttagcaggcgatccgagcgacaatattccgggagttaaaggtatcggcgagaagacggcgctcaagctccttaaagaatgggggtcgttggagaacttgcttaagaatttagatcaggtcaaaccagagtcagtgcgtgagaagattcttgctcacctcgaagacctcaaattaagccgcgaattgtcccgtgtacgcaccgatttgccgctcgaagttgatttcggtcgccgccgcgaacctgactgggagggtcttaaagcgtttttagagcgtcttgaatttggttcgctcttgcatgaattcggccttttagaaagcccgttactggccgaagaagcaccttggccaccgcccgagggcgcgtttttaggttaccgtttgagtcgcccggaaccgatgtgggccgaattactggctcttgcagcgtctgcccagggacgtgtgtatcgcgcggaagaccctcatggtgcgctccgcggcctcttcgaagtccgtggactccttgccaaagacttagctgttgttgcattgcgcgaaggtcttgatttacctccgactgatgatccaatgcttcttgcgtacctcttggacccgtcaaacacgacgcccgaaggcgtagcccgtcgttacattggcgagtggaccgaagatgcagcgaaacgcgcgttattggccgaacgtttgcacgaaaatttattaggacgtttgcaaggcgaggaacgtctcctctggctttacgaagaagtggagaaaccattgagtcgcgtgctcgcgcatatggaagctaccggtgtcaaattagacgtggcgtatttggagaatctcagccttgaagttgctgcccacatgcgccgcttggaggaagaagtattccgtttagcaggccgttcctttcgccttaactctcgcgatcagttagaacgtgtgttgttcgatgaacttggtctccctcctatcggcaagacagagaagaccggtaaacgtagcacttcagcggcggttttagaagctcttcgcgaagtccatcccattgtggacaagatcttgcagtaccgcgaaatggcgaaattgaaaggcacctatattgaccgtcttccggcattagtccacccgaaaacgggacgcctccatacccgcttcaaccaaacagccacggcgaccggtcgtttgtcctcctctgatccaaaccttcagaatattccagtacgtaccccattgggccagaagatccgccgtgcgtttgtagctgaggagggttggcgtttagtggccctcgattatcgtcaaattgaattacgtgtccttgcccatctttctggcgatgagaacctcatccgcgtgtttcaggaaggcaaagacattcacactcaaacggcaagctggatgtttggattatcagctgaagcgatcgatcctttgatgcgtcgtgcagcgaagaccatcaatttcggtgttctctacggtatgagtgcctttcgtttgtcgcaggaattaggcattccctatgaagaagctcaggcgttcattcagaaatactttcaaagctatcccaaagttaaagcatggatcgagaagactctccgtgaaggccgcacacgtggttacgtagagaccttatttggacgtcgccgctatgttcccgatttaaacgctcgcgtgaaaggcaagcgtgaagccgccgaacgcatggcgttcaacatgcctgtacagggcacggcagctgacctcatgaaacttgcaatggtgcgcctttttccacaattgcgtgaagttggtgcccgcatgctcttgcaggtccacgatgaactcttgttagaagcgccaaaagagcgtgcggaagaggtggcagccctcgcgaaagaagttatggaaggcgtgtggcccttagcggtgcctcttgaagtcgaagttggtattggcgaggattggctggctgccaaagga

SEQ ID NO: 5924 - protein, 841 aa, synthetic construct
  REGION 1..841: note = Variant of DNA polymerase I from Thermus sp. strain 2.9
MHHHHHHGGSGVLPVFEPKGRVLLVDGHHLAYRNFFALKGLTTSLGEPVQGVYGFAKSLLKALKEDGDVVIVVFDAKAPSFRHEAYEAYKAGRAPTPEDFPRQLALMKELVDLLGLERLEVPGFEADDVLATLAKKAEREGYEVQILTADRDLFQLLSPRISVLHPEGHRITPEWLWEKYGLRPEQWVDFRALAGDPSDNIPGVKGIGEKTALKLLKEWGSLENLLKNLDQVKPESVREKILAHLEDLKLSRELSRVRTDLPLEVDFGRRREPDWEGLKAFLERLEFGSLLHEFGLLESPLLAEEAPWPPPEGAFLGYRLSRPEPMWAELLALAASAQGRVYRAEDPHGALRGLFEVRGLLAKDLAVVALREGLDLPPTDDPMLLAYLLDPSNTTPEGVARRYIGEWTEDAAKRALLAERLHENLLGRLQGEERLLWLYEEVEKPLSRVLAHMEATGVKLDVAYLENLSLEVAAHMRRLEEEVFRLAGRSFRLNSRDQLERVLFDELGLPPIGKTEKTGKRSTSAAVLEALREVHPIVDKILQYREMAKLKGTYIDRLPALVHPKTGRLHTRFNQTATATGRLSSSDPNLQNIPVRTPLGQKIRRAFVAEEGWRLVALDYRQIELRVLAHLSGDENLIRVFQEGKDIHTQTASWMFGLSAEAIDPLMRRAAKTINFGVLYGMSAFRLSQELGIPYEEAQAFIQKYFQSYPKVKAWIEKTLREGRTRGYVETLFGRRRYVPDLNARVKGKREAAERMAFNMPVQGTAADLMKLAMVRLFPQLREVGARMLLQVHDELLLEAPKERAEEVAALAKEVMEGVWPLAVPLEVEVGIGEDWLAAKG

SEQ ID NO: 5925 - DNA, 2523 bp, synthetic construct
  misc_feature 1..2523: note = Variant of DNA polymerase I from Thermus sp. strain 2.9
  source 1..2523: mol_type = other DNA
atgcaccatcatcatcatcatggcggtagcggcgtgttaccggtgttcgagcctaaaggtcgcgtgcttctggttgatggccatcatctcgcgtatcgtaacttctttgccctgaaaggattaaccaccagcctgggcgagccggtacagggtgtctacggctttgcaaagtcgctcctgaaagctctgaaagaagacggtgatgtggtgattgttgtctttgatgcgaaagcgccaagttttcgccacgaagcgtacgaagcttacaaagccgggcgtgctccaacgccggaagactttcctcgccaattggcgcttatgaaggaattagtggatttgcttggcctcgaacgcttggaagttcccggtttcgaggcagacgacgtattagcgactctcgcaaagaaagccgaacgtgagggctatgaagtccagatcttgacagcagatcgcgatcttttccagcttttatctccgcgcatctcggtgttacacccggaagggcatcgtatcaccccggaatggctctgggagaaatatggtttgcgtcccgaacaatgggtggattttcgcgccttagcaggcgatccgagcgacaatattccgggagttaaaggtatcggcgagaagacggcgctcaagctccttaaagaatgggggtcgttggagaacttgcttaagaatttagatcaggtcaaaccagagtcagtgcgtgagaagattcttgctcacctcgaagacctcaaattaagccgcgaattgtcccgtgtacgcaccgatttgccgctcgaagttgatttcggtcgccgccgcgaacctgactgggagggtcttaaagcgtttttagagcgtcttgaatttggttcgctcttgcatgaattcggccttttagaaagcccgttactggccgaagaagcaccttggccaccgcccgagggcgcgtttttaggttaccgtttgagtcgcccggaaccgatgtgggccgaattactggctcttgcagcgtctgcccagggacgtgtgtatcgcgcggaagaccctcatggtgcgctccgcggcctcttcgaagtccgtggactccttgccaaagacttagctgttgttgcattgcgcgaaggtcttgatttacctccgactgatgatccaatgcttcttgcgtacctcttggacccgtcaaacacgacgcccgaaggcgtagcccgtcgttacggcggcgagtggaccgaagatgcagcgaaacgcgcgttattggccgaacgtttgcacgaaaatttattaggacgtttgcaaggcgaggaacgtctcctctggctttacgaagaagtggagaaaccattgagtcgcgtgctcgcgcatatggaagctaccggtgtcaaattagacgtggcgtatttggagaatctcagccttgaagttgctgcccacatgcgccgcttggaggaagaagtattccgtttagcaggccgttcctttcgccttaactctcgcgatcagttagaacgtgtgttgttcgatgaacttggtctccctcctatcggcaagacagagaagaccggtaaacgtagcacttcagcggcggttttagaagctcttcgcgaagtccatcccattgtggacaagatcttgcagtaccgcgaaatggcgaaattgaaaggcacctatattgaccgtcttccggcattagtccacccgaaaacgggacgcctccatacccgcttcaaccaaacagccacggcgaccggtcgtttgtcctcctctgatccaaaccttcagaatattccagtacgtaccccattgggccagtctatccgccgtgcgtttgtagctgaggagggttggcgtttagtggccctcgattatcgtcaaattgaattacgtgtccttgcccatctttctggcgatgagaacctcatccgcgtgtttcaggaaggcaaagacattcacactcaaacggcaagctggatgtttggattatcagctgaagcgatcgatcctttgatgcgtcgtgcagcgaagaccatcaatttcggtgttctctacggtatgagtgcctttcgtttgtcgcaggaattaggcattccctatgaagaagctcaggcgttcattcagaaatactttcaaagctatcccaaagttaaagcatggatcgagaagactctccgtgaaggccacacacgtggttacgtagagaccttatttggacgtcgccgctatgttcccgatttaaacgctcgcgtgaaaggcaagcgtgaagccgccgaacgcatggcgttcaacatgcctgtacagggcacggcagctgacctcatgaaacttgcaatggtgcgcctttttccacaattgcgtgaagttggtgcccgcatgctcttgcaggtccacgatgaactcttgttagaagcgccaaaagagcgtgcggaagaggtggcagccctcgcgaaagaagttatggaaggcgtgtggcccttagcggtgcctcttgaagtcgaagttggtattggcgaggattggctggctgccaaagga

SEQ ID NO: 5926 - protein, 841 aa, synthetic construct
  REGION 1..841: note = Variant of DNA polymerase I from Thermus sp. strain 2.9
MHHHHHHGGSGVLPVFEPKGRVLLVDGHHLAYRNFFALKGLTTSLGEPVQGVYGFAKSLLKALKEDGDVVIVVFDAKAPSFRHEAYEAYKAGRAPTPEDFPRQLALMKELVDLLGLERLEVPGFEADDVLATLAKKAEREGYEVQILTADRDLFQLLSPRISVLHPEGHRITPEWLWEKYGLRPEQWVDFRALAGDPSDNIPGVKGIGEKTALKLLKEWGSLENLLKNLDQVKPESVREKILAHLEDLKLSRELSRVRTDLPLEVDFGRRREPDWEGLKAFLERLEFGSLLHEFGLLESPLLAEEAPWPPPEGAFLGYRLSRPEPMWAELLALAASAQGRVYRAEDPHGALRGLFEVRGLLAKDLAVVALREGLDLPPTDDPMLLAYLLDPSNTTPEGVARRYGGEWTEDAAKRALLAERLHENLLGRLQGEERLLWLYEEVEKPLSRVLAHMEATGVKLDVAYLENLSLEVAAHMRRLEEEVFRLAGRSFRLNSRDQLERVLFDELGLPPIGKTEKTGKRSTSAAVLEALREVHPIVDKILQYREMAKLKGTYIDRLPALVHPKTGRLHTRFNQTATATGRLSSSDPNLQNIPVRTPLGQSIRRAFVAEEGWRLVALDYRQIELRVLAHLSGDENLIRVFQEGKDIHTQTASWMFGLSAEAIDPLMRRAAKTINFGVLYGMSAFRLSQELGIPYEEAQAFIQKYFQSYPKVKAWIEKTLREGHTRGYVETLFGRRRYVPDLNARVKGKREAAERMAFNMPVQGTAADLMKLAMVRLFPQLREVGARMLLQVHDELLLEAPKERAEEVAALAKEVMEGVWPLAVPLEVEVGIGEDWLAAKG

SEQ ID NO: 5927 - DNA, 2523 bp, synthetic construct
  misc_feature 1..2523: note = Variant of DNA polymerase I from Thermus sp. strain 2.9
  source 1..2523: mol_type = other DNA
atgcaccatcatcatcatcatggcggtagcggcgtgttaccggtgttcgagcctaaaggtcgcgtgcttctggttgatggccatcatctcgcgtatcgtaacttctttgccctgaaaggattaaccaccagcctgggcgagccggtacagggtgtctacggctttgcaaagtcgctcctgaaagctctgaaagaagacggtgatgtggtgattgttgtctttgatgcgaaagcgccaagttttcgccacgaagcgtacgaagcttacaaagccgggcgtgctccaacgccggaagactttcctcgccaattggcgcttatgaaggaattagtggatttgcttggcctcgaacgcttggaagttcccggtttcgaggcagacgacgtattagcgactctcgcaaagaaagccgaacgtgagggctatgaagtccagatcttgacagcagatcgcgatcttttccagcttttatctccgcgcatctcggtgttacacccggaagggcatcgtatcaccccggaatggctctgggagaaatatggtttgcgtcccgaacaatgggtggattttcgcgccttagcaggcgatccgagcgacaatattccgggagttaaaggtatcggcgagaagacggcgctcaagctccttaaagaatgggggtcgttggagaacttgcttaagaatttagatcaggtcaaaccagagtcagtgcgtgagaagattcttgctcacctcgaagacctcaaattaagccgcgaattgtcccgtgtacgcaccgatttgccgctcgaagttgatttcggtcgccgccgcgaacctgactgggagggtcttaaagcgtttttagagcgtcttgaatttggttcgctcttgcatgaattcggccttttagaaagcccgttactggccgaagaagcaccttggccaccgcccgagggcgcgtttttaggttaccgtttgagtcgcccggaaccgatgtgggccgaattactggctcttgcagcgtctgcccagggacgtgtgtatcgcgcggaagaccctcatggtgcgctccgcggcctcttcgaagtccgtggactccttgccaaagacttagctgttgttgcattgcgcgaaggtcttgatttacctccgactgatgatccaatgcttcttgcgtacctcttggacccgtcagcgacgacgcccgaaggcgtagcccgtcgttacggcggcgagtggaccgaagatgcagcgaaacgcgcgttattggccgaacgtttgcacgaaaatttattaggacgtttgcaaggcgaggaacgtctcctctggctttacgaagaagtggagaaaccattgagtcgcgtgctcgcgcatatggaagctaccggtgtcaaattagacgtggcgtatttggagaatctcagccttgaagttgctgcccacatgcgccgcttggaggaagaagtattccgtttagcaggccgttcctttcgccttaactctcgcgatcagttagaacgtgtgttgttcgatgaacttggtctccctcctatcggcaagacagagaagaccggtaaacgtagcacttcagcggcggttttagaagctcttcgcgaagtccatcccattgtggacaagatcttgcagtaccgcgaaatggcgaaattgaaaggcacctatattgaccgtcttccggcattagtccacccgaaaacgggacgcctccatacccgcttcaaccaaacagccacggcgaccggtcgtttgtcctcctctgatccaaaccttcagaatattccagtacgtaccccattgggccagaagatccgccgtgcgtttgtagctgaggagggttggcgtttagtggccctcgattatcgtcaaattgaattacgtgtccttgcccatctttctggcgatgagaacctcatccgcgtgtttcaggaaggcaaagacattcacactcaaacggcaagctggatgtttggattatcagctgaagcgatcgatcctttgatgcgtcgtgcagcgaagaccatcaatttcggtgttctctacggtatgagtgcctttcgtttgtcgcaggaattaggcattccctatgaagaagctcaggcgttcattcagaaatactttcaaagctatcccaaagttaaagcatggatcgagaagactctccgtgaaggccgcacacgtggttacgtagagaccttatttggacgtcgccgctatgttcccgatttaaacgctcgcgtgaaaggcaagcgtgaagccgccgaacgcatggcgttcaacatgcctgtacagggcacggcagctgacctcatgaaacttgcaatggtgcgcctttttccacaattgcgtgaagttggtgcccgcatgctcttgcaggtccacgatgaactcttgttagaagcgccaaaagagcgtgcggaagaggtggcagccctcgcgaaagaagttatggaaggcgtgtggcccttagcggtgcctcttgaagtcgaagttggtattggcgaggattggctggctgccaaagga

SEQ ID NO: 5928 - protein, 841 aa, synthetic construct
  REGION 1..841: note = Variant of DNA polymerase I from Thermus sp. strain 2.9
MHHHHHHGGSGVLPVFEPKGRVLLVDGHHLAYRNFFALKGLTTSLGEPVQGVYGFAKSLLKALKEDGDVVIVVFDAKAPSFRHEAYEAYKAGRAPTPEDFPRQLALMKELVDLLGLERLEVPGFEADDVLATLAKKAEREGYEVQILTADRDLFQLLSPRISVLHPEGHRITPEWLWEKYGLRPEQWVDFRALAGDPSDNIPGVKGIGEKTALKLLKEWGSLENLLKNLDQVKPESVREKILAHLEDLKLSRELSRVRTDLPLEVDFGRRREPDWEGLKAFLERLEFGSLLHEFGLLESPLLAEEAPWPPPEGAFLGYRLSRPEPMWAELLALAASAQGRVYRAEDPHGALRGLFEVRGLLAKDLAVVALREGLDLPPTDDPMLLAYLLDPSATTPEGVARRYGGEWTEDAAKRALLAERLHENLLGRLQGEERLLWLYEEVEKPLSRVLAHMEATGVKLDVAYLENLSLEVAAHMRRLEEEVFRLAGRSFRLNSRDQLERVLFDELGLPPIGKTEKTGKRSTSAAVLEALREVHPIVDKILQYREMAKLKGTYIDRLPALVHPKTGRLHTRFNQTATATGRLSSSDPNLQNIPVRTPLGQKIRRAFVAEEGWRLVALDYRQIELRVLAHLSGDENLIRVFQEGKDIHTQTASWMFGLSAEAIDPLMRRAAKTINFGVLYGMSAFRLSQELGIPYEEAQAFIQKYFQSYPKVKAWIEKTLREGRTRGYVETLFGRRRYVPDLNARVKGKREAAERMAFNMPVQGTAADLMKLAMVRLFPQLREVGARMLLQVHDELLLEAPKERAEEVAALAKEVMEGVWPLAVPLEVEVGIGEDWLAAKG

SEQ ID NO: 5929 - DNA, 2523 bp, synthetic construct
  misc_feature 1..2523: note = Variant of DNA polymerase I from Thermus sp. strain 2.9
  source 1..2523: mol_type = other DNA
atgcaccatcatcatcatcatggcggtagcggcgtgttaccggtgttcgagcctaaaggtcgcgtgcttctggttgatggccatcatctcgcgtatcgtaacttctttgccctgaaaggattaaccaccagcctgggcgagccggtacagggtgtctacggctttgcaaagtcgctcctgaaagctctgaaagaagacggtgatgtggtgattgttgtctttgatgcgaaagcgccaagttttcgccacgaagcgtacgaagcttacaaagccgggcgtgctccaacgccggaagactttcctcgccaattggcgcttatgaaggaattagtggatttgcttggcctcgaacgcttggaagttcccggtttcgaggcagacgacgtattagcgactctcgcaaagaaagccgaacgtgagggctatgaagtccagatcttgacagcagatcgcgatcttttccagcttttatctccgcgcatctcggtgttacacccggaagggcatcgtatcaccccggaatggctctgggagaaatatggtttgcgtcccgaacaatgggtggattttcgcgccttagcaggcgatccgagcgacaatattccgggagttaaaggtatcggcgagaagacggcgctcaagctccttaaagaatgggggtcgttggagaacttgcttaagaatttagatcaggtcaaaccagagtcagtgcgtgagaagattcttgctcacctcgaagacctcaaattaagccgcgaattgtcccgtgtacgcaccgatttgccgctcgaagttgatttcggccgccgccgcgaacctgactgggagggtcttaaagcgtttttagagcgtcttgaatttggttcgctcttgcatgaattcggccttttagaaagcccgttaccggccgaagaagcaccttggccaccgcccgagggcgcgtttttaggttaccgtttgagtcgcccggaaccgatgtgggccgaattactggctcttgcagcgtctgcccagggacgtgtgtatcgcgcggaagaccctcatggtgcgctccgcggcctcttcgaagtccgtggactccttgccaaagacttagctgttgttgcattgcgcgaaggtcttgatttacctccgactgatgatccaatgcttcttgcgtacctcttggacccgtcaaacacgacgcccgaaggcgtagcccgtcgttacggcggcgagtggaccgaagatgcagcgaaacgcgcgttattggccgaacgtttgcacgaaaatttattaggacgtttgcaaggcgaggaacgtctcctctggctttacgaagaagtggagaaaccattgagtcgcgtgctcgcgcatatggaagctaccggtgtcaaattagacgtggcgtatttggaggcccttagccttgaagttgctgcccacatgcgccgcttggaggaagaagtattccgtttagcaggccgttcctttcgccttaactctcgcgatcagttagaacgtgtgttgttcgatgaacttggtctccctcctatcggcaagacagagaagaccggtaaacgtagcacttcagcggcggttttagaagctcttcgcgaagtccatcccattgtggacaagatcttgcagtaccgcgaaatggcgaaattgaaaggcacctatattgaccgtcttccggcattagtccacccgaaaacgggacgcctccatacccgcttcaaccaaacagccacggcgaccggtcgtttgtcctcctctgatccaaaccttcagaatattccagtacgtaccccattgggccagaagatccgccgtgcgtttgtagctgaggagggttggcgtttagtggccctcgattatagtcaaattgaattacgtgtccttgcccatctttctggcgatgagaacctcatccgcgtgtttcaggaaggcaaagacattcacactcaaacggcaagctggatgtttggattatcagctgaagcgatcgatcctttgatgcgtcgtgcagcgaagaccatcaatttcggtgttctctacggtatgagtgcctttcgtttgtcgcaggaattaggcattccctatgaagaagctcaggcgttcattcagaaatactttcaaagctatcccaaagttaaagcatggatcgagaagactctccgcgaaggccgcacacgtggttacgtagagaccttatttggacgtcgccgctatgttcccgatttaaacgctcgcgtgaaaggcaagcgtgaagccgccgaacgcatggcgttcaacatgcctgtacagggcacggcagctgacctcatgaaacttgcaatggtgcgcctttttccacaattgcgtgaagttggtgcccgcatgctcttgcaggtccacgatgaactcttgttagaagcgccaaaagagcgtgcggaagaggtggcagccctcgcgaaagaagttatggaaggcgtgtggcccttagcggtgcctcttgaagtcgaagttggtattggcgaggattggctggctgccaaagga

SEQ ID NO: 5930 - protein, 841 aa, synthetic construct
  REGION 1..841: note = Variant of DNA polymerase I from Thermus sp. strain 2.9
MHHHHHHGGSGVLPVFEPKGRVLLVDGHHLAYRNFFALKGLTTSLGEPVQGVYGFAKSLLKALKEDGDVVIVVFDAKAPSFRHEAYEAYKAGRAPTPEDFPRQLALMKELVDLLGLERLEVPGFEADDVLATLAKKAEREGYEVQILTADRDLFQLLSPRISVLHPEGHRITPEWLWEKYGLRPEQWVDFRALAGDPSDNIPGVKGIGEKTALKLLKEWGSLENLLKNLDQVKPESVREKILAHLEDLKLSRELSRVRTDLPLEVDFGRRREPDWEGLKAFLERLEFGSLLHEFGLLESPLPAEEAPWPPPEGAFLGYRLSRPEPMWAELLALAASAQGRVYRAEDPHGALRGLFEVRGLLAKDLAVVALREGLDLPPTDDPMLLAYLLDPSNTTPEGVARRYGGEWTEDAAKRALLAERLHENLLGRLQGEERLLWLYEEVEKPLSRVLAHMEATGVKLDVAYLEALSLEVAAHMRRLEEEVFRLAGRSFRLNSRDQLERVLFDELGLPPIGKTEKTGKRSTSAAVLEALREVHPIVDKILQYREMAKLKGTYIDRLPALVHPKTGRLHTRFNQTATATGRLSSSDPNLQNIPVRTPLGQKIRRAFVAEEGWRLVALDYSQIELRVLAHLSGDENLIRVFQEGKDIHTQTASWMFGLSAEAIDPLMRRAAKTINFGVLYGMSAFRLSQELGIPYEEAQAFIQKYFQSYPKVKAWIEKTLREGRTRGYVETLFGRRRYVPDLNARVKGKREAAERMAFNMPVQGTAADLMKLAMVRLFPQLREVGARMLLQVHDELLLEAPKERAEEVAALAKEVMEGVWPLAVPLEVEVGIGEDWLAAKG

SEQ ID NO: 5931 - DNA, 2523 bp, synthetic construct
  misc_feature 1..2523: note = Variant of DNA polymerase I from Thermus sp. strain 2.9
  source 1..2523: mol_type = other DNA
atgcaccatcatcatcatcatggcggtagcggcgtgttaccggtgttcgagcctaaaggtcgcgtgcttctggttgatggccatcatctcgcgtatcgtaacttctttgccctgaaaggattaaccaccagcctgggcgagccggtacagggtgtctacggctttgcaaagtcgctcctgaaagctctgaaagaagacggtgatgtggtgattgttgtctttgatgcgaaagcgccaagttttcgccacgaagcgtacgaagcttacaaagccgggcgtgctccaacgccggaagactttcctcgccaattggcgcttatgaaggaattagtggatttgcttggcctcgaacgcttggaagttcccggtttcgaggcagacgacgtattagcgactctcgcaaagaaagccgaacgtgagggctatgaagtccagatcttgacagcagatcgcgatcttttccagcttttatctccgcgcatctcggtgttacacccggaagggcatcgtatcaccccggaatggctctgggagaaatatggtttgcgtcccgaacaatgggtggattttcgcgccttagcaggcgatccgagcgacaatattccgggagttaaaggtatcggcgagaagacggcgctcaagctccttaaagaatgggggtcgttggagaacttgcttaagaatttagatcaggtcaaaccagagtcagtgcgtgagaagattcttgctcacctcgaagacctcaaattaagccgcgaattgtcccgtgtacgcaccgatttgccgctcgaagttgatttcggccgccgccgcgaacctgactgggagggtcttaaagcgtttttagagcgtcttgaatttggttcgctcttgcatgaattcggccttttagaaagcccgttactggccgaagaagcaccttggccaccgcccgagggcgcgtttttaggttaccgtttgagtcgcccggaaccgatgtgggccgaattactggctcttgcagcgtctgcccagggacgtgtgtatcgcgcggaagaccctcatggtgcgctccgcggcctcttcgaagtccgtggactccttgccaaagacttagctgttgttgcattgcgcgaaggtcttgatttacctccgactgatgatccaatgcttcttgcgtacctcttggacccgtcaaacacgacgcccgaaggcgtagcccgtcgttacggcggcgagtggaccgaagatgcagcgaaacgcgcgttattggccgaacgtttgcacgcaaatttattaggacgtttgcaaggcgaggaacgtctcctctggctttacgaagaagtggagaaaccattgagtcgcgtgctcgcgcatatggaagctaccggtgtcaaattagacgtggcgtatttggaggcccttcaccttgaagttgctgcccacatgcgccgcttggaggaagaagtattccgtttagcaggccgttcctttcgccttaactctcgcgatcagttagaacgtgtgttgttcgatgaacttggtctccctcctatcggcaagacagagaagaccggtaaacgtagcacttcagcggcggttttagaagctcttcgcgaagtccatcccattgtggacaagatcttgcagtaccgcgaaatggcgaaattgaaaggcacctatattgaccgtcttccggcattagtccacccgaaaacgggacgcctccatacccgcttcaaccaaacagccacggcgaccggtcgtttgtcctcctctgatccaaaccttcagaatattccagtacgtaccccattgggccagaagatccgccgtgcgtttgtagctgaggagggttggcgtttagtggccctcgattatcgtcaaattgaattacgtgtccttgcccatctttctggcgatgagaacctcatccgcgtgtttcaggaaggcaaagacattcacactcaaacggcaagctggatgtttggattatcagctgaagcgatcgatcctttgatgcgtcgtgcagcgaagaccatcaatttcggtgttctctacggtatgagtgcctttcgtttgtcgcaggaattaggcattccctatgaagaagctcaggcgttcattcagaaatactttcaaagctatcccaaagttaaagcatggatcgagaagactctccgcgaaggccgcacacgtggttacgtagagaccttatttggacgtcgccgctatgttcccgatttaaacgctcgcgtgaaaggcaagcgtgaagccgccgaacgcatggcgttcaacatgcctgtacagggcacggcagctgacctcatgaaacttgcaatggtgcgcctttttccacaattgcgtgaagttggtgcccgcatgctcttgcaggtccacgatgaactcttgttagaagcgccaaaagagcgtgcggaagaggtggcagccctcgcgaaagaagttatggaaggcgtgtggcccttagcggtgcctcttgaagtcgaagttggtattggcgaggattggctggctgccaaagga

SEQ ID NO: 5932 - protein, 841 aa, synthetic construct
  REGION 1..841: note = Variant of DNA polymerase I from Thermus sp. strain 2.9
MHHHHHHGGSGVLPVFEPKGRVLLVDGHHLAYRNFFALKGLTTSLGEPVQGVYGFAKSLLKALKEDGDVVIVVFDAKAPSFRHEAYEAYKAGRAPTPEDFPRQLALMKELVDLLGLERLEVPGFEADDVLATLAKKAEREGYEVQILTADRDLFQLLSPRISVLHPEGHRITPEWLWEKYGLRPEQWVDFRALAGDPSDNIPGVKGIGEKTALKLLKEWGSLENLLKNLDQVKPESVREKILAHLEDLKLSRELSRVRTDLPLEVDFGRRREPDWEGLKAFLERLEFGSLLHEFGLLESPLLAEEAPWPPPEGAFLGYRLSRPEPMWAELLALAASAQGRVYRAEDPHGALRGLFEVRGLLAKDLAVVALREGLDLPPTDDPMLLAYLLDPSNTTPEGVARRYGGEWTEDAAKRALLAERLHANLLGRLQGEERLLWLYEEVEKPLSRVLAHMEATGVKLDVAYLEALHLEVAAHMRRLEEEVFRLAGRSFRLNSRDQLERVLFDELGLPPIGKTEKTGKRSTSAAVLEALREVHPIVDKILQYREMAKLKGTYIDRLPALVHPKTGRLHTRFNQTATATGRLSSSDPNLQNIPVRTPLGQKIRRAFVAEEGWRLVALDYRQIELRVLAHLSGDENLIRVFQEGKDIHTQTASWMFGLSAEAIDPLMRRAAKTINFGVLYGMSAFRLSQELGIPYEEAQAFIQKYFQSYPKVKAWIEKTLREGRTRGYVETLFGRRRYVPDLNARVKGKREAAERMAFNMPVQGTAADLMKLAMVRLFPQLREVGARMLLQVHDELLLEAPKERAEEVAALAKEVMEGVWPLAVPLEVEVGIGEDWLAAKG

SEQ ID NO: 5933 - DNA, 2523 bp, synthetic construct
  misc_feature 1..2523: note = Variant of DNA polymerase I from Thermus sp. strain 2.9
  source 1..2523: mol_type = other DNA
atgcaccatcatcatcatcatggcggtagcggcgtgttaccggtgttcgagcctaaaggtcgcgtgcttctggttgatggccatcatctcgcgtatcgtaacttctttgccctgaaaggattaaccaccagcctgggcgagccggtacagggtgtctacggctttgcaaagtcgctcctgaaagctctgaaagaagacggtgatgtggtgattgttgtctttgatgcgaaagcgccaagttttcgccacgaagcgtacgaagcttacaaagccgggcgtgctccaacgccggaagactttcctcgccaattggcgcttatgaaggaattagtggatttgcttggcctcgaacgcttggaagttcccggtttcgaggcagacgacgtattagcgactctcgcaaagaaagccgaacgtgagggctatgaagtccagatcttgacagcagatcgcgatcttttccagcttttatctccgcgcatctcggtgttacacccggaagggcatcgtatcaccccggaatggctctgggagaaatatggtttgcgtcccgaacaatgggtggattttcgcgccttagcaggcgatccgagcgacaatattccgggagttaaaggtatcggcgagaagacggcgctcaagctccttaaagaatgggggtcgttggagaacttgcttaagaatttagatcaggtcaaaccagagtcagtgcgtgagaagattcttgctcacctcgaagacctcaaattaagccgcgaattgtcccgtgtacgcaccgatttgccgctcgaagttgatttcggtcgccgccgcgaacctgactgggagggtcttaaagcgtttttagagcgtcttgaatttggttcgctcttgcatgaattcggccttttagaaagcccgttactggccgaagaagcaccttggccaccgcccgagggcgcgtttttaggttaccgtttgagtcgcccggaaccgatgtgggccgaattactggctcttgcagcgtctgcccagggacgtgtgtatcgcgcggaagaccctcatggtgcgctccgcggcctcttcgaagtccgtaccctccttgccaaagacttagctgttgttgcattgcgcgaaggtcttgatttacctccgactgatgatccaatgcttcttgcgtacctcttggacccgtcaaacacgacgcccgaaggcgtagcccgtcgttacggcggcgagtggaccgaagatgcagccaaacgcgcgttattggccgaacgtttgcacgaaaatttattaggacgtttgcaaggcgaggaacgtctcctctggctttacgaagaagtggagaaaccattgagtcgcgtgctcgcgcatatggaagctaccggtgtcaaattagacgtggcgtatttggagaatctcagccttgaagttgctgcccacatgcgccgcttggaggaagaagtattccgtttagcaggccgttcctttcgccttaactctcgcgatcagttagaacgtgtgttgttcgatgaacttggtctccctcctatcggcaagacagagaagaccggtaaacgtagcacttcagcggcggttttagaagctcttcgcgaagtccatcccattgtggacaagatcttgcagtaccgcgaaatggcgaaattgaaaggcacctatattgaccgtcttccggcattagtccacccgaaaacgggacgcctccatacccgcttcaaccaaacagccacggcgaccggtcgtttgtcctcctctgatccaaaccttcagaatattccagtacgtaccccattgggccagaagatccgccgtgcgtttgtagctgaggagggttggcgtttagtggccctcgattatcgtcaaattgaattacgtgtccttgcccatctttctggcgatgagaacctcatccgcgtgtttcaggaaggcaaagacattcacactcaaacggcaagctggatgtttggattatcagctgaagcgatcgatcctttgatgcgtcgtgcagcgaagaccatcaatttcggtgttctctacggtatgagtgcctttcgtttgtcgcaggaattaggcattccctatgaagaagctcaggcgttcattcagaaatactttcaaagctatcccaaagttaaagcatggatcgagaagactctccgtgaaggccgcacacgtggttacgtagagaccttatttggacgtcgccgctatgttcccgatttaaactcgcgcgtgaaaggcaagcgtgaagccgccgaacgcatggcgttcaacatgcctgtacagggcacggcagctgacctcatgaaacttgcaatggtgcgcctttttccacaattgcgtgaagttggtgcccgcatgctgttgcaggtccacgatgaactcttgttagaagcgccaaaagagcgtgcggaagaggtggcagccctcgcgaaagaagttatggaaggcgtgtggcccttagcggtgcctcttgaagtcgaagttggtattggcgaggattggctggctgccaaagga

SEQ ID NO: 5934 - protein, 841 aa, synthetic construct
  REGION 1..841: note = Variant of DNA polymerase I from Thermus sp. strain 2.9
MHHHHHHGGSGVLPVFEPKGRVLLVDGHHLAYRNFFALKGLTTSLGEPVQGVYGFAKSLLKALKEDGDVVIVVFDAKAPSFRHEAYEAYKAGRAPTPEDFPRQLALMKELVDLLGLERLEVPGFEADDVLATLAKKAEREGYEVQILTADRDLFQLLSPRISVLHPEGHRITPEWLWEKYGLRPEQWVDFRALAGDPSDNIPGVKGIGEKTALKLLKEWGSLENLLKNLDQVKPESVREKILAHLEDLKLSRELSRVRTDLPLEVDFGRRREPDWEGLKAFLERLEFGSLLHEFGLLESPLLAEEAPWPPPEGAFLGYRLSRPEPMWAELLALAASAQGRVYRAEDPHGALRGLFEVRTLLAKDLAVVALREGLDLPPTDDPMLLAYLLDPSNTTPEGVARRYGGEWTEDAAKRALLAERLHENLLGRLQGEERLLWLYEEVEKPLSRVLAHMEATGVKLDVAYLENLSLEVAAHMRRLEEEVFRLAGRSFRLNSRDQLERVLFDELGLPPIGKTEKTGKRSTSAAVLEALREVHPIVDKILQYREMAKLKGTYIDRLPALVHPKTGRLHTRFNQTATATGRLSSSDPNLQNIPVRTPLGQKIRRAFVAEEGWRLVALDYRQIELRVLAHLSGDENLIRVFQEGKDIHTQTASWMFGLSAEAIDPLMRRAAKTINFGVLYGMSAFRLSQELGIPYEEAQAFIQKYFQSYPKVKAWIEKTLREGRTRGYVETLFGRRRYVPDLNSRVKGKREAAERMAFNMPVQGTAADLMKLAMVRLFPQLREVGARMLLQVHDELLLEAPKERAEEVAALAKEVMEGVWPLAVPLEVEVGIGEDWLAAKG

SEQ ID NO: 5935 - DNA, 2523 bp, synthetic construct
  misc_feature 1..2523: note = Variant of DNA polymerase I from Thermus sp. strain 2.9
  source 1..2523: mol_type = other DNA
atgcaccatcatcatcatcatggcggtagcggcgtgttaccggtgttcgagcctaaaggtcgcgtgcttctggttgatggccatcatctcgcgtatcgtaacttctttgccctgaaaggattaaccaccagcctgggcgagccggtacagggtgtctacggctttgcaaagtcgctcctgaaagctctgaaagaagacggtgatgtggtgattgttgtctttgatgcgaaagcgccaagttttcgccacgaagcgtacgaagcttacaaagccgggcgtgctccaacgccggaagactttcctcgccaattggcgcttatgaaggaattagtggatttgcttggcctcgaacgcttggaagttcccggtttcgaggcagacgacgtattagcgactctcgcaaagaaagccgaacgtgagggctatgaagtccagatcttgacagcagatcgcgatcttttccagcttttatctccgcgcatctcggtgttacacccggaagggcatcgtatcaccccggaatggctctgggagaaatatggtttgcgtcccgaacaatgggtggattttcgcgccttagcaggcgatccgagcgacaatattccgggagttaaaggtatcggcgagaagacggcgctcaagctccttaaagaatgggggtcgttggagaacttgcttaagaatttagatcaggtcaaaccagagtcagtgcgtgagaagattcttgctcacctcgaagacctcaaattaagccgcgaattgtcccgtgtacgcaccgatttgccgctcgaagttgatttcggtcgccgccgcgaacctgactgggagggtcttaaagcgtttttagagcgtcttgaatttggttcgctcttgcatgaattcggccttttagaaagcccgttactggccgaagaagcaccttggccaccgcccgagggcgcgtttttaggttaccgtttgagtcgcccggaaccgatgtgggccgaattactggctcttgcagcgtctgcccagggacgtgtgtatcgcgcggaagaccctcatggtgcgctccgcggcctcttcgaagtccgtggactccttgccaaagacttagctgttgttgcattgcgcgaaggtcttgatttacctccgactgatgatccaatgcttcttgcgtacctcttggacccgtcaaacacgacgcccgaaggcgtagcccgtcgttacggcggcgagtggtgggaagatgcagccaaacgcgcgttattggccgaacgtttgcacgaaaatttattaggacgtttgcaaggcgaggaacgtctcctctggctttacgaagaagtggagaaaccattgagtcgcgtgctcgcgcatatggaagctaccggtgtcaaattagacgtggcgtatttggagaatctcagccttgaagttgctgcccacatgcgccgcttggaggaagaagtattccgtttagcaggccgttcctttcgccttaactctcgcgatcagttagaacgtgtgttgttcgatgaacttggtctccctcctatcggcaagacagagaagaccggtaaacgtagcacttcagcggcggttttagaagctcttcgcgaagtccatcccattgtggacaagatcttgcagtaccgcgaaatggcgaaattgaaaggcacctatattgaccgtcttccggcattagtccacccgaaaacgggacgcctccatacccgcttcaaccaaacagccacggcgaccggtcgtttgtcctcctctgatccaaaccttcagaatattccagtacgtaccccattgggccagaagatccgccgtgcgtttgtagctgaggagggttggcgtttagtggccctcgattatcgtcaaattgaattacgtgtccttgcccatctttctggcgatgagaacctcatccgcgtgtttcaggaaggcaaagacattcacactcaaacggcaagctggatgtttggattatcagctgaagcgatcgatcctttgatgcgtcgtgcagcgaagaccatcaatttcggtgttctctacggtatgagtgcctttcgtttgtcgcaggaattaggcattccctatgaagaagctcagggtttcattcagaaatactttcaaagctatcccaaagttaaagcatggatcgagaagactctccgtgaaggccgcacacgtggttacgtagagaccttatttggacgtcgccgctatgttcccgatttaaacgctcgcgtgaaaggcaagcgtgaagccgccgaacgcatggcgttcaacatgcctgtacagggcacggcagctgacctcatgaaacttgcaatggtgcgcctttttccacaattgcgtgaagttggtgcccgcatgctgttgcaggtccacgatgaactcttgttagaagcgccaaaagagcgtgcggaagaggtggcagccctcgcgaaagaagttatggaaggcgtgtggcccttagcggtgcctcttgaagtcgaagttggtattggcgaggattggctggctgccaaagga

SEQ ID NO: 5936 - protein, 841 aa, synthetic construct
  REGION 1..841: note = Variant of DNA polymerase I from Thermus sp. strain 2.9
MHHHHHHGGSGVLPVFEPKGRVLLVDGHHLAYRNFFALKGLTTSLGEPVQGVYGFAKSLLKALKEDGDVVIVVFDAKAPSFRHEAYEAYKAGRAPTPEDFPRQLALMKELVDLLGLERLEVPGFEADDVLATLAKKAEREGYEVQILTADRDLFQLLSPRISVLHPEGHRITPEWLWEKYGLRPEQWVDFRALAGDPSDNIPGVKGIGEKTALKLLKEWGSLENLLKNLDQVKPESVREKILAHLEDLKLSRELSRVRTDLPLEVDFGRRREPDWEGLKAFLERLEFGSLLHEFGLLESPLLAEEAPWPPPEGAFLGYRLSRPEPMWAELLALAASAQGRVYRAEDPHGALRGLFEVRGLLAKDLAVVALREGLDLPPTDDPMLLAYLLDPSNTTPEGVARRYGGEWWEDAAKRALLAERLHENLLGRLQGEERLLWLYEEVEKPLSRVLAHMEATGVKLDVAYLENLSLEVAAHMRRLEEEVFRLAGRSFRLNSRDQLERVLFDELGLPPIGKTEKTGKRSTSAAVLEALREVHPIVDKILQYREMAKLKGTYIDRLPALVHPKTGRLHTRFNQTATATGRLSSSDPNLQNIPVRTPLGQKIRRAFVAEEGWRLVALDYRQIELRVLAHLSGDENLIRVFQEGKDIHTQTASWMFGLSAEAIDPLMRRAAKTINFGVLYGMSAFRLSQELGIPYEEAQGFIQKYFQSYPKVKAWIEKTLREGRTRGYVETLFGRRRYVPDLNARVKGKREAAERMAFNMPVQGTAADLMKLAMVRLFPQLREVGARMLLQVHDELLLEAPKERAEEVAALAKEVMEGVWPLAVPLEVEVGIGEDWLAAKG

SEQ ID NO: 5937 - DNA, 2523 bp, synthetic construct
  misc_feature 1..2523: note = Variant of DNA polymerase I from Thermus sp. strain 2.9
  source 1..2523: mol_type = other DNA
atgcaccatcatcatcatcatggcggtagcggcgtgttaccggtgttcgagcctaaaggtcgcgtgcttctggttgatggccatcatctcgcgtatcgtaacttctttgccctgaaaggattaaccaccagcctgggcgagccggtacagggtgtctacggctttgcaaagtcgctcctgaaagctctgaaagaagacggtgatgtggtgattgttgtctttgatgcgaaagcgccaagttttcgccacgaagcgtacgaagcttacaaagccgggcgtgctccaacgccggaagactttcctcgccaattggcgcttatgaaggaattagtggatttgcttggcctcgaacgcttggaagttcccggtttcgaggcagacgacgtattagcgactctcgcaaagaaagccgaacgtgagggctatgaagtccagatcttgacagcagatcgcgatcttttccagcttttatctccgcgcatctcggtgttacacccggaagggcatcgtatcaccccggaatggctctgggagaaatatggtttgcgtcccgaacaatgggtggattttcgcgccttagcaggcgatccgagcgacaatattccgggagttaaaggtatcggcgagaagacggcgctcaagctccttaaagaatgggggtcgttggagaacttgcttaagaatttagatcaggtcaaaccagagtcagtgcgtgagaagattcttgctcacctcgaagacctcaaattaagccgcgaattgtcccgtgtacgcaccgatttgccgctcgaagttgatttcggtcgccgccgcgaacctgactgggagggtcttaaagcgtttttagagcgtcttgaatttggttcgctcttgcatgaattcggccttttagaaagcccgttactggccgaagaagcaccttggccaccgcccgagggcgcgtttttaggttaccgtttgagtcgcccggaaccgatgtgggccgaattactggctcttgcagcgtctgcccagggacgtgtgtatcgcgcggaagaccctcatggtgcgctccgcggcctcttcgaagtccgtaccctccttgccaaagacttagctgttgttgcattgcgcgaaggtcttgatttacctccgactgatgatccaatgcttcttgcgtacctcttggacccgtcaaacacgacgcccgaaggcgtagcccgtcgttacggcggcgagtggaccgaagatgcagccaaacgcgcgttattggccgaacgtttgcacgaaaatttattaggacgtttgcaaggcgaggaacgtctcctctggctttacgaagaagtggagaaaccattgagtcgcgtgctcgcgcatatggaagctaccggtgtcaaattagacgtggcgtatttggagaatctcagccttgaagttgctgcccacatgcgccgcttggaggaagaagtattccgtttagcaggccgttcctttcgccttaactctcgcgatcagttagaacgtgtgttgttcgatgaacttggtctccctcctatcggcaagacagagaagaccggtaaacgtagcacttcagcggcggttttagaagctcttcgcgaagtccatcccattgtggacaagatcttgcagtaccgcgaaatggcgaaattgaaaggcacctatattgaccgtcttccggcattagtccacccgaaaacgggacgcctccatacccgcttcaaccaaacagccacggcgaccggtcgtttgtcctcctctgatccaaaccttcagaatattccagtacgtaccccattgggccagaagatccgccgtgcgtttgtagctgagccgggttggcgtttagtggccctcgattatcgtcaaattgaattacgtgtccttgcccatctttctggcgatgagaacctcatccgcgtgtttcaggaaggcaaagacattcacactcaaacggcaagctggatgtttggattatcagctgaagcgatcgatcctttgatgcgtcgtgcagcgaagaccatcaatttcggtgttctctacggtatgagtgcctttcgtttgtcgcaggaattaggcattccctatgaagaagctcagggtttcattcagaaatactttcaaagctatcccaaagttaaagcatggatcgagaagactctccgtgaaggccgcacacgtggttacgtagagaccttatttggacgtcgccgctatgttcccgatttaaactcgcgcgtgaaaggcaagcgtgaagccgccgaacgcatggcgttcaacatgcctgtacagggcacggcagctgacctcatgaaacttgcaatggtgcgcctttttccacaattgcgtgaagttggtgcccgcatgctgttgcaggtccacgatgaactcttgttagaagcgccaaaagagcgtgcggaagaggtggcagccctcgcgaaagaagttatggaaggcgtgtggcccttagcggtgcctcttgaagtcgaagttggtattggcgaggattggctggctgccaaagga

SEQ ID NO: 5938 - protein, 841 aa, synthetic construct
  REGION 1..841: note = Variant of DNA polymerase I from Thermus sp. strain 2.9
MHHHHHHGGSGVLPVFEPKGRVLLVDGHHLAYRNFFALKGLTTSLGEPVQGVYGFAKSLLKALKEDGDVVIVVFDAKAPSFRHEAYEAYKAGRAPTPEDFPRQLALMKELVDLLGLERLEVPGFEADDVLATLAKKAEREGYEVQILTADRDLFQLLSPRISVLHPEGHRITPEWLWEKYGLRPEQWVDFRALAGDPSDNIPGVKGIGEKTALKLLKEWGSLENLLKNLDQVKPESVREKILAHLEDLKLSRELSRVRTDLPLEVDFGRRREPDWEGLKAFLERLEFGSLLHEFGLLESPLLAEEAPWPPPEGAFLGYRLSRPEPMWAELLALAASAQGRVYRAEDPHGALRGLFEVRTLLAKDLAVVALREGLDLPPTDDPMLLAYLLDPSNTTPEGVARRYGGEWTEDAAKRALLAERLHENLLGRLQGEERLLWLYEEVEKPLSRVLAHMEATGVKLDVAYLENLSLEVAAHMRRLEEEVFRLAGRSFRLNSRDQLERVLFDELGLPPIGKTEKTGKRSTSAAVLEALREVHPIVDKILQYREMAKLKGTYIDRLPALVHPKTGRLHTRFNQTATATGRLSSSDPNLQNIPVRTPLGQKIRRAFVAEPGWRLVALDYRQIELRVLAHLSGDENLIRVFQEGKDIHTQTASWMFGLSAEAIDPLMRRAAKTINFGVLYGMSAFRLSQELGIPYEEAQGFIQKYFQSYPKVKAWIEKTLREGRTRGYVETLFGRRRYVPDLNSRVKGKREAAERMAFNMPVQGTAADLMKLAMVRLFPQLREVGARMLLQVHDELLLEAPKERAEEVAALAKEVMEGVWPLAVPLEVEVGIGEDWLAAKG

SEQ ID NO: 5939 - DNA, 2523 bp, synthetic construct
  misc_feature 1..2523: note = Variant of DNA polymerase I from Thermus sp. strain 2.9
  source 1..2523: mol_type = other DNA
atgcaccatcatcatcatcatggcggtagcggcgtgttaccggtgttcgagcctaaaggtcgcgtgcttctggttgatggccatcatctcgcgtatcgtaacttctttgccctgaaaggattaaccaccagcctgggcgagccggtacagggtgtctacggctttgcaaagtcgctcctgaaagctctgaaagaagacggtgatgtggtgattgttgtctttgatgcgaaagcgccaagttttcgccacgaagcgtacgaagcttacaaagccgggcgtgctccaacgccggaagactttcctcgccaattggcgcttatgaaggaattagtggatttgcttggcctcgaacgcttggaagttcccggtttcgaggcagacgacgtattagcgactctcgcaaagaaagccgaacgtgagggctatgaagtccagatcttgacagcagatcgcgatcttttccagcttttatctccgcgcatctcggtgttacacccggaagggcatcgtatcaccccggaatggctctgggagaaatatggtttgcgtcccgaacaatgggtggattttcgcgccttagcaggcgatccgagcgacaatattccgggagttaaaggtatcggcgagaagacggcgctcaagctccttaaagaatgggggtcgttggagaacttgcttaagaatttagatcaggtcaaaccagagtcagtgcgtgagaagattcttgctcacctcgaagacctcaaattaagccgcgaattgtcccgtgtacgcaccgatttgccgctcgaagttgatttcggtcgccgccgcgaacctgactgggagggtcttaaagcgtttttagagcgtcttgaatttggttcgctcttgcatgaattcggccttttagaaagcccgttactggccgaagaagcaccttggccaccgcccgagggcgcgtttttaggttaccgtttgagtcgcccggaaccgatgtgggccgaattactggctcttgcagcgtctgcccagggacgtgtgtatcgcgcggaagaccctcatggtgcgctccgcggcctcttcgaagtccgtggactccttgccaaagacttagctgttgttgcattgcgcgaaggtcttgatttacctccgactgatgatccaatgcttcttgcgtacctcttggacccgtcaaacacgacgcccgaaggcgtagcccgtcgttacggcggcgagtggaccgaagatgcagcgaaacgcgcgttattggccgaacgtttgcacgaaaatttattaggacgtttgcaaggcgaggaacgtctcctctggctttacgaagaagtggagaaaccattgagtcgcgtgctcgcgcatatggaagctaccggtgtcaaattagacgtggcgtatttggagaatctcagccttgaagttgctgcccacatgcgccgcttggaggaagaagtattccgtttagcaggccgttcctttcgccttaactctcgcgatcagttagaacgtgtgttgttcgatgaacttggtctccctcctatcggcaagacagagaagaccggtaaacgtagcacttcagcggcggttttagaagctcttcgcgaagtccatcccattgtggacaagatcttgcagtaccgcgaaatggcgaaattgaaaggcacctatattgaccgtcttccggcattagtccacccgaaaacgggacgcctccatacccgcttcaaccaaacagccacggcgaccggtcgtttgtcctcctctgatccaaaccttcagaatattccagtacgtaccccattgggccagaagatccgccgtgcgtttgtagctgaggagggttggcgtttagtggccctcgattatcgtcaaattgaattacgtgtccttgcccatctttctggcgatgagaacctcatccgcgtgtttcaggaaggcaaagacattcacactcaaacggcaagctggatgtttggattatcagctgaagcgatcgatcctttgatgcgtcgtgcagcgaagaccatcaatttcggtgttctctacggtatgagtgcctttcgtttgtcgcaggaattaggcattccctatgaagaagctcaggcgttcattcagaaatactttcaaagctatcccaaagttaaagcatggatcgagaagactctccgtgaaggccgctggcgtggttacgtagagaccttatttggacgtcgccgctatgttcccgatttaaacgctcgcgtgaaaggcaagcgtgaagccgccgaacgcatggcgttcaacatgcctgtacagggcacggcagctgacctcatgaaacttgcaatggtgcgcctttttccacaattgcgtgaagttggtgcccgcatgctcttgcaggtccacgatgaactcttgttagaagcgccaaaagagcgtgcggaagaggtggcagccctcgcgaaagaagttatggaaggcgtgtggcccttagcggtgcctcttgaagtcgaagttggtattggcgaggattggctggctgccaaagga

SEQ ID NO: 5940 - protein, 841 aa, synthetic construct
  REGION 1..841: note = Variant of DNA polymerase I from Thermus sp. strain 2.9
MHHHHHHGGSGVLPVFEPKGRVLLVDGHHLAYRNFFALKGLTTSLGEPVQGVYGFAKSLLKALKEDGDVVIVVFDAKAPSFRHEAYEAYKAGRAPTPEDFPRQLALMKELVDLLGLERLEVPGFEADDVLATLAKKAEREGYEVQILTADRDLFQLLSPRISVLHPEGHRITPEWLWEKYGLRPEQWVDFRALAGDPSDNIPGVKGIGEKTALKLLKEWGSLENLLKNLDQVKPESVREKILAHLEDLKLSRELSRVRTDLPLEVDFGRRREPDWEGLKAFLERLEFGSLLHEFGLLESPLLAEEAPWPPPEGAFLGYRLSRPEPMWAELLALAASAQGRVYRAEDPHGALRGLFEVRGLLAKDLAVVALREGLDLPPTDDPMLLAYLLDPSNTTPEGVARRYGGEWTEDAAKRALLAERLHENLLGRLQGEERLLWLYEEVEKPLSRVLAHMEATGVKLDVAYLENLSLEVAAHMRRLEEEVFRLAGRSFRLNSRDQLERVLFDELGLPPIGKTEKTGKRSTSAAVLEALREVHPIVDKILQYREMAKLKGTYIDRLPALVHPKTGRLHTRFNQTATATGRLSSSDPNLQNIPVRTPLGQKIRRAFVAEEGWRLVALDYRQIELRVLAHLSGDENLIRVFQEGKDIHTQTASWMFGLSAEAIDPLMRRAAKTINFGVLYGMSAFRLSQELGIPYEEAQAFIQKYFQSYPKVKAWIEKTLREGRWRGYVETLFGRRRYVPDLNARVKGKREAAERMAFNMPVQGTAADLMKLAMVRLFPQLREVGARMLLQVHDELLLEAPKERAEEVAALAKEVMEGVWPLAVPLEVEVGIGEDWLAAKG

SEQ ID NO: 5941 - DNA, 2523 bp, synthetic construct
  misc_feature 1..2523: note = Variant of DNA polymerase I from Thermus sp. strain 2.9
  source 1..2523: mol_type = other DNA
atgcaccatcatcatcatcatggcggtagcggcgtgttaccggtgttcgagcctaaaggtcgcgtgcttctggttgatggccatcatctcgcgtatcgtaacttctttgccctgaaaggattaaccaccagcctgggcgagccggtacagggtgtctacggctttgcaaagtcgctcctgaaagctctgaaagaagacggtgatgtggtgattgttgtctttgatgcgaaagcgccaagttttcgccacgaagcgtacgaagcttacaaagccgggcgtgctccaacgccggaagactttcctcgccaattggcgcttatgaaggaattagtggatttgcttggcctcgaacgcttggaagttcccggtttcgaggcagacgacgtattagcgactctcgcaaagaaagccgaacgtgagggctatgaagtccagatcttgacagcagatcgcgatcttttccagcttttatctccgcgcatctcggtgttacacccggaagggcatcgtatcaccccggaatggctctgggagaaatatggtttgcgtcccgaacaatgggtggattttcgcgccttagcaggcgatccgagcgacaatattccgggagttaaaggtatcggcgagaagacggcgctcaagctccttaaagaatgggggtcgttggagaacttgcttaagaatttagatcaggtcaaaccagagtcagtgcgtgagaagattcttgctcacctcgaagacctcaaattaagccgcgaattgtcccgtgtacgcaccgatttgccgctcgaagttgatttcggtcgccgccgcgaacctgactgggagggtcttaaagcgtttttagagcgtcttgaatttggttcgctcttgcatgaattcggccttttagaaagcccgttactggccgaagaagcaccttggccaccgcccgagggcgcgtttttaggttaccgtttgagtcgcccggaaccgatgtgggccgaattactggctcttgcagcgtctgcccagggacgtgtgtatcgcgcggaagaccctcatggtgcgctccgcggcctcttcgaagtccgtggactccttgccaaagacttagctgttgttgcattgcgcgaaggtcttgatttacctccgactgatgatccaatgcttcttgcgtacctcttggacccgtcaaacacgacgcccgaaggcgtagcccgtcgttacggcggcgagtggaccgaagatgcagcgaaacgcgcgttattggccgaacgtttgcacgaaaatttattaggacgtttgcaaggcgaggaacgtctcctctggctttacgaagaagtggagaaaccattgagtcgcgtgctcgcgcatatggaagctaccggtgtcaaattagacgtggcgtatttggagaatctttggcttgaagttgctgcccacatgcgccgcttggaggaagaagtattccgtttagcaggccgttcctttcgccttaactctcgcgatcagttagaacgtgtgttgttcgatgaacttggtctccctcctatcggcaagacagagaagaccggtaaacgtagcacttcagcggcggttttagaagctcttcgcgaagtccatcccattgtggacaagatcttgcagtaccgcgaaatggcgaaattgaaaggcacctatattgaccgtcttccggcattagtccacccgaaaacgggacgcctccatacccgcttcaaccaaacagccacggcgaccggtcgtttgtcctcctctgatccaaaccttcagaatattccagtacgtaccccattgggccagaagatccgccgtgcgtttgtagctgaggagggttggcgtttagtggccctcgattatcgtcaaattgaattacgtgtccttgcccatctttctggcgatgagaacctcatccgcgtgtttcaggaaggcaaagacattcacactcaaacggcaagctggatgtttggattatcagctgaagcgatcgatcctttgatgcgtcgtgcagcgaagaccatcaatttcggtgttctctacggtatgagtgcctttcgtttgtcgcaggaattaggcattccctatgaagaagctcaggcgttcattcagaaatactttcaaagctatcccaaagttaaagcatggatcgagaagactctccgtgaaggccgcacacgtggttacgtagagaccttatttggacgtcgccgctatgttcccgatttaaacgctcgcgtgaaaggcaagcgtgaagccgccgaacgcatggcgttcaacatgcctgtacagggcacggcagctgacctcatgaaacttgcaatggtgcgcctttttccacaattgcgtgaagttggtgcccgcatgctcttgcaggtccacgatgaactcttgttagaagcgccaaaagagcgtgcggaagaggtggcagccctcgcgaaagaagttatggaaggcgtgtggcccttagcggtgcctcttgaagtcgaagttggtattggcgaggattggctggctgccaaagga

SEQ ID NO: 5942 - protein, 841 aa, synthetic construct
  REGION 1..841: note = Variant of DNA polymerase I from Thermus sp. strain 2.9
MHHHHHHGGSGVLPVFEPKGRVLLVDGHHLAYRNFFALKGLTTSLGEPVQGVYGFAKSLLKALKEDGDVVIVVFDAKAPSFRHEAYEAYKAGRAPTPEDFPRQLALMKELVDLLGLERLEVPGFEADDVLATLAKKAEREGYEVQILTADRDLFQLLSPRISVLHPEGHRITPEWLWEKYGLRPEQWVDFRALAGDPSDNIPGVKGIGEKTALKLLKEWGSLENLLKNLDQVKPESVREKILAHLEDLKLSRELSRVRTDLPLEVDFGRRREPDWEGLKAFLERLEFGSLLHEFGLLESPLLAEEAPWPPPEGAFLGYRLSRPEPMWAELLALAASAQGRVYRAEDPHGALRGLFEVRGLLAKDLAVVALREGLDLPPTDDPMLLAYLLDPSNTTPEGVARRYGGEWTEDAAKRALLAERLHENLLGRLQGEERLLWLYEEVEKPLSRVLAHMEATGVKLDVAYLENLWLEVAAHMRRLEEEVFRLAGRSFRLNSRDQLERVLFDELGLPPIGKTEKTGKRSTSAAVLEALREVHPIVDKILQYREMAKLKGTYIDRLPALVHPKTGRLHTRFNQTATATGRLSSSDPNLQNIPVRTPLGQKIRRAFVAEEGWRLVALDYRQIELRVLAHLSGDENLIRVFQEGKDIHTQTASWMFGLSAEAIDPLMRRAAKTINFGVLYGMSAFRLSQELGIPYEEAQAFIQKYFQSYPKVKAWIEKTLREGRTRGYVETLFGRRRYVPDLNARVKGKREAAERMAFNMPVQGTAADLMKLAMVRLFPQLREVGARMLLQVHDELLLEAPKERAEEVAALAKEVMEGVWPLAVPLEVEVGIGEDWLAAKG

SEQ ID NO: 5943 - DNA, 2523 bp, synthetic construct
  misc_feature 1..2523: note = Variant of DNA polymerase I from Thermus sp. strain 2.9
  source 1..2523: mol_type = other DNA
atgcaccatcatcatcatcatggcggtagcggcgtgttaccggtgttcgagcctaaaggtcgcgtgcttctggttgatggccatcatctcgcgtatcgtaacttctttgccctgaaaggattaaccaccagcctgggcgagccggtacagggtgtctacggctttgcaaagtcgctcctgaaagctctgaaagaagacggtgatgtggtgattgttgtctttgatgcgaaagcgccaagttttcgccacgaagcgtacgaagcttacaaagccgggcgtgctccaacgccggaagactttcctcgccaattggcgcttatgaaggaattagtggatttgcttggcctcgaacgcttggaagttcccggtttcgaggcagacgacgtattagcgactctcgcaaagaaagccgaacgtgagggctatgaagtccagatcttgacagcagatcgcgatcttttccagcttttatctccgcgcatctcggtgttacacccggaagggcatcgtatcaccccggaatggctctgggagaaatatggtttgcgtcccgaacaatgggtggattttcgcgccttagcaggcgatccgagcgacaatattccgggagttaaaggtatcggcgagaagacggcgctcaagctccttaaagaatgggggtcgttggagaacttgcttaagaatttagatcaggtcaaaccagagtcagtgcgtgagaagattcttgctcacctcgaagacctcaaattaagccgcgaattgtcccgtgtacgcaccgatttgccgctcgaagttgatttccgccgccgccgcgaacctgactgggagggtcttaaagcgtttttagagcgtcttgaatttggttcgctcttgcatgaattcggccttttagaaagcccgttaccggccgaagaagcaccttggccaccgcccgagggcgcgtttttaggttaccgtttgagtcgcccggaaccgatgtgggccgaattactggctcttgcagcgtctgcccagggacgtgtgtatcgcgcggaagaccctcatggtgcgctccgcggcctcttcgaagtccgtggactccttgccaaagacttagctgttgttgcattgcgcgaaggtcttgatttacctccgactgatgatccaatgcttcttgcgtacctcttggacccgtcaaacacgacgcccgaaggcgtagcccgtcgttacggcggcgagtggaccgaagatgcagcgaaacgcgcgttattggccgaacgtttgcacgcaaatttattaggacgtttgcaaggcgaggaacgtctcctctggctttacgaagaagtggagaaaccattgagtcgcgtgctcgcgcatatggaagctaccggtgtcaaattagacgtggcgtatttggagaatctcagccttgaagttgctgcccacatgcgccgcttggaggaagaagtattccgtttagcaggccgttcctttcgccttaactctcgcgatcagttagaacgtgtgttgttcgatgaacttggtctccctcctatcggcaagacagagaagaccggtaaacgtagcacttcagcggcggttttagaagctcttcgcgaagtccatcccattgtggacaagatcttgcagtaccgcgaaatggcgaaattgaaaggcacctatattgaccctcttccggcattagtccacccgaaaacgggacgcctccatacccgcttcaaccaaacagccacggcgaccggtcgtttgtcctcctctgatccaaaccttcagaatattccagtacgtaccccattgggccagaagatccgccgtgcgtttgtagctgaggagggttggcgtttagtggccctcgattatcgtcaaattgaattacgtgtccttgcccatctttctggcgatgagaacctcatccgcgtgtttcaggaaggcaaagacattcacactcaaacggcaagctggatgtttggattatcagctgaagcgatcgatcctttgatgcgtcgtgcagcgaagaccatcaatttcggtgttctctacggtatgagtgcctttcgtttgtcgcaggaattaggcattccctatgaagaagctcaggcgttcattcagaaatactttcaaagctatcccaaagttaaagcatggatcgagaagactctcgaggaaggccgcacacgtggttacgtagagaccttatttggacgtcgccgctatgttcccgatttaaacgctcgcgtgaaaggcaagcgtgaagccgccgaacgcatggcgttcaacatgcctgtacagggcacggcagctgacctcatgaaacttgcaatggtgcgcctttttccacaattgcgtgaagttggtgcccgcatgctcttgcaggtccacgatgaactcttgttagaagcgccaaaagagcgtgcggaagaggtggcagccctcgcgaaagaagttatggaaggcgtgtggcccttagcggtgcctcttgaagtcgaagttggtattggcgaggattggctggctgccaaagga

SEQ ID NO: 5944 - protein, 841 aa, synthetic construct
  REGION 1..841: note = Variant of DNA polymerase I from Thermus sp. strain 2.9
MHHHHHHGGSGVLPVFEPKGRVLLVDGHHLAYRNFFALKGLTTSLGEPVQGVYGFAKSLLKALKEDGDVVIVVFDAKAPSFRHEAYEAYKAGRAPTPEDFPRQLALMKELVDLLGLERLEVPGFEADDVLATLAKKAEREGYEVQILTADRDLFQLLSPRISVLHPEGHRITPEWLWEKYGLRPEQWVDFRALAGDPSDNIPGVKGIGEKTALKLLKEWGSLENLLKNLDQVKPESVREKILAHLEDLKLSRELSRVRTDLPLEVDFRRRREPDWEGLKAFLERLEFGSLLHEFGLLESPLPAEEAPWPPPEGAFLGYRLSRPEPMWAELLALAASAQGRVYRAEDPHGALRGLFEVRGLLAKDLAVVALREGLDLPPTDDPMLLAYLLDPSNTTPEGVARRYGGEWTEDAAKRALLAERLHANLLGRLQGEERLLWLYEEVEKPLSRVLAHMEATGVKLDVAYLENLSLEVAAHMRRLEEEVFRLAGRSFRLNSRDQLERVLFDELGLPPIGKTEKTGKRSTSAAVLEALREVHPIVDKILQYREMAKLKGTYIDPLPALVHPKTGRLHTRFNQTATATGRLSSSDPNLQNIPVRTPLGQKIRRAFVAEEGWRLVALDYRQIELRVLAHLSGDENLIRVFQEGKDIHTQTASWMFGLSAEAIDPLMRRAAKTINFGVLYGMSAFRLSQELGIPYEEAQAFIQKYFQSYPKVKAWIEKTLEEGRTRGYVETLFGRRRYVPDLNARVKGKREAAERMAFNMPVQGTAADLMKLAMVRLFPQLREVGARMLLQVHDELLLEAPKERAEEVAALAKEVMEGVWPLAVPLEVEVGIGEDWLAAKG

SEQ ID NO: 5945 - DNA, 2523 bp, synthetic construct
  misc_feature 1..2523: note = Variant of DNA polymerase I from Thermus sp. strain 2.9
  source 1..2523: mol_type = other DNA
atgcaccatcatcatcatcatggcggtagcggcgtgttaccggtgttcgagcctaaaggtcgcgtgcttctggttgatggccatcatctcgcgtatcgtaacttctttgccctgaaaggattaaccaccagcctgggcgagccggtacagggtgtctacggctttgcaaagtcgctcctgaaagctctgaaagaagacggtgatgtggtgattgttgtctttgatgcgaaagcgccaagttttcgccacgaagcgtacgaagcttacaaagccgggcgtgctccaacgccggaagactttcctcgccaattggcgcttatgaaggaattagtggatttgcttggcctcgaacgcttggaagttcccggtttcgaggcagacgacgtattagcgactctcgcaaagaaagccgaacgtgagggctatgaagtccagatcttgacagcagatcgcgatcttttccagcttttatctccgcgcatctcggtgttacacccggaagggcatcgtatcaccccggaatggctctgggagaaatatggtttgcgtcccgaacaatgggtggattttcgcgccttagcaggcgatccgagcgacaatattccgggagttaaaggtatcggcgagaagacggcgctcaagctccttaaagaatgggggtcgttggagaacttgcttaagaatttagatcaggtcaaaccagagtcagtgcgtgagaagattcttgctcacctcgaagacctcaaattaagccgcgaattgtcccgtgtacgcaccgatttgccgctcgaagttgatttcggtcgccgccgcgaacctgactgggagggtcttaaagcgtttttagagcgtcttgaatttggttcgctcttgcatgaattcggccttttagaaagcccgttactggccgaagaagcaccttggccaccgcccgagggcgcgtttttaggttaccgtttgagtcgcccggaaccgatgtgggccgaattactggctcttgcagcgtctgcccagggacgtgtgtatcgcgcggaagaccctcatggtgcgctccgcggcctcttcgaagtccgtggcctccttgccaaagacttagctgttgttgcattgcgcgaaggtcttgatttacctccgactgatgatccaatgcttcttgcgtacctcttggacccgtcaaacacgacgcccgaaggcgtagcccgtcgttacggcggcgagtggtgggaagatgcagccaaacgcgcgttattggccgaacgtttgcacgaaaatttattaggacgtttgcaaggcgaggaacgtctcctctggctttacgaagaagtggagaaaccattgagtcgcgtgctcgcgcatatggaagctaccggtgtcaaattagacgtggcgtatttggagaatctcagccttgaagttgctgcccacatgcgccgcttggaggaagaagtattccgtttagcaggccgttcctttcgccttaactctcgcgatcagttagaacgtgtgttgttcgatgaacttggtctccctcctatcggcaagacagagaagaccggtaaacgtagcacttcagcggcggttttagaagctcttcgcgaagtccatcccattgtggacaagatcttgcagtaccgcgaaatggcgaaattgaaaggcacctatattgaccgtcttccggcattagtccacccgaaaacgggacgcctccatacccgcttcaaccaaacagccacggcgaccggtcgtttgtcctcctctgatccaaaccttcagaatattccagtacgtaccccattgggccagaagatccgccgtgcgtttgtagctgagccgggttgggcgttagtggccctcgattatcgtcaaattgaattacgtgtccttgcccatctttctggcgatgagaacctcatccgcgtgtttcaggaaggcaaagacattcacactcaaacggcaagctggatgtttggattatcagctgaagcgatcgatcctttgatgcgtcgtgcagcgaagaccatcaatttcggtgttctctacggtatgagtgcctttcgtttgtcgcaggaattaggcattccctatgaagaagctcaggcgttcattcagaaatactttcaaggctatcccaaagttaaagcatggatcgagaagactctccgtgaaggccgcacacgtggttacgtagagaccttatttggacgtcgccgctatgttcccgatttaaacggtcgcgtgaaaggcaagcgtgaagccgccgaacgcatggcgttcaacatgcctgtacagggcacggcagctgacctcatgaaacttgcaatggtgcgcctttttccacaattgcgtgaagttggtgcccgcatgctcttgcaggtccacgatgaactcttgttagaagcgccaaaagagcgtgcggaagaggtggcagccctcgcgaaagaagttatggaaggcgtgtggcccttagcggtgcctcttgaagtcgaagttggtattggcgaggattggctggctgccaaagga

SEQ ID NO: 5946 - protein, 841 aa, synthetic construct
  REGION 1..841: note = Variant of DNA polymerase I from Thermus sp. strain 2.9
MHHHHHHGGSGVLPVFEPKGRVLLVDGHHLAYRNFFALKGLTTSLGEPVQGVYGFAKSLLKALKEDGDVVIVVFDAKAPSFRHEAYEAYKAGRAPTPEDFPRQLALMKELVDLLGLERLEVPGFEADDVLATLAKKAEREGYEVQILTADRDLFQLLSPRISVLHPEGHRITPEWLWEKYGLRPEQWVDFRALAGDPSDNIPGVKGIGEKTALKLLKEWGSLENLLKNLDQVKPESVREKILAHLEDLKLSRELSRVRTDLPLEVDFGRRREPDWEGLKAFLERLEFGSLLHEFGLLESPLLAEEAPWPPPEGAFLGYRLSRPEPMWAELLALAASAQGRVYRAEDPHGALRGLFEVRGLLAKDLAVVALREGLDLPPTDDPMLLAYLLDPSNTTPEGVARRYGGEWWEDAAKRALLAERLHENLLGRLQGEERLLWLYEEVEKPLSRVLAHMEATGVKLDVAYLENLSLEVAAHMRRLEEEVFRLAGRSFRLNSRDQLERVLFDELGLPPIGKTEKTGKRSTSAAVLEALREVHPIVDKILQYREMAKLKGTYIDRLPALVHPKTGRLHTRFNQTATATGRLSSSDPNLQNIPVRTPLGQKIRRAFVAEPGWALVALDYRQIELRVLAHLSGDENLIRVFQEGKDIHTQTASWMFGLSAEAIDPLMRRAAKTINFGVLYGMSAFRLSQELGIPYEEAQAFIQKYFQGYPKVKAWIEKTLREGRTRGYVETLFGRRRYVPDLNGRVKGKREAAERMAFNMPVQGTAADLMKLAMVRLFPQLREVGARMLLQVHDELLLEAPKERAEEVAALAKEVMEGVWPLAVPLEVEVGIGEDWLAAKG

SEQ ID NO: 5947 - DNA, 2523 bp, synthetic construct
  misc_feature 1..2523: note = Variant of DNA polymerase I from Thermus sp. strain 2.9
  source 1..2523: mol_type = other DNA
atgcaccatcatcatcatcatggcggtagcggcgtgttaccggtgttcgagcctaaaggtcgcgtgcttctggttgatggccatcatctcgcgtatcgtaacttctttgccctgaaaggattaaccaccagcctgggcgagccggtacagggtgtctacggctttgcaaagtcgctcctgaaagctctgaaagaagacggtgatgtggtgattgttgtctttgatgcgaaagcgccaagttttcgccacgaagcgtacgaagcttacaaagccgggcgtgctccaacgccggaagactttcctcgccaattggcgcttatgaaggaattagtggatttgcttggcctcgaacgcttggaagttcccggtttcgaggcagacgacgtattagcgactctcgcaaagaaagccgaacgtgagggctatgaagtccagatcttgacagcagatcgcgatcttttccagcttttatctccgcgcatctcggtgttacacccggaagggcatcgtatcaccccggaatggctctgggagaaatatggtttgcgtcccgaacaatgggtggattttcgcgccttagcaggcgatccgagcgacaatattccgggagttaaaggtatcggcgagaagacggcgctcaagctccttaaagaatgggggtcgttggagaacttgcttaagaatttagatcaggtcaaaccagagtcagtgcgtgagaagattcttgctcacctcgaagacctcaaattaagccgcgaattgtcccgtgtacgcaccgatttgccgctcgaagttgatttcggtcgccgccgcgaacctgactgggagggtcttaaagcgtttttagagcgtcttgaatttggttcgctcttgcatgaattcggccttttagaaagcccgttactggccgaagaagcaccttggccaccgcccgagggcgcgtttttaggttaccgtttgagtcgcccggaaccgatgtgggccgaattactggctcttgcagcgtctgcccagggacgtgtgtatcgcgcggaagaccctcatggtgcgctccgcggcctcttcgaagtccgtggcctccttgccaaagacttagctgttgttgcattgcgcgaaggtcttgatttacctccgactgatgatccaatgcttcttgcgtacctcttggacccgtcaaacacgacgcccgaaggcgtagcccgtcgttacggcggcgagtggaccgaagatgcagcgaaacgcgcgttattggccgaacgtttgcacgaaaatttattaggacgtttgcaaggcgaggagcgtctcctgtggctttacgaagaagtggagaaaccattgagtcgcgtgctcgcgcatatggaagctaccggtgtcaaattagacgtggcgtatttggagaatctcctgcttgaagttgctgcccacatgcgccgcttggaggaagaagtattccgtttagcaggccgttcctttcgccttaactctcgcgatcagttagaacgtgtgttgttcgatgaacttggtctccctcctatcggcaagacagagaagaccggtaaacgtagcacttcagcggcggttttagaagctcttcgcgaagtccatcccattgtggacaagatcttgcagtaccgcgaaatggcgaaattgaaaggcacctatattgaccgtcttccggcattagtccacccgaaaacgggacgcctccatacccgcttcaaccaaacagccacggcgaccggtcgtttgtcctcctctgatccaaaccttcagaatattccagtacgtaccccattgggccagaagatccgccgtgcgtttgtagctgaggagggttgggcgttagtggccctcgattatcgtcaaattgaattacgtgtccttgcccatctttctggcgatgagaacctcatccgcgtgtttcaggaaggcaaagacattcacactcaaacggcaagctggatgtttggattatcagctgaagcgatcgatcctttgatgcgtcgtgcagcgaagaccatcaatttcggtgttctctacggtatgagtgcctttcgtttgtcgcaggaattaggcattcccctggaagaagctcaggctttcattcagaaatactttcaaagctatcccaaagttaaagcatggatcgagaagactctccgtgaaggccgcacacgtggttacgtagagaccttatttggacgtcgccgctatgttcccgatttaaacgctcgcgtgaaaggcaagcgtgaagccgccgaacgcatggcgttcaacatgcctgtacagggcacggcagctgacctcatgaaacttgcaatggtgcgcctttttccacaattgcgtgaagttggtgcccgcatgctgttgcaggtccacgatgaactcttgttagaagcgccaaaagagcgtgcggaagaggtggcagccctcgcgaaagaagttatggaaggcgtgtggcccttagcggtgcctcttgaagtcgaagttggtattggcgaggattggctggctgccaaagga

SEQ ID NO: 5948 - protein, 841 aa, synthetic construct
  REGION 1..841: note = Variant of DNA polymerase I from Thermus sp. strain 2.9
MHHHHHHGGSGVLPVFEPKGRVLLVDGHHLAYRNFFALKGLTTSLGEPVQGVYGFAKSLLKALKEDGDVVIVVFDAKAPSFRHEAYEAYKAGRAPTPEDFPRQLALMKELVDLLGLERLEVPGFEADDVLATLAKKAEREGYEVQILTADRDLFQLLSPRISVLHPEGHRITPEWLWEKYGLRPEQWVDFRALAGDPSDNIPGVKGIGEKTALKLLKEWGSLENLLKNLDQVKPESVREKILAHLEDLKLSRELSRVRTDLPLEVDFGRRREPDWEGLKAFLERLEFGSLLHEFGLLESPLLAEEAPWPPPEGAFLGYRLSRPEPMWAELLALAASAQGRVYRAEDPHGALRGLFEVRGLLAKDLAVVALREGLDLPPTDDPMLLAYLLDPSNTTPEGVARRYGGEWTEDAAKRALLAERLHENLLGRLQGEERLLWLYEEVEKPLSRVLAHMEATGVKLDVAYLENLLLEVAAHMRRLEEEVFRLAGRSFRLNSRDQLERVLFDELGLPPIGKTEKTGKRSTSAAVLEALREVHPIVDKILQYREMAKLKGTYIDRLPALVHPKTGRLHTRFNQTATATGRLSSSDPNLQNIPVRTPLGQKIRRAFVAEEGWALVALDYRQIELRVLAHLSGDENLIRVFQEGKDIHTQTASWMFGLSAEAIDPLMRRAAKTINFGVLYGMSAFRLSQELGIPLEEAQAFIQKYFQSYPKVKAWIEKTLREGRTRGYVETLFGRRRYVPDLNARVKGKREAAERMAFNMPVQGTAADLMKLAMVRLFPQLREVGARMLLQVHDELLLEAPKERAEEVAALAKEVMEGVWPLAVPLEVEVGIGEDWLAAKG

SEQ ID NO: 5949 - DNA, 2523 bp, synthetic construct
  misc_feature 1..2523: note = Variant of DNA polymerase I from Thermus sp. strain 2.9
  source 1..2523: mol_type = other DNA
atgcaccatcatcatcatcatggcggtagcggcgtgttaccggtgttcgagcctaaaggtcgcgtgcttctggttgatggccatcatctcgcgtatcgtaacttctttgccctgaaaggattaaccaccagcctgggcgagccggtacagggtgtctacggctttgcaaagtcgctcctgaaagctctgaaagaagacggtgatgtggtgattgttgtctttgatgcgaaagcgccaagttttcgccacgaagcgtacgaagcttacaaagccgggcgtgctccaacgccggaagactttcctcgccaattggcgcttatgaaggaattagtggatttgcttggcctcgaacgcttggaagttcccggtttcgaggcagacgacgtattagcgactctcgcaaagaaagccgaacgtgagggctatgaagtccagatcttgacagcagatcgcgatcttttccagcttttatctccgcgcatctcggtgttacacccggaagggcatcgtatcaccccggaatggctctgggagaaatatggtttgcgtcccgaacaatgggtggattttcgcgccttagcaggcgatccgagcgacaatattccgggagttaaaggtatcggcgagaagacggcgctcaagctccttaaagaatgggggtcgttggagaacttgcttaagaatttagatcaggtcaaaccagagtcagtgcgtgagaagattcttgctcacctcgaagacctcaaattaagccgcgaattgtcccgtgtacgcaccgatttgccgctcgaagttgatttcggtcgccgccgcgaacctgactgggagggtcttaaagcgtttttagagcgtcttgaatttggttcgctcttgcatgaattcggccttttagaaagcccgttactggccgaagaagcaccttggccaccgcccgagggcgcgtttttaggttaccgtttgagtcgcccggaaccgatgtgggccgaattactggctcttgcagcgtctgcccagggacgtgtgtatcgcgcggaagaccctcatggtgcgctccgcggcctcttcgaagtccgtggcctccttgccaaagacttagctgttgttgcattgcgcgaaggtcttgatttacctccgactgatgatccaatgcttcttgcgtacctcttggacccgtcaaacacgacgcccgaaggcgtagcccgtcgttacggcggcgagtggaccgaagatgcagccaaacgcgcgttattggccgaacgtttgcacgaaaatttattaggacgtttgcaaggcgaggaacgtctcctctggctttacgaagaagtggagaaaccattgagtcgcgtgctcgcgcatatggaagctaccggtgtcaaattagacgtggcgtatttggagaatctcagccttgaagttgctgcccacatgcgccgcttggaggaagaagtattccgtttagcaggccgttcctttcgccttaactctcgcgatcagttagaacgtgtgttgttcgatgaacttggtctccctcctatcggcaagacagagaagaccggtaaacgtagcacttcagcggcggttttagaagctcttcgcgaagtccatcccattgtggacaagatcttgcagtaccgcgaaatggcgaaattgaaaggcacctatattgaccgtcttccggcattagtccacccgaaaacgggacgcctccatacccgcttcaaccaaacagccacggcgaccggtcgtttgtcctcctctgatccaaaccttcagaatattccagtacgtacctttttgggccagaagatccgccgtgcgtttgtagctgagccgggttgggcgttagtggccctcgattatcgtcaaattgaattacgtgtccttgcccatctttctggcgatgagaacctcatccgcgtgtttcaggaaggcaaagacattcacactcaaacggcaagctggatgtttggattatcagctgaagcgatcgatcctttgatgcgtcgtgcagcgaagaccatcaatttcggtgttctctacggtatgagtgcctttcgtttgtcgcaggaattaggcattccctatgaagaagctcaggcgttcattcagaaatactttcaaagctatcccaaagttaaagcatggatcgagaagactctccgtgaaggccgcacacgtggttacgtagagaccttatttggacgtcgccgctatgttcccgatttaaacgctcgcgtgaaaggcaagcgtgaagccgccgaacgcatggcgttcaacatgcctgtacagggcacggcagctgacctcatgaaacttgcaatggtgcgcctttttccacaattgcgtgaagttggtgcccgcatgctgttgcaggtccacgatgaactcttgttagaagcgccaaaagagcgtgcggaagaggtggcagccctcgcgaaagaagttatggaaggcgtgtggcccttagcggtgcctcttgaagtcgaagttggtattggcgaggattggctggctgccaaagga

SEQ ID NO: 5950 - protein, 841 aa, synthetic construct
  REGION 1..841: note = Variant of DNA polymerase I from Thermus sp. strain 2.9
MHHHHHHGGSGVLPVFEPKGRVLLVDGHHLAYRNFFALKGLTTSLGEPVQGVYGFAKSLLKALKEDGDVVIVVFDAKAPSFRHEAYEAYKAGRAPTPEDFPRQLALMKELVDLLGLERLEVPGFEADDVLATLAKKAEREGYEVQILTADRDLFQLLSPRISVLHPEGHRITPEWLWEKYGLRPEQWVDFRALAGDPSDNIPGVKGIGEKTALKLLKEWGSLENLLKNLDQVKPESVREKILAHLEDLKLSRELSRVRTDLPLEVDFGRRREPDWEGLKAFLERLEFGSLLHEFGLLESPLLAEEAPWPPPEGAFLGYRLSRPEPMWAELLALAASAQGRVYRAEDPHGALRGLFEVRGLLAKDLAVVALREGLDLPPTDDPMLLAYLLDPSNTTPEGVARRYGGEWTEDAAKRALLAERLHENLLGRLQGEERLLWLYEEVEKPLSRVLAHMEATGVKLDVAYLENLSLEVAAHMRRLEEEVFRLAGRSFRLNSRDQLERVLFDELGLPPIGKTEKTGKRSTSAAVLEALREVHPIVDKILQYREMAKLKGTYIDRLPALVHPKTGRLHTRFNQTATATGRLSSSDPNLQNIPVRTFLGQKIRRAFVAEPGWALVALDYRQIELRVLAHLSGDENLIRVFQEGKDIHTQTASWMFGLSAEAIDPLMRRAAKTINFGVLYGMSAFRLSQELGIPYEEAQAFIQKYFQSYPKVKAWIEKTLREGRTRGYVETLFGRRRYVPDLNARVKGKREAAERMAFNMPVQGTAADLMKLAMVRLFPQLREVGARMLLQVHDELLLEAPKERAEEVAALAKEVMEGVWPLAVPLEVEVGIGEDWLAAKG

SEQ ID NO: 5951 - DNA, 2523 bp, synthetic construct
  misc_feature 1..2523: note = Variant of DNA polymerase I from Thermus sp. strain 2.9
  source 1..2523: mol_type = other DNA
atgcaccatcatcatcatcatggcggtagcggcgtgttaccggtgttcgagcctaaaggtcgcgtgcttctggttgatggccatcatctcgcgtatcgtaacttctttgccctgaaaggattaaccaccagcctgggcgagccggtacagggtgtctacggctttgcaaagtcgctcctgaaagctctgaaagaagacggtgatgtggtgattgttgtctttgatgcgaaagcgccaagttttcgccacgaagcgtacgaagcttacaaagccgggcgtgctccaacgccggaagactttcctcgccaattggcgcttatgaaggaattagtggatttgcttggcctcgaacgcttggaagttcccggtttcgaggcagacgacgtattagcgactctcgcaaagaaagccgaacgtgagggctatgaagtccagatcttgacagcagatcgcgatcttttccagcttttatctccgcgcatctcggtgttacacccggaagggcatcgtatcaccccggaatggctctgggagaaatatggtttgcgtcccgaacaatgggtggattttcgcgccttagcaggcgatccgagcgacaatattccgggagttaaaggtatcggcgagaagacggcgctcaagctccttaaagaatgggggtcgttggagaacttgcttaagaatttagatcaggtcaaaccagagtcagtgcgtgagaagattcttgctcacctcgaagacctcaaattaagccgcgaattgtcccgtgtacgcaccgatttgccgctcgaagttgatttcggtcgccgccgcgaacctgactgggagggtcttaaagcgtttttagagcgtcttgaatttggttcgctcttgcatgaattcggccttttagaaagcccgttactggccgaagaagcaccttggccaccgcccgagggcgcgtttttaggttaccgtttgagtcgcccggaaccgatgtgggccgaattactggctcttgcagcgtctgcccagggacgtgtgtatcgcgcggaagaccctcatggtgcgctccgcggcctcttcgaagtccgtggactccttgccaaagacttagctgttgttgcattgcgcgaaggtcttgatttacctccgactgatgatccaatgcttcttgcgtacctcttggacccgtcaaacacgacgcccgaaggcgtagcccgtcgttacggcggcgagtggaccgaagatgcagcgcggcgcgcgttattggccgaacgtttgcacgaaaatttattaggacgtttgcaaggcgaggaacgtctcctctggctttacgaagaagtggagaaaccattgagtcgcgtgctcgcgcatatggaagctaccggtgtcaaattagacgtggcgtatttggagaatctcagccttgaagttgctgcccacatgcgccgcttggaggaagaagtattccgtttagcaggccgttcctttcgccttaactctcgcgatcagttagaacgtgtgttgttcgatgaacttggtctccctcctatcggcaagacagagaagaccggtaaacgtagcacttcagcggcggttttagaagctcttcgcgaagtccatcccattgtggacaagatcttgcagtaccgcgaaatggcgaaattgaaaggcacctatattgaccgtcttccggcattagtccacccgaaaacgggacgcctccatacccgcttcaaccaaacagccacggcgaccggtcgtttgtcctcctctgatccaaaccttcagaatattccagtacgtaccccattgggccagaagatccgccgtgcgtttgtagctgaggagggttggcgtttagtggccctcgattatcgtcaaattgaattacgtgtccttgcccatctttctggcgatgagaacctcatccgcgtgtttcaggaaggcaaagacattcacactcaaacggcaagctggatgtttggattatcagctgaagcgatcgatcctttgatgcgtcgtgcagcgaagaccatcaatttcggtgttctctacggtatgagtgcctttcgtttgtcgcaggaattaggcattccctatgaagaagctcaggcgttcattcagaaatactttcaaagctatcccaaagttaaagcatggatcgagaagactctccgtgaaggccgcacacgtggttacgtagagaccttatttggacgtcgccgctatgttcccgatttaaacgctcgcgtgaaaggcaagcgtgaagccgccgaacgcatggcgttcaacatgcctgtacagggcacggcagctgacctcatgaaacttgcaatggtgcgcctttttccacaattgcgtgaagttggtgcccgcatgctcttgcaggtccacgatgaactcttgttagaagcgccaaaagagcgtgcggaagaggtggcagccctcgcgaaagaagttatggaaggcgtgtggcccttagcggtgcctcttgaagtcgaagttggtattggcgaggattggctggctgccaaagga

SEQ ID NO: 5952 - protein, 841 aa, synthetic construct
  REGION 1..841: note = Variant of DNA polymerase I from Thermus sp. strain 2.9
MHHHHHHGGSGVLPVFEPKGRVLLVDGHHLAYRNFFALKGLTTSLGEPVQGVYGFAKSLLKALKEDGDVVIVVFDAKAPSFRHEAYEAYKAGRAPTPEDFPRQLALMKELVDLLGLERLEVPGFEADDVLATLAKKAEREGYEVQILTADRDLFQLLSPRISVLHPEGHRITPEWLWEKYGLRPEQWVDFRALAGDPSDNIPGVKGIGEKTALKLLKEWGSLENLLKNLDQVKPESVREKILAHLEDLKLSRELSRVRTDLPLEVDFGRRREPDWEGLKAFLERLEFGSLLHEFGLLESPLLAEEAPWPPPEGAFLGYRLSRPEPMWAELLALAASAQGRVYRAEDPHGALRGLFEVRGLLAKDLAVVALREGLDLPPTDDPMLLAYLLDPSNTTPEGVARRYGGEWTEDAARRALLAERLHENLLGRLQGEERLLWLYEEVEKPLSRVLAHMEATGVKLDVAYLENLSLEVAAHMRRLEEEVFRLAGRSFRLNSRDQLERVLFDELGLPPIGKTEKTGKRSTSAAVLEALREVHPIVDKILQYREMAKLKGTYIDRLPALVHPKTGRLHTRFNQTATATGRLSSSDPNLQNIPVRTPLGQKIRRAFVAEEGWRLVALDYRQIELRVLAHLSGDENLIRVFQEGKDIHTQTASWMFGLSAEAIDPLMRRAAKTINFGVLYGMSAFRLSQELGIPYEEAQAFIQKYFQSYPKVKAWIEKTLREGRTRGYVETLFGRRRYVPDLNARVKGKREAAERMAFNMPVQGTAADLMKLAMVRLFPQLREVGARMLLQVHDELLLEAPKERAEEVAALAKEVMEGVWPLAVPLEVEVGIGEDWLAAKG

SEQ ID NO: 5953 - DNA, 2523 bp, synthetic construct
  misc_feature 1..2523: note = Variant of DNA polymerase I from Thermus sp. strain 2.9
  source 1..2523: mol_type = other DNA
atgcaccatcatcatcatcatggcggtagcggcgtgttaccggtgttcgagcctaaaggtcgcgtgcttctggttgatggccatcatctcgcgtatcgtaacttctttgccctgaaaggattaaccaccagcctgggcgagccggtacagggtgtctacggctttgcaaagtcgctcctgaaagctctgaaagaagacggtgatgtggtgattgttgtctttgatgcgaaagcgccaagttttcgccacgaagcgtacgaagcttacaaagccgggcgtgctccaacgccggaagactttcctcgccaattggcgcttatgaaggaattagtggatttgcttggcctcgaacgcttggaagttcccggtttcgaggcagacgacgtattagcgactctcgcaaagaaagccgaacgtgagggctatgaagtccagatcttgacagcagatcgcgatcttttccagcttttatctccgcgcatctcggtgttacacccggaagggcatcgtatcaccccggaatggctctgggagaaatatggtttgcgtcccgaacaatgggtggattttcgcgccttagcaggcgatccgagcgacaatattccgggagttaaaggtatcggcgagaagacggcgctcaagctccttaaagaatgggggtcgttggagaacttgcttaagaatttagatcaggtcaaaccagagtcagtgcgtgagaagattcttgctcacctcgaagacctcaaattaagccgcgaattgtcccgtgtacgcaccgatttgccgctcgaagttgatttcggtcgccgccgcgaacctgactgggagggtcttaaagcgtttttagagcgtcttgaatttggttcgctcttgcatgaattcggccttttagaaagcccgttactggccgaagaagcaccttggccaccgcccgagggcgcgtttttaggttaccgtttgagtcgcccggaaccgatgtgggccgaattactggctcttgcagcgtctgcccagggacgtgtgtatcgcgcggaagaccctcatggtgcgctccgcggcctcttcgaagtccgtggactccttgccaaagacttagctgttgttgcattgcgcgaaggtcttgatttacctccgactgatgatccaatgcttcttgcgtacctcttggacccgtcaaacacgacgcccgaaggcgtagcccgtcgttacggcggcgagtggaccgaagatgcagcgaaacgcgcgttattggccgaacgtttgcacgaaaatttattaggacgtttgcaaggcgaggaacgtctcctctggctttacgaagaagtggagaaaccattgagtcgcgtgctcgcgcatatggaagctaccggtgtcaaattagacgtggcgtatttggagaatcttcggcttgaagttgctgcccacatgcgccgcttggaggaagaagtattccgtttagcaggccgttcctttcgccttaactctcgcgatcagttagaacgtgtgttgttcgatgaacttggtctccctcctatcggcaagacagagaagaccggtaaacgtagcacttcagcggcggttttagaagctcttcgcgaagtccatcccattgtggacaagatcttgcagtaccgcgaaatggcgaaattgaaaggcacctatattgaccgtcttccggcattagtccacccgaaaacgggacgcctccatacccgcttcaaccaaacagccacggcgaccggtcgtttgtcctcctctgatccaaaccttcagaatattccagtacgtaccccattgggccagaagatccgccgtgcgtttgtagctgaggagggttggcgtttagtggccctcgattatcgtcaaattgaattacgtgtccttgcccatctttctggcgatgagaacctcatccgcgtgtttcaggaaggcaaagacattcacactcaaacggcaagctggatgtttggattatcagctgaagcgatcgatcctttgatgcgtcgtgcagcgaagaccatcaatttcggtgttctctacggtatgagtgcctttcgtttgtcgcaggaattaggcattccctatgaagaagctcaggcgttcattcagaaatactttcaaagctatcccaaagttaaagcatggatcgagaagactctccgtgaaggccgcacacgtggttacgtagagaccttatttggacgtcgccgctatgttcccgatttaaacgctcgcgtgaaaggcaagcgtgaagccgccgaacgcatggcgttcaacatgcctgtacagggcacggcagctgacctcatgaaacttgcaatggtgcgcctttttccacaattgcgtgaagttggtgcccgcatgctcttgcaggtccacgatgaactcttgttagaagcgccaaaagagcgtgcggaagaggtggcagccctcgcgaaagaagttatggaaggcgtgtggcccttagcggtgcctcttgaagtcgaagttggtattggcgaggattggctggctgccaaagga

SEQ ID NO: 5954 - protein, 841 aa, synthetic construct
  REGION 1..841: note = Variant of DNA polymerase I from Thermus sp. strain 2.9
MHHHHHHGGSGVLPVFEPKGRVLLVDGHHLAYRNFFALKGLTTSLGEPVQGVYGFAKSLLKALKEDGDVVIVVFDAKAPSFRHEAYEAYKAGRAPTPEDFPRQLALMKELVDLLGLERLEVPGFEADDVLATLAKKAEREGYEVQILTADRDLFQLLSPRISVLHPEGHRITPEWLWEKYGLRPEQWVDFRALAGDPSDNIPGVKGIGEKTALKLLKEWGSLENLLKNLDQVKPESVREKILAHLEDLKLSRELSRVRTDLPLEVDFGRRREPDWEGLKAFLERLEFGSLLHEFGLLESPLLAEEAPWPPPEGAFLGYRLSRPEPMWAELLALAASAQGRVYRAEDPHGALRGLFEVRGLLAKDLAVVALREGLDLPPTDDPMLLAYLLDPSNTTPEGVARRYGGEWTEDAAKRALLAERLHENLLGRLQGEERLLWLYEEVEKPLSRVLAHMEATGVKLDVAYLENLRLEVAAHMRRLEEEVFRLAGRSFRLNSRDQLERVLFDELGLPPIGKTEKTGKRSTSAAVLEALREVHPIVDKILQYREMAKLKGTYIDRLPALVHPKTGRLHTRFNQTATATGRLSSSDPNLQNIPVRTPLGQKIRRAFVAEEGWRLVALDYRQIELRVLAHLSGDENLIRVFQEGKDIHTQTASWMFGLSAEAIDPLMRRAAKTINFGVLYGMSAFRLSQELGIPYEEAQAFIQKYFQSYPKVKAWIEKTLREGRTRGYVETLFGRRRYVPDLNARVKGKREAAERMAFNMPVQGTAADLMKLAMVRLFPQLREVGARMLLQVHDELLLEAPKERAEEVAALAKEVMEGVWPLAVPLEVEVGIGEDWLAAKG

SEQ ID NO: 5955 - DNA, 2523 bp, synthetic construct
  misc_feature 1..2523: note = Variant of DNA polymerase I from Thermus sp. strain 2.9
  source 1..2523: mol_type = other DNA
atgcaccatcatcatcatcatggcggtagcggcgtgttaccggtgttcgagcctaaaggtcgcgtgcttctggttgatggccatcatctcgcgtatcgtaacttctttgccctgaaaggattaaccaccagcctgggcgagccggtacagggtgtctacggctttgcaaagtcgctcctgaaagctctgaaagaagacggtgatgtggtgattgttgtctttgatgcgaaagcgccaagttttcgccacgaagcgtacgaagcttacaaagccgggcgtgctccaacgccggaagactttcctcgccaattggcgcttatgaaggaattagtggatttgcttggcctcgaacgcttggaagttcccggtttcgaggcagacgacgtattagcgactctcgcaaagaaagccgaacgtgagggctatgaagtccagatcttgacagcagatcgcgatcttttccagcttttatctccgcgcatctcggtgttacacccggaagggcatcgtatcaccccggaatggctctgggagaaatatggtttgcgtcccgaacaatgggtggattttcgcgccttagcaggcgatccgagcgacaatattccgggagttaaaggtatcggcgagaagacggcgctcaagctccttaaagaatgggggtcgttggagaacttgcttaagaatttagatcaggtcaaaccagagtcagtgcgtgagaagattcttgctcacctcgaagacctcaaattaagccgcgaattgtcccgtgtacgcaccgatttgccgctcgaagttgatttcggtcgccgccgcgaacctgactgggagggtcttaaagcgtttttagagcgtcttgaatttggttcgctcttgcatgaattcggccttttagaaagcccgttactggccgaagaagcaccttggccaccgcccgagggcgcgtttttaggttaccgtttgagtcttccggaaccgatgtgggccgaattactggctcttgcagcgtctgcccagggacgtgtgtatcgcgcggaagaccctcatggtgcgctccgcggcctcttcgaagtccgtggactccttgccaaagacttagctgttgttgcattgcgcgaaggtcttgatttacctccgactgatgatccaatgcttcttgcgtacctcttggacccgtcaaacacgacgcccgaaggcgtagcccgtcgttacggcggcgagtggaccgaagatgcagcgaaacgcgcgttattggccgaacgtttgcacgaaaatttattaggacgtttgcaaggcgaggaacgtctcctctggctttacgaagaagtggagaaaccattgagtcgcgtgctcgcgcatatggaagctaccggtgtcaaattagacgtggcgtatttggagaatctcagccttgaagttgctgcccacatgcgccgcttggaggaagaagtattccgtttagcaggccgttcctttcgccttaactctcgcgatcagttagaacgtgtgttgttcgatgaacttggtctccctcctatcggcaagacagagaagaccggtaaacgtagcacttcagcggcggttttagaagctcttcgcgaagtccatcccattgtggacaagatcttgcagtaccgcgaaatggcgaaattgaaaggcacctatattgaccgtcttccggcattagtccacccgaaaacgggacgcctccatacccgcttcaaccaaacagccacggcgaccggtcgtttgtcctcctctgatccaaaccttcagaatattccagtacgtaccccattgggccagaagatccgccgtgcgtttgtagctgaggagggttggcgtttagtggccctcgattatcgtcaaattgaattacgtgtccttgcccatctttctggcgatgagaacctcatccgcgtgtttcaggaaggcaaagacattcacactcaaacggcaagctggatgtttggattatcagctgaagcgatcgatcctttgatgcgtcgtgcagcgaagaccatcaatttcggtgttctctacggtatgagtgcctttcgtttgtcgcaggaattaggcattccctatgaagaagctcaggcgttcattcagaaatactttcaaagctatcccaaagttaaagcatggatcgagaagactctccgtgaaggccgcacacgtggttacgtagagaccttatttggacgtcgccgctatgttcccgatttaaacgctcgcgtgaaaggcaagcgtgaagccgccgaacgcatggcgttcaacatgcctgtacagggcacggcagctgacctcatgaaacttgcaatggtgcgcctttttccacaattgcgtgaagttggtgcccgcatgctcttgcaggtccacgatgaactcttgttagaagcgccaaaagagcgtgcggaagaggtggcagccctcgcgaaagaagttatggaaggcgtgtggcccttagcggtgcctcttgaagtcgaagttggtattggcgaggattggctggctgccaaagga

SEQ ID NO: 5956 - protein, 841 aa, synthetic construct
  REGION 1..841: note = Variant of DNA polymerase I from Thermus sp. strain 2.9
MHHHHHHGGSGVLPVFEPKGRVLLVDGHHLAYRNFFALKGLTTSLGEPVQGVYGFAKSLLKALKEDGDVVIVVFDAKAPSFRHEAYEAYKAGRAPTPEDFPRQLALMKELVDLLGLERLEVPGFEADDVLATLAKKAEREGYEVQILTADRDLFQLLSPRISVLHPEGHRITPEWLWEKYGLRPEQWVDFRALAGDPSDNIPGVKGIGEKTALKLLKEWGSLENLLKNLDQVKPESVREKILAHLEDLKLSRELSRVRTDLPLEVDFGRRREPDWEGLKAFLERLEFGSLLHEFGLLESPLLAEEAPWPPPEGAFLGYRLSLPEPMWAELLALAASAQGRVYRAEDPHGALRGLFEVRGLLAKDLAVVALREGLDLPPTDDPMLLAYLLDPSNTTPEGVARRYGGEWTEDAAKRALLAERLHENLLGRLQGEERLLWLYEEVEKPLSRVLAHMEATGVKLDVAYLENLSLEVAAHMRRLEEEVFRLAGRSFRLNSRDQLERVLFDELGLPPIGKTEKTGKRSTSAAVLEALREVHPIVDKILQYREMAKLKGTYIDRLPALVHPKTGRLHTRFNQTATATGRLSSSDPNLQNIPVRTPLGQKIRRAFVAEEGWRLVALDYRQIELRVLAHLSGDENLIRVFQEGKDIHTQTASWMFGLSAEAIDPLMRRAAKTINFGVLYGMSAFRLSQELGIPYEEAQAFIQKYFQSYPKVKAWIEKTLREGRTRGYVETLFGRRRYVPDLNARVKGKREAAERMAFNMPVQGTAADLMKLAMVRLFPQLREVGARMLLQVHDELLLEAPKERAEEVAALAKEVMEGVWPLAVPLEVEVGIGEDWLAAKG

SEQ ID NO: 5957 - DNA, 2523 bp, synthetic construct
  misc_feature 1..2523: note = Variant of DNA polymerase I from Thermus sp. strain 2.9
  source 1..2523: mol_type = other DNA
atgcaccatcatcatcatcatggcggtagcggcgtgttaccggtgttcgagcctaaaggtcgcgtgcttctggttgatggccatcatctcgcgtatcgtaacttctttgccctgaaaggattaaccaccagcctgggcgagccggtacagggtgtctacggctttgcaaagtcgctcctgaaagctctgaaagaagacggtgatgtggtgattgttgtctttgatgcgaaagcgccaagttttcgccacgaagcgtacgaagcttacaaagccgggcgtgctccaacgccggaagactttcctcgccaattggcgcttatgaaggaattagtggatttgcttggcctcgaacgcttggaagttcccggtttcgaggcagacgacgtattagcgactctcgcaaagaaagccgaacgtgagggctatgaagtccagatcttgacagcagatcgcgatcttttccagcttttatctccgcgcatctcggtgttacacccggaagggcatcgtatcaccccggaatggctctgggagaaatatggtttgcgtcccgaacaatgggtggattttcgcgccttagcaggcgatccgagcgacaatattccgggagttaaaggtatcggcgagaagacggcgctcaagctccttaaagaatgggggtcgttggagaacttgcttaagaatttagatcaggtcaaaccagagtcagtgcgtgagaagattcttgctcacctcgaagacctcaaattaagccgcgaattgtcccgtgtacgcaccgatttgccgctcgaagttgatttcggtcgccgccgcgaacctgactgggagggtcttaaagcgtttttagagcgtcttgaatttggttcgctcttgcatgaattcggccttttagaaagcccgttactggccgaagaagcaccttggccaccgcccgagggcgcgtttttaggttaccgtttgagtcgcccggaaccgatgtgggccgaattactggctcttgcagcgtctgcccagggacgtgtgtatcgcgcggaagaccctcatggtgcgctccgcggcctcttcgaagtccgtggactccttgccaaagacttagctgttgttgcattgcgcgaaggtcttgatttacctccgactgatgatccaatgcttcttgcgtacctcttggacccgtcaaacacgacgcccgaaggcgtagcccgtcgttacggcggcgagtggaccgaagatgcagcgaaacgcgcgttattggccgaacgtttgcacgaaaatttattaggacgtttgcaaggcgagaggcgtctcctctggctttacgaagaagtggagaaaccattgagtcgcgtgctcgcgcatatggaagctaccggtgtcaaattagacgtggcgtatttggagaatctcagccttgaagttgctgcccacatgcgccgcttggaggaagaagtattccgtttagcaggccgttcctttcgccttaactctcgcgatcagttagaacgtgtgttgttcgatgaacttggtctccctcctatcggcaagacagagaagaccggtaaacgtagcacttcagcggcggttttagaagctcttcgcgaagtccatcccattgtggacaagatcttgcagtaccgcgaaatggcgaaattgaaaggcacctatattgaccgtcttccggcattagtccacccgaaaacgggacgcctccatacccgcttcaaccaaacagccacggcgaccggtcgtttgtcctcctctgatccaaaccttcagaatattccagtacgtaccccattgggccagaagatccgccgtgcgtttgtagctgaggagggttggcgtttagtggccctcgattatcgtcaaattgaattacgtgtccttgcccatctttctggcgatgagaacctcatccgcgtgtttcaggaaggcaaagacattcacactcaaacggcaagctggatgtttggattatcagctgaagcgatcgatcctttgatgcgtcgtgcagcgaagaccatcaatttcggtgttctctacggtatgagtgcctttcgtttgtcgcaggaattaggcattccctatgaagaagctcaggcgttcattcagaaatactttcaaagctatcccaaagttaaagcatggatcgagaagactctccgtgaaggccgcacacgtggttacgtagagaccttatttggacgtcgccgctatgttcccgatttaaacgctcgcgtgaaaggcaagcgtgaagccgccgaacgcatggcgttcaacatgcctgtacagggcacggcagctgacctcatgaaacttgcaatggtgcgcctttttccacaattgcgtgaagttggtgcccgcatgctcttgcaggtccacgatgaactcttgttagaagcgccaaaagagcgtgcggaagaggtggcagccctcgcgaaagaagttatggaaggcgtgtggcccttagcggtgcctcttgaagtcgaagttggtattggcgaggattggctggctgccaaagga

SEQ ID NO: 5958 - protein, 841 aa, synthetic construct
  REGION 1..841: note = Variant of DNA polymerase I from Thermus sp. strain 2.9
MHHHHHHGGSGVLPVFEPKGRVLLVDGHHLAYRNFFALKGLTTSLGEPVQGVYGFAKSLLKALKEDGDVVIVVFDAKAPSFRHEAYEAYKAGRAPTPEDFPRQLALMKELVDLLGLERLEVPGFEADDVLATLAKKAEREGYEVQILTADRDLFQLLSPRISVLHPEGHRITPEWLWEKYGLRPEQWVDFRALAGDPSDNIPGVKGIGEKTALKLLKEWGSLENLLKNLDQVKPESVREKILAHLEDLKLSRELSRVRTDLPLEVDFGRRREPDWEGLKAFLERLEFGSLLHEFGLLESPLLAEEAPWPPPEGAFLGYRLSRPEPMWAELLALAASAQGRVYRAEDPHGALRGLFEVRGLLAKDLAVVALREGLDLPPTDDPMLLAYLLDPSNTTPEGVARRYGGEWTEDAAKRALLAERLHENLLGRLQGERRLLWLYEEVEKPLSRVLAHMEATGVKLDVAYLENLSLEVAAHMRRLEEEVFRLAGRSFRLNSRDQLERVLFDELGLPPIGKTEKTGKRSTSAAVLEALREVHPIVDKILQYREMAKLKGTYIDRLPALVHPKTGRLHTRFNQTATATGRLSSSDPNLQNIPVRTPLGQKIRRAFVAEEGWRLVALDYRQIELRVLAHLSGDENLIRVFQEGKDIHTQTASWMFGLSAEAIDPLMRRAAKTINFGVLYGMSAFRLSQELGIPYEEAQAFIQKYFQSYPKVKAWIEKTLREGRTRGYVETLFGRRRYVPDLNARVKGKREAAERMAFNMPVQGTAADLMKLAMVRLFPQLREVGARMLLQVHDELLLEAPKERAEEVAALAKEVMEGVWPLAVPLEVEVGIGEDWLAAKG

SEQ ID NO: 5959 - DNA, 2523 bp, synthetic construct
  misc_feature 1..2523: note = Variant of DNA polymerase I from Thermus sp. strain 2.9
  source 1..2523: mol_type = other DNA
atgcaccatcatcatcatcatggcggtagcggcgtgttaccggtgttcgagcctaaaggtcgcgtgcttctggttgatggccatcatctcgcgtatcgtaacttctttgccctgaaaggattaaccaccagcctgggcgagccggtacagggtgtctacggctttgcaaagtcgctcctgaaagctctgaaagaagacggtgatgtggtgattgttgtctttgatgcgaaagcgccaagttttcgccacgaagcgtacgaagcttacaaagccgggcgtgctccaacgccggaagactttcctcgccaattggcgcttatgaaggaattagtggatttgcttggcctcgaacgcttggaagttcccggtttcgaggcagacgacgtattagcgactctcgcaaagaaagccgaacgtgagggctatgaagtccagatcttgacagcagatcgcgatcttttccagcttttatctccgcgcatctcggtgttacacccggaagggcatcgtatcaccccggaatggctctgggagaaatatggtttgcgtcccgaacaatgggtggattttcgcgccttagcaggcgatccgagcgacaatattccgggagttaaaggtatcggcgagaagacggcgctcaagctccttaaagaatgggggtcgttggagaacttgcttaagaatttagatcaggtcaaaccagagtcagtgcgtgagaagattcttgctcacctcgaagacctcaaattaagccgcgaattgtcccgtgtacgcaccgatttgccgctcgaagttgatttcggtcgccgccgcgaacctgactgggagggtcttaaagcgtttttagagcgtcttgaatttggttcgctcttgcatgaattcggccttttagaaagcccgttactggccgaagaagcaccttggccaccgcccgagggcgcgtttttaggttaccgtttgagtcgcccggaaccgatgtgggccgaattactggctcttgcagcgtctgcccagggacgtgtgtatcgcgcggaagaccctcatggtgcgctccgcggcctcttcgaagtccgtggactccttgccaaagacttagctgttgttgcattgcgcgaaggtcttgatttacctccgactgatgatccaatgcttcttgcgtacctcttggacccgtcaaacacgacgcccgaaggcgtagcccgtcgttacggcggcgagtggaccgaagatgcagcgaaacgcgcgttattggccgaacgtttgcacgaaaatttattaggacgtttgcaaggcgaggaacgtctcctctggctttacgaagaagtggagaaaccattgagtcgcgtgctcgcgcatatggaagctaccggtgtcaaattagacgtggcgtatttggagaatctcagccttgaagttgctgcccacatgcgccgcttggaggaagaagtattccgtttagcaggccgttcctttcgccttaactctcgcgatcagttagaacgtgtgttgttcgatgaacttggtctccctcctatcggcaagacagagaagaccggtaaacgtagcacttcagcggcggttttagaagctcttcgcgaagtccatcccattgtggacaagatcttgcagtaccgcgaaatggcgaaattgaaaggcacctatattgaccgtcttccggcattagtccacccgaaaacgggacgcctccatacccgcttcaaccaaacagccacggcgaccggtcgtttgtcctcctctgatccaaaccttcagaatattccagtacgtaccccattgggccagaagatccgccgtgcgtttgtagctgaggagggttggcgtttagtggccctcgattatcgtcaaattgaattacgtgtccttgcccatctttctggcgatgagaacctcatccgcgtgtttcaggaaggcaaagacattcacactcaaacggcaagctggatgtttggattatcagctgaagcgatcgatcctttgatgcgtcgtgcagcgaagaccatcaatttcggtgttctctacggtatgagtgcctttcgtttgtcgcaggaattaggcattccctatgaagaagctcaggcgttcattcagaaatactttcaaagctatcccaaagttaaagcatggatcgagaagactctccgtgaaggccgcacacgtggttacgtagagaccttatttggacgtcgccgctatgttcccgatttaaactggcgcgtgaaaggcaagcgtgaagccgccgaacgcatggcgttcaacatgcctgtacagggcacggcagctgacctcatgaaacttgcaatggtgcgcctttttccacaattgcgtgaagttggtgcccgcatgctcttgcaggtccacgatgaactcttgttagaagcgccaaaagagcgtgcggaagaggtggcagccctcgcgaaagaagttatggaaggcgtgtggcccttagcggtgcctcttgaagtcgaagttggtattggcgaggattggctggctgccaaagga

SEQ ID NO: 5960 - protein, 841 aa, synthetic construct
  REGION 1..841: note = Variant of DNA polymerase I from Thermus sp. strain 2.9
MHHHHHHGGSGVLPVFEPKGRVLLVDGHHLAYRNFFALKGLTTSLGEPVQGVYGFAKSLLKALKEDGDVVIVVFDAKAPSFRHEAYEAYKAGRAPTPEDFPRQLALMKELVDLLGLERLEVPGFEADDVLATLAKKAEREGYEVQILTADRDLFQLLSPRISVLHPEGHRITPEWLWEKYGLRPEQWVDFRALAGDPSDNIPGVKGIGEKTALKLLKEWGSLENLLKNLDQVKPESVREKILAHLEDLKLSRELSRVRTDLPLEVDFGRRREPDWEGLKAFLERLEFGSLLHEFGLLESPLLAEEAPWPPPEGAFLGYRLSRPEPMWAELLALAASAQGRVYRAEDPHGALRGLFEVRGLLAKDLAVVALREGLDLPPTDDPMLLAYLLDPSNTTPEGVARRYGGEWTEDAAKRALLAERLHENLLGRLQGEERLLWLYEEVEKPLSRVLAHMEATGVKLDVAYLENLSLEVAAHMRRLEEEVFRLAGRSFRLNSRDQLERVLFDELGLPPIGKTEKTGKRSTSAAVLEALREVHPIVDKILQYREMAKLKGTYIDRLPALVHPKTGRLHTRFNQTATATGRLSSSDPNLQNIPVRTPLGQKIRRAFVAEEGWRLVALDYRQIELRVLAHLSGDENLIRVFQEGKDIHTQTASWMFGLSAEAIDPLMRRAAKTINFGVLYGMSAFRLSQELGIPYEEAQAFIQKYFQSYPKVKAWIEKTLREGRTRGYVETLFGRRRYVPDLNWRVKGKREAAERMAFNMPVQGTAADLMKLAMVRLFPQLREVGARMLLQVHDELLLEAPKERAEEVAALAKEVMEGVWPLAVPLEVEVGIGEDWLAAKG

SEQ ID NO: 5961 - DNA, 2523 bp, synthetic construct
  misc_feature 1..2523: note = Variant of DNA polymerase I from Thermus sp. strain 2.9
  source 1..2523: mol_type = other DNA
atgcaccatcatcatcatcatggcggtagcggcgtgttaccggtgttcgagcctaaaggtcgcgtgcttctggttgatggccatcatctcgcgtatcgtaacttctttgccctgaaaggattaaccaccagcctgggcgagccggtacagggtgtctacggctttgcaaagtcgctcctgaaagctctgaaagaagacggtgatgtggtgattgttgtctttgatgcgaaagcgccaagttttcgccacgaagcgtacgaagcttacaaagccgggcgtgctccaacgccggaagactttcctcgccaattggcgcttatgaaggaattagtggatttgcttggcctcgaacgcttggaagttcccggtttcgaggcagacgacgtattagcgactctcgcaaagaaagccgaacgtgagggctatgaagtccagatcttgacagcagatcgcgatcttttccagcttttatctccgcgcatctcggtgttacacccggaagggcatcgtatcaccccggaatggctctgggagaaatatggtttgcgtcccgaacaatgggtggattttcgcgccttagcaggcgatccgagcgacaatattccgggagttaaaggtatcggcgagaagacggcgctcaagctccttaaagaatgggggtcgttggagaacttgcttaagaatttagatcaggtcaaaccagagtcagtgcgtgagaagattcttgctcacctcgaagacctcaaattaagccgcgaattgtcccgtgtacgcaccgatttgccgctcgaagttgatttcggtcgccgccgcgaacctgactgggagggtcttaaagcgtttttagagcgtcttgaatttggttcgctcttgcatgaattcggccttttagaaagcccgttactggccgaagaagcaccttggccaccgcccgagggcgcgtttttaggttaccgtttgagtcgcccggaaccgatgtgggccgaattactggctcttgcagcgtctgcccagggacgtgtgtatcgcgcggaagaccctcatggtgcggttcgcggcctcttcgaagtccgtggactccttgccaaagacttagctgttgttgcattgcgcgaaggtcttgatttacctccgactgatgatccaatgcttcttgcgtacctcttggacccgtcaaacacgacgcccgaaggcgtagcccgtcgttacggcggcgagtggaccgaagatgcagcgaaacgcgcgttattggccgaacgtttgcacgaaaatttattaggacgtttgcaaggcgaggaacgtctcctctggctttacgaagaagtggagaaaccattgagtcgcgtgctcgcgcatatggaagctaccggtgtcaaattagacgtggcgtatttggagaatctcagccttgaagttgctgcccacatgcgccgcttggaggaagaagtattccgtttagcaggccgttcctttcgccttaactctcgcgatcagttagaacgtgtgttgttcgatgaacttggtctccctcctatcggcaagacagagaagaccggtaaacgtagcacttcagcggcggttttagaagctcttcgcgaagtccatcccattgtggacaagatcttgcagtaccgcgaaatggcgaaattgaaaggcacctatattgaccgtcttccggcattagtccacccgaaaacgggacgcctccatacccgcttcaaccaaacagccacggcgaccggtcgtttgtcctcctctgatccaaaccttcagaatattccagtacgtaccccattgggccagaagatccgccgtgcgtttgtagctgaggagggttggcgtttagtggccctcgattatcgtcaaattgaattacgtgtccttgcccatctttctggcgatgagaacctcatccgcgtgtttcaggaaggcaaagacattcacactcaaacggcaagctggatgtttggattatcagctgaagcgatcgatcctttgatgcgtcgtgcagcgaagaccatcaatttcggtgttctctacggtatgagtgcctttcgtttgtcgcaggaattaggcattccctatgaagaagctcaggcgttcattcagaaatactttcaaagctatcccaaagttaaagcatggatcgagaagactctccgtgaaggccgcacacgtggttacgtagagaccttatttggacgtcgccgctatgttcccgatttaaacgctcgcgtgaaaggcaagcgtgaagccgccgaacgcatggcgttcaacatgcctgtacagggcacggcagctgacctcatgaaacttgcaatggtgcgcctttttccacaattgcgtgaagttggtgcccgcatgctcttgcaggtccacgatgaactcttgttagaagcgccaaaagagcgtgcggaagaggtggcagccctcgcgaaagaagttatggaaggcgtgtggcccttagcggtgcctcttgaagtcgaagttggtattggcgaggattggctggctgccaaagga

SEQ ID NO: 5962 - protein, 841 aa, synthetic construct
  REGION 1..841: note = Variant of DNA polymerase I from Thermus sp. strain 2.9
MHHHHHHGGSGVLPVFEPKGRVLLVDGHHLAYRNFFALKGLTTSLGEPVQGVYGFAKSLLKALKEDGDVVIVVFDAKAPSFRHEAYEAYKAGRAPTPEDFPRQLALMKELVDLLGLERLEVPGFEADDVLATLAKKAEREGYEVQILTADRDLFQLLSPRISVLHPEGHRITPEWLWEKYGLRPEQWVDFRALAGDPSDNIPGVKGIGEKTALKLLKEWGSLENLLKNLDQVKPESVREKILAHLEDLKLSRELSRVRTDLPLEVDFGRRREPDWEGLKAFLERLEFGSLLHEFGLLESPLLAEEAPWPPPEGAFLGYRLSRPEPMWAELLALAASAQGRVYRAEDPHGAVRGLFEVRGLLAKDLAVVALREGLDLPPTDDPMLLAYLLDPSNTTPEGVARRYGGEWTEDAAKRALLAERLHENLLGRLQGEERLLWLYEEVEKPLSRVLAHMEATGVKLDVAYLENLSLEVAAHMRRLEEEVFRLAGRSFRLNSRDQLERVLFDELGLPPIGKTEKTGKRSTSAAVLEALREVHPIVDKILQYREMAKLKGTYIDRLPALVHPKTGRLHTRFNQTATATGRLSSSDPNLQNIPVRTPLGQKIRRAFVAEEGWRLVALDYRQIELRVLAHLSGDENLIRVFQEGKDIHTQTASWMFGLSAEAIDPLMRRAAKTINFGVLYGMSAFRLSQELGIPYEEAQAFIQKYFQSYPKVKAWIEKTLREGRTRGYVETLFGRRRYVPDLNARVKGKREAAERMAFNMPVQGTAADLMKLAMVRLFPQLREVGARMLLQVHDELLLEAPKERAEEVAALAKEVMEGVWPLAVPLEVEVGIGEDWLAAKG

SEQ ID NO: 5963 - DNA, 2523 bp, synthetic construct
  misc_feature 1..2523: note = Variant of DNA polymerase I from Thermus sp. strain 2.9
  source 1..2523: mol_type = other DNA
atgcaccatcatcatcatcatggcggtagcggcgtgttaccggtgttcgagcctaaaggtcgcgtgcttctggttgatggccatcatctcgcgtatcgtaacttctttgccctgaaaggattaaccaccagcctgggcgagccggtacagggtgtctacggctttgcaaagtcgctcctgaaagctctgaaagaagacggtgatgtggtgattgttgtctttgatgcgaaagcgccaagttttcgccacgaagcgtacgaagcttacaaagccgggcgtgctccaacgccggaagactttcctcgccaattggcgcttatgaaggaattagtggatttgcttggcctcgaacgcttggaagttcccggtttcgaggcagacgacgtattagcgactctcgcaaagaaagccgaacgtgagggctatgaagtccagatcttgacagcagatcgcgatcttttccagcttttatctccgcgcatctcggtgttacacccggaagggcatcgtatcaccccggaatggctctgggagaaatatggtttgcgtcccgaacaatgggtggattttcgcgccttagcaggcgatccgagcgacaatattccgggagttaaaggtatcggcgagaagacggcgctcaagctccttaaagaatgggggtcgttggagaacttgcttaagaatttagatcaggtcaaaccagagtcagtgcgtgagaagattcttgctcacctcgaagacctcaaattaagccgcgaattgtcccgtgtacgcaccgatttgccgctcgaagttgatttcggtcgccgccgcgaacctgactgggagggtcttaaagcgtttttagagcgtcttgaatttggttcgctcttgcatgaattcggccttttagaaagcccgttactggccgaagaagcaccttggccaccgcccgagggcgcgtttttaggttaccgtttgagtcgcccggaaccgatgtgggccgaattactggctcttgcagcgtctgcccagggacgtgtgtatcgcgcgggggaccctcatggtgcgctccgcggcctcttcgaagtccgtggactccttgccaaagacttagctgttgttgcattgcgcgaaggtcttgatttacctccgactgatgatccaatgcttcttgcgtacctcttggacccgtcaaacacgacgcccgaaggcgtagcccgtcgttacggcggcgagtggaccgaagatgcagcgaaacgcgcgttattggccgaacgtttgcacgaaaatttattaggacgtttgcaaggcgaggaacgtctcctctggctttacgaagaagtggagaaaccattgagtcgcgtgctcgcgcatatggaagctaccggtgtcaaattagacgtggcgtatttggagaatctcagccttgaagttgctgcccacatgcgccgcttggaggaagaagtattccgtttagcaggccgttcctttcgccttaactctcgcgatcagttagaacgtgtgttgttcgatgaacttggtctccctcctatcggcaagacagagaagaccggtaaacgtagcacttcagcggcggttttagaagctcttcgcgaagtccatcccattgtggacaagatcttgcagtaccgcgaaatggcgaaattgaaaggcacctatattgaccgtcttccggcattagtccacccgaaaacgggacgcctccatacccgcttcaaccaaacagccacggcgaccggtcgtttgtcctcctctgatccaaaccttcagaatattccagtacgtaccccattgggccagaagatccgccgtgcgtttgtagctgaggagggttggcgtttagtggccctcgattatcgtcaaattgaattacgtgtccttgcccatctttctggcgatgagaacctcatccgcgtgtttcaggaaggcaaagacattcacactcaaacggcaagctggatgtttggattatcagctgaagcgatcgatcctttgatgcgtcgtgcagcgaagaccatcaatttcggtgttctctacggtatgagtgcctttcgtttgtcgcaggaattaggcattccctatgaagaagctcaggcgttcattcagaaatactttcaaagctatcccaaagttaaagcatggatcgagaagactctccgtgaaggccgcacacgtggttacgtagagaccttatttggacgtcgccgctatgttcccgatttaaacgctcgcgtgaaaggcaagcgtgaagccgccgaacgcatggcgttcaacatgcctgtacagggcacggcagctgacctcatgaaacttgcaatggtgcgcctttttccacaattgcgtgaagttggtgcccgcatgctcttgcaggtccacgatgaactcttgttagaagcgccaaaagagcgtgcggaagaggtggcagccctcgcgaaagaagttatggaaggcgtgtggcccttagcggtgcctcttgaagtcgaagttggtattggcgaggattggctggctgccaaagga

SEQ ID NO: 5964 - protein, 841 aa, synthetic construct
  REGION 1..841: note = Variant of DNA polymerase I from Thermus sp. strain 2.9
MHHHHHHGGSGVLPVFEPKGRVLLVDGHHLAYRNFFALKGLTTSLGEPVQGVYGFAKSLLKALKEDGDVVIVVFDAKAPSFRHEAYEAYKAGRAPTPEDFPRQLALMKELVDLLGLERLEVPGFEADDVLATLAKKAEREGYEVQILTADRDLFQLLSPRISVLHPEGHRITPEWLWEKYGLRPEQWVDFRALAGDPSDNIPGVKGIGEKTALKLLKEWGSLENLLKNLDQVKPESVREKILAHLEDLKLSRELSRVRTDLPLEVDFGRRREPDWEGLKAFLERLEFGSLLHEFGLLESPLLAEEAPWPPPEGAFLGYRLSRPEPMWAELLALAASAQGRVYRAGDPHGALRGLFEVRGLLAKDLAVVALREGLDLPPTDDPMLLAYLLDPSNTTPEGVARRYGGEWTEDAAKRALLAERLHENLLGRLQGEERLLWLYEEVEKPLSRVLAHMEATGVKLDVAYLENLSLEVAAHMRRLEEEVFRLAGRSFRLNSRDQLERVLFDELGLPPIGKTEKTGKRSTSAAVLEALREVHPIVDKILQYREMAKLKGTYIDRLPALVHPKTGRLHTRFNQTATATGRLSSSDPNLQNIPVRTPLGQKIRRAFVAEEGWRLVALDYRQIELRVLAHLSGDENLIRVFQEGKDIHTQTASWMFGLSAEAIDPLMRRAAKTINFGVLYGMSAFRLSQELGIPYEEAQAFIQKYFQSYPKVKAWIEKTLREGRTRGYVETLFGRRRYVPDLNARVKGKREAAERMAFNMPVQGTAADLMKLAMVRLFPQLREVGARMLLQVHDELLLEAPKERAEEVAALAKEVMEGVWPLAVPLEVEVGIGEDWLAAKG

SEQ ID NO: 5965 - DNA, 2523 bp, synthetic construct
  misc_feature 1..2523: note = Variant of DNA polymerase I from Thermus sp. strain 2.9
  source 1..2523: mol_type = other DNA
atgcaccatcatcatcatcatggcggtagcggcgtgttaccggtgttcgagcctaaaggtcgcgtgcttctggttgatggccatcatctcgcgtatcgtaacttctttgccctgaaaggattaaccaccagcctgggcgagccggtacagggtgtctacggctttgcaaagtcgctcctgaaagctctgaaagaagacggtgatgtggtgattgttgtctttgatgcgaaagcgccaagttttcgccacgaagcgtacgaagcttacaaagccgggcgtgctccaacgccggaagactttcctcgccaattggcgcttatgaaggaattagtggatttgcttggcctcgaacgcttggaagttcccggtttcgaggcagacgacgtattagcgactctcgcaaagaaagccgaacgtgagggctatgaagtccagatcttgacagcagatcgcgatcttttccagcttttatctccgcgcatctcggtgttacacccggaagggcatcgtatcaccccggaatggctctgggagaaatatggtttgcgtcccgaacaatgggtggattttcgcgccttagcaggcgatccgagcgacaatattccgggagttaaaggtatcggcgagaagacggcgctcaagctccttaaagaatgggggtcgttggagaacttgcttaagaatttagatcaggtcaaaccagagtcagtgcgtgagaagattcttgctcacctcgaagacctcaaattaagccgcgaattgtcccgtgtacgcaccgatttgccgctcgaagttgatttcggtcgccgccgcgaacctgactgggagggtcttaaagcgtttttagagcgtcttgaatttggttcgctcttgcatgaattcggccttttagaaagcccgttactggccgaagaagcaccttggccaccgcccgagggcgcgtttttaggttaccgtttgagtcgcccggaaccgatgtgggccgaattactggctcttgcagcgtctgcccagggacgtgtgtatcgcgcggaagaccctcatggtgcgctccgcggcctcttcgaagtccgtggactccttgccaaagacttagctgttgttgcattgcgcgaaggtcttgatttacctccgactgatgatccaatgcttcttgcgtacctcttggacccgtcaaacacgacgcccgaaggcgtagcccgtcgttacggcggcgagtggaccgaagatgcagcgaaacgcgcgttattggccgaacgtttgcacgaaaatttattaggacgtttgcaaggcgaggaacgtctcctctggctttacgaagaagtggagaaaccattgagtcgcgtgctcgcgcatatggaagctaccggtgtcaaattagacgtggcgtatttggagaatctcagccttgaagttgctgcccacatgcgccgcttggaggaagaagtattccgtttagcaggccgttcctttcgccttaactctcgcgatcagttagaacgtgtgttgttcgatgaacttggtatgcctcctatcggcaagacagagaagaccggtaaacgtagcacttcagcggcggttttagaagctcttcgcgaagtccatcccattgtggacaagatcttgcagtaccgcgaaatggcgaaattgaaaggcacctatattgaccgtcttccggcattagtccacccgaaaacgggacgcctccatacccgcttcaaccaaacagccacggcgaccggtcgtttgtcctcctctgatccaaaccttcagaatattccagtacgtaccccattgggccagaagatccgccgtgcgtttgtagctgaggagggttggcgtttagtggccctcgattatcgtcaaattgaattacgtgtccttgcccatctttctggcgatgagaacctcatccgcgtgtttcaggaaggcaaagacattcacactcaaacggcaagctggatgtttggattatcagctgaagcgatcgatcctttgatgcgtcgtgcagcgaagaccatcaatttcggtgttctctacggtatgagtgcctttcgtttgtcgcaggaattaggcattccctatgaagaagctcaggcgttcattcagaaatactttcaaagctatcccaaagttaaagcatggatcgagaagactctccgtgaaggccgcacacgtggttacgtagagaccttatttggacgtcgccgctatgttcccgatttaaacgctcgcgtgaaaggcaagcgtgaagccgccgaacgcatggcgttcaacatgcctgtacagggcacggcagctgacctcatgaaacttgcaatggtgcgcctttttccacaattgcgtgaagttggtgcccgcatgctcttgcaggtccacgatgaactcttgttagaagcgccaaaagagcgtgcggaagaggtggcagccctcgcgaaagaagttatggaaggcgtgtggcccttagcggtgcctcttgaagtcgaagttggtattggcgaggattggctggctgccaaagga

SEQ ID NO: 5966 - protein, 841 aa, synthetic construct
  REGION 1..841: note = Variant of DNA polymerase I from Thermus sp. strain 2.9
MHHHHHHGGSGVLPVFEPKGRVLLVDGHHLAYRNFFALKGLTTSLGEPVQGVYGFAKSLLKALKEDGDVVIVVFDAKAPSFRHEAYEAYKAGRAPTPEDFPRQLALMKELVDLLGLERLEVPGFEADDVLATLAKKAEREGYEVQILTADRDLFQLLSPRISVLHPEGHRITPEWLWEKYGLRPEQWVDFRALAGDPSDNIPGVKGIGEKTALKLLKEWGSLENLLKNLDQVKPESVREKILAHLEDLKLSRELSRVRTDLPLEVDFGRRREPDWEGLKAFLERLEFGSLLHEFGLLESPLLAEEAPWPPPEGAFLGYRLSRPEPMWAELLALAASAQGRVYRAEDPHGALRGLFEVRGLLAKDLAVVALREGLDLPPTDDPMLLAYLLDPSNTTPEGVARRYGGEWTEDAAKRALLAERLHENLLGRLQGEERLLWLYEEVEKPLSRVLAHMEATGVKLDVAYLENLSLEVAAHMRRLEEEVFRLAGRSFRLNSRDQLERVLFDELGMPPIGKTEKTGKRSTSAAVLEALREVHPIVDKILQYREMAKLKGTYIDRLPALVHPKTGRLHTRFNQTATATGRLSSSDPNLQNIPVRTPLGQKIRRAFVAEEGWRLVALDYRQIELRVLAHLSGDENLIRVFQEGKDIHTQTASWMFGLSAEAIDPLMRRAAKTINFGVLYGMSAFRLSQELGIPYEEAQAFIQKYFQSYPKVKAWIEKTLREGRTRGYVETLFGRRRYVPDLNARVKGKREAAERMAFNMPVQGTAADLMKLAMVRLFPQLREVGARMLLQVHDELLLEAPKERAEEVAALAKEVMEGVWPLAVPLEVEVGIGEDWLAAKG

SEQ ID NO: 5967 - DNA, 2523 bp, synthetic construct
  misc_feature 1..2523: note = Variant of DNA polymerase I from Thermus sp. strain 2.9
  source 1..2523: mol_type = other DNA
atgcaccatcatcatcatcatggcggtagcggcgtgttaccggtgttcgagcctaaaggtcgcgtgcttctggttgatggccatcatctcgcgtatcgtaacttctttgccctgaaaggattaaccaccagcctgggcgagccggtacagggtgtctacggctttgcaaagtcgctcctgaaagctctgaaagaagacggtgatgtggtgattgttgtctttgatgcgaaagcgccaagttttcgccacgaagcgtacgaagcttacaaagccgggcgtgctccaacgccggaagactttcctcgccaattggcgcttatgaaggaattagtggatttgcttggcctcgaacgcttggaagttcccggtttcgaggcagacgacgtattagcgactctcgcaaagaaagccgaacgtgagggctatgaagtccagatcttgacagcagatcgcgatcttttccagcttttatctccgcgcatctcggtgttacacccggaagggcatcgtatcaccccggaatggctctgggagaaatatggtttgcgtcccgaacaatgggtggattttcgcgccttagcaggcgatccgagcgacaatattccgggagttaaaggtatcggcgagaagacggcgctcaagctccttaaagaatgggggtcgttggagaacttgcttaagaatttagatcaggtcaaaccagagtcagtgcgtgagaagattcttgctcacctcgaagacctcaaattaagccgcgaattgtcccgtgtacgcaccgatttgccgctcgaagttgatttcggccgccgccgcgaacctgactgggagggtcttaaagcgtttttagagcgtcttgaatttggttcgctcttgcatgaattcggccttttagaaagcccgttactggccgaagaagcaccttggccaccgcccgagggcgcgtttttaggttaccgtttgagtcgcccggaaccgatgtgggccgaattactggctcttgcagcgtctgcccagggacgtgtgtatcgcgcggaagaccctcatggtgcgctccgcggcctcttcgaagtccgtggactccttgccaaagacttagctgttgttgcattgcgcgaaggtcttgatttacctccgactgatgatccaatgcttcttgcgtacctcttggacccgtcaaacacgacgcccgaaggcgtagcccgtcgttacggcggcgagtggaccgaagatgcagcgaaacgcgcgttattggccgaacgtttgcacgcaaatttattaggacgtttgcaaggcgaggaacgtctcctctggctttacgaagaagtggagaaaccattgagtcgcgtgctcgcgcatatggaagctaccggtgtcaaattagacgtggcgtatttggaggcccttagccttgaagttgctgcccacatgcgccgcttggaggaagaagtattccgtttagcaggccgctcctttcgccttaactctcgcgatcagttagaacgtgtgttgttcgatgaacttggtctccctcctatcggcaagacagagaagaccggtaaacgtagcacttcagcggcggttttagaagctcttcgcgaagtccatcccattgtggacaagatcttgcagtaccgcgaaatggcgaaattgaaaggcacctatattgaccgtcttccggcattagtccacccgaaaacgggacgcctccatacccgcttcaaccaaacagccacggcgaccggtcgtttgtccagttctgatccaaaccttcagaatattccagtacgtaccccattgggccagaagatccgccgtgcgtttgtagctgaggagggttggcgtttagtggccctcgattatagtcaaattgaattacgtgtccttgcccatctttctggcgatgagaacctcatccgcgtgtttcaggaaggcaaagacattcacactcaaacggcaagctggatgtttggattatcagctgaagcgatcgatcctttgatgcgtcgtgcagcgaagaccatcaatttcggtgttctctacggtatgagtgcctttcgtttgtcgcaggaattaggcattccctatgaagaagctcaggcgttcattcagaaatactttcaaagctatcccaaagttaaagcatggatcgagaagactctcgaggaaggccgcacacgtggttacgtagagaccttatttggacgtcgccgctatgttcccgatttaaacgctcgcgtgaaaggcgtacgtgaagccgccgaacgcatggcgttcaacatgcctgtacagggcacggcagctgacctcatgaaacttgcaatggtgcgcctttttccacaattgcgtgaagttggtgcccgcatgctcttgcaggtccacgatgaactcttgttagaagcgccaaaagagcgtgcggaagaggtggcagccctcgcgaaagaagttatggaaggcgtgtggcccttagcggtgcctcttgaagtcgaagttggtattggcgaggattggctggctgccaaagga

SEQ ID NO: 5968 - protein, 841 aa, synthetic construct
  REGION 1..841: note = Variant of DNA polymerase I from Thermus sp. strain 2.9
MHHHHHHGGSGVLPVFEPKGRVLLVDGHHLAYRNFFALKGLTTSLGEPVQGVYGFAKSLLKALKEDGDVVIVVFDAKAPSFRHEAYEAYKAGRAPTPEDFPRQLALMKELVDLLGLERLEVPGFEADDVLATLAKKAEREGYEVQILTADRDLFQLLSPRISVLHPEGHRITPEWLWEKYGLRPEQWVDFRALAGDPSDNIPGVKGIGEKTALKLLKEWGSLENLLKNLDQVKPESVREKILAHLEDLKLSRELSRVRTDLPLEVDFGRRREPDWEGLKAFLERLEFGSLLHEFGLLESPLLAEEAPWPPPEGAFLGYRLSRPEPMWAELLALAASAQGRVYRAEDPHGALRGLFEVRGLLAKDLAVVALREGLDLPPTDDPMLLAYLLDPSNTTPEGVARRYGGEWTEDAAKRALLAERLHANLLGRLQGEERLLWLYEEVEKPLSRVLAHMEATGVKLDVAYLEALSLEVAAHMRRLEEEVFRLAGRSFRLNSRDQLERVLFDELGLPPIGKTEKTGKRSTSAAVLEALREVHPIVDKILQYREMAKLKGTYIDRLPALVHPKTGRLHTRFNQTATATGRLSSSDPNLQNIPVRTPLGQKIRRAFVAEEGWRLVALDYSQIELRVLAHLSGDENLIRVFQEGKDIHTQTASWMFGLSAEAIDPLMRRAAKTINFGVLYGMSAFRLSQELGIPYEEAQAFIQKYFQSYPKVKAWIEKTLEEGRTRGYVETLFGRRRYVPDLNARVKGVREAAERMAFNMPVQGTAADLMKLAMVRLFPQLREVGARMLLQVHDELLLEAPKERAEEVAALAKEVMEGVWPLAVPLEVEVGIGEDWLAAKG

SEQ ID NO: 5969 - DNA, 2523 bp, synthetic construct
  misc_feature 1..2523: note = Variant of DNA polymerase I from Thermus sp. strain 2.9
  source 1..2523: mol_type = other DNA
atgcaccatcatcatcatcatggcggtagcggcgtgttaccggtgttcgagcctaaaggtcgcgtgcttctggttgatggccatcatctcgcgtatcgtaacttctttgccctgaaaggattaaccaccagcctgggcgagccggtacagggtgtctacggctttgcaaagtcgctcctgaaagctctgaaagaagacggtgatgtggtgattgttgtctttgatgcgaaagcgccaagttttcgccacgaagcgtacgaagcttacaaagccgggcgtgctccaacgccggaagactttcctcgccaattggcgcttatgaaggaattagtggatttgcttggcctcgaacgcttggaagttcccggtttcgaggcagacgacgtattagcgactctcgcaaagaaagccgaacgtgagggctatgaagtccagatcttgacagcagatcgcgatcttttccagcttttatctccgcgcatctcggtgttacacccggaagggcatcgtatcaccccggaatggctctgggagaaatatggtttgcgtcccgaacaatgggtggattttcgcgccttagcaggcgatccgagcgacaatattccgggagttaaaggtatcggcgagaagacggcgctcaagctccttaaagaatgggggtcgttggagaacttgcttaagaatttagatcaggtcaaaccagagtcagtgcgtgagaagattcttgctcacctcgaagacctcaaattaagccgcgaattgtcccgtgtacgcaccgatttgccgctcgaagttgatttcggtcgccgccgcgaacctgactgggagggtcttaaagcgtttttagagcgtcttgaatttggttcgctcttgcatgaattcggccttttagaaagcccgttactggccgaagaagcaccttggccaccgcccgagggcgcgtttttaggttaccgtttgagtcgcccggaaccgatgtgggccgaattactggctcttgcagcgtctgcccagggacgtgtgtatcgcgcggaagaccctcatggtgcgctccgcggcctcttcgaagtccgtaccctccttgccaaagacttagctgttgttgcattgcgcgaaggtcttgatttacctccgactgatgatccaatgcttcttgcgtacctcttggacccgtcaaacacgacgcccgaaggcgtagcccgtcgttacggcggcgagtggaccgaagatgcaggcaaacgcgcgttattggccgaacgtttgcacgaaaatttattaggacgtttgcaaggcgaggaacgtctcctctggctttacgaagaagtggagaaaccattgagtcgcgtgctcgcgcatatggaagctaccggtgtcaaattagacgtggcgtatttggagaatctcagccttgaagttgctgcccacatgcgccgcttggaggaagaagtattccgtttagcaggccgttcctttcgccttaactctcgcgatcagttagaacgtgtgttgttcgatgaacttggtctccctcctatcggcaagacagagaagaccggtaaacgtagcacttcagcggcggttttagaagctcttcgcgaagtccatcccattgtggacaagatcttgcagtaccgcgaaatggcgaaattgaaaggcacctatattgaccgtcttccggcattagtccacccgaaaacgggacgcctccatacccgcttcaaccaaacagccacggcgaccggtcgtttgtcctcctctgatccaaaccttcagaatattccagtacgtaccccattgggccagaagatccgccgtgcgtttgtagctgaggagggttggcgtttagtggccctcgattatcgtcaaattgaattacgtgtccttgcccatctttctggcgatgagaacctcatccgcgtgtttcaggaaggcaaagacattcacactcaaacggcaagctggatgtttggattatcagctgaagcgatcgatcctttgatgcgtcgtgcagcgaagaccatcaatttcggtgttctctacggtatgagtgcctttcgtttgtcgcaggaattaggcattccctatgaagaagctcaggcgttcattcagaaatactttcaaagctatcccaaagttaaagcatggatcgagaagactctccgtgaaggccgcacacgtggttacgtagagaccttatttggacgtcgccgctatgttcccgatttaaacgctcgcgtgaaaggcaagcgtgaagccgccgaacgcatggcgttcaacatgcctgtacagggcacggcagctgacctcatgaaacttgcaatggtgcgcctttttccacaattgcgtgaagttggtgcccgcatgctgttgcaggtccacgatgaactcttgttagaagcgccaaaagagcgtgcggaagaggtggcagccctcgcgaaagaagttatggaaggcgtgtggcccttagcggtgcctcttgaagtcgaagttggtattggcgaggattggctggctgccaaagga

SEQ ID NO: 5970 - protein, 841 aa, synthetic construct
  REGION 1..841: note = Variant of DNA polymerase I from Thermus sp. strain 2.9
MHHHHHHGGSGVLPVFEPKGRVLLVDGHHLAYRNFFALKGLTTSLGEPVQGVYGFAKSLLKALKEDGDVVIVVFDAKAPSFRHEAYEAYKAGRAPTPEDFPRQLALMKELVDLLGLERLEVPGFEADDVLATLAKKAEREGYEVQILTADRDLFQLLSPRISVLHPEGHRITPEWLWEKYGLRPEQWVDFRALAGDPSDNIPGVKGIGEKTALKLLKEWGSLENLLKNLDQVKPESVREKILAHLEDLKLSRELSRVRTDLPLEVDFGRRREPDWEGLKAFLERLEFGSLLHEFGLLESPLLAEEAPWPPPEGAFLGYRLSRPEPMWAELLALAASAQGRVYRAEDPHGALRGLFEVRTLLAKDLAVVALREGLDLPPTDDPMLLAYLLDPSNTTPEGVARRYGGEWTEDAGKRALLAERLHENLLGRLQGEERLLWLYEEVEKPLSRVLAHMEATGVKLDVAYLENLSLEVAAHMRRLEEEVFRLAGRSFRLNSRDQLERVLFDELGLPPIGKTEKTGKRSTSAAVLEALREVHPIVDKILQYREMAKLKGTYIDRLPALVHPKTGRLHTRFNQTATATGRLSSSDPNLQNIPVRTPLGQKIRRAFVAEEGWRLVALDYRQIELRVLAHLSGDENLIRVFQEGKDIHTQTASWMFGLSAEAIDPLMRRAAKTINFGVLYGMSAFRLSQELGIPYEEAQAFIQKYFQSYPKVKAWIEKTLREGRTRGYVETLFGRRRYVPDLNARVKGKREAAERMAFNMPVQGTAADLMKLAMVRLFPQLREVGARMLLQVHDELLLEAPKERAEEVAALAKEVMEGVWPLAVPLEVEVGIGEDWLAAKG

SEQ ID NO: 5971 - DNA, 2523 bp, synthetic construct
  misc_feature 1..2523: note = Variant of DNA polymerase I from Thermus sp. strain 2.9
  source 1..2523: mol_type = other DNA
atgcaccatcatcatcatcatggcggtagcggcgtgttaccggtgttcgagcctaaaggtcgcgtgcttctggttgatggccatcatctcgcgtatcgtaacttctttgccctgaaaggattaaccaccagcctgggcgagccggtacagggtgtctacggctttgcaaagtcgctcctgaaagctctgaaagaagacggtgatgtggtgattgttgtctttgatgcgaaagcgccaagttttcgccacgaagcgtacgaagcttacaaagccgggcgtgctccaacgccggaagactttcctcgccaattggcgcttatgaaggaattagtggatttgcttggcctcgaacgcttggaagttcccggtttcgaggcagacgacgtattagcgactctcgcaaagaaagccgaacgtgagggctatgaagtccagatcttgacagcagatcgcgatcttttccagcttttatctccgcgcatctcggtgttacacccggaagggcatcgtatcaccccggaatggctctgggagaaatatggtttgcgtcccgaacaatgggtggattttcgcgccttagcaggcgatccgagcgacaatattccgggagttaaaggtatcggcgagaagacggcgctcaagctccttaaagaatgggggtcgttggagaacttgcttaagaatttagatcaggtcaaaccagagtcagtgcgtgagaagattcttgctcacctcgaagacctcaaattaagccgcgaattgtcccgtgtacgcaccgatttgccgctcgaagttgatttcggtcgccgccgcgaacctgactgggagggtcttaaagcgtttttagagcgtcttgaatttggttcgctcttgcatgaattcggccttttagaaagcccgttactggccgaagaagcaccttggccaccgcccgagggcgcgtttttaggttaccgtttgagtcgcccggaaccgatgtgggccgaattactggctcttgcagcgtctgcccagggacgtgtgtatcgcgcggaagaccctcatggtgcgctccgcggcctcttcgaagtccgtggcctccttgccaaagacttagctgttgttgcattgcgcgaaggtcttgatttacctccgactgatgatccaatgcttcttgcgtacctcttggacccgtcaaacacgacgcccgaaggcgtagcccgtcgttacggcggcgagtggtgggaagatgcagccaaacgcgcgttattggccgaacgtttgcacgaaaatttattaggacgtttgcaaggcgaggagcgtctccgttggctttacgaagaagtggagaaaccattgagtcgcgtgctcgcgcatatggaagctaccggtgtcaaattagacgtggcgtatttggagaatctcagccttgaagttgctgcccacatgcgccgcttggaggaagaagtattccgtttagcaggccgttcctttcgccttaactctcgcgatcagttagaacgtgtgttgttcgatgaacttggtctccctcctatcggcaagacagagaagaccggtaaacgtagcacttcagcggcggttttagaagctcttcgcgaagtccatcccattgtggacaagatcttgcagtaccgcgaaatggcgaaattgaaaggcacctatattgaccgtcttccggcattagtccacccgaaaacgggacgcctccatacccgcttcaaccaaacagccacggcgaccggtcgtttgtcctcctctgatccaaaccttcagaatattccagtacgtacctttttgggccagaagatccgccgtgcgtttgtagctgagccgggttggcgtttagtggccctcgattatcgtcaaattgaattacgtgtccttgcccatctttctggcgatgagaacctcatccgcgtgtttcaggaaggcaaagacattcacactcaaacggcaagctggatgtttggattatcagctgaagcgatcgatcctttgatgcgtcgtgcagcgaagaccatcaatttcggtgttctctacggtatgagtgcctttcgtttgtcgcaggaattaggcattccctatgaagaagctcaggctttcattcagaaatactttcaaggctatcccaaagttaaagcatggatcgagaagactctccgtgaaggccgcacacgtggttacgtagagaccttatttggacgtcgccgctatgttcccgatttaaactcgcgcgtgaaaggcaagcgtgaagccgccgaacgcatggcgttcaacatgcctgtacagggcacggcagctgacctcatgaaacttgcaatggtgcgcctttttccacaattgcgtgaagttggtgcccgcatgctgttgcaggtccacgatgaactcttgttagaagcgccaaaagagcgtgcggaagaggtggcagccctcgcgaaagaagttatggaaggcgtgtggcccttagcggtgcctcttgaagtcgaagttggtattggcgaggattggctggctgccaaagga

SEQ ID NO: 5972 - protein, 841 aa, synthetic construct
  REGION 1..841: note = Variant of DNA polymerase I from Thermus sp. strain 2.9
MHHHHHHGGSGVLPVFEPKGRVLLVDGHHLAYRNFFALKGLTTSLGEPVQGVYGFAKSLLKALKEDGDVVIVVFDAKAPSFRHEAYEAYKAGRAPTPEDFPRQLALMKELVDLLGLERLEVPGFEADDVLATLAKKAEREGYEVQILTADRDLFQLLSPRISVLHPEGHRITPEWLWEKYGLRPEQWVDFRALAGDPSDNIPGVKGIGEKTALKLLKEWGSLENLLKNLDQVKPESVREKILAHLEDLKLSRELSRVRTDLPLEVDFGRRREPDWEGLKAFLERLEFGSLLHEFGLLESPLLAEEAPWPPPEGAFLGYRLSRPEPMWAELLALAASAQGRVYRAEDPHGALRGLFEVRGLLAKDLAVVALREGLDLPPTDDPMLLAYLLDPSNTTPEGVARRYGGEWWEDAAKRALLAERLHENLLGRLQGEERLRWLYEEVEKPLSRVLAHMEATGVKLDVAYLENLSLEVAAHMRRLEEEVFRLAGRSFRLNSRDQLERVLFDELGLPPIGKTEKTGKRSTSAAVLEALREVHPIVDKILQYREMAKLKGTYIDRLPALVHPKTGRLHTRFNQTATATGRLSSSDPNLQNIPVRTFLGQKIRRAFVAEPGWRLVALDYRQIELRVLAHLSGDENLIRVFQEGKDIHTQTASWMFGLSAEAIDPLMRRAAKTINFGVLYGMSAFRLSQELGIPYEEAQAFIQKYFQGYPKVKAWIEKTLREGRTRGYVETLFGRRRYVPDLNSRVKGKREAAERMAFNMPVQGTAADLMKLAMVRLFPQLREVGARMLLQVHDELLLEAPKERAEEVAALAKEVMEGVWPLAVPLEVEVGIGEDWLAAKG

SEQ ID NO: 5973 - DNA, 2523 bp, synthetic construct
  misc_feature 1..2523: note = Variant of DNA polymerase I from Thermus sp. strain 2.9
  source 1..2523: mol_type = other DNA
atgcaccatcatcatcatcatggcggtagcggcgtgttaccggtgttcgagcctaaaggtcgcgtgcttctggttgatggccatcatctcgcgtatcgtaacttctttgccctgaaaggattaaccaccagcctgggcgagccggtacagggtgtctacggctttgcaaagtcgctcctgaaagctctgaaagaagacggtgatgtggtgattgttgtctttgatgcgaaagcgccaagttttcgccacgaagcgtacgaagcttacaaagccgggcgtgctccaacgccggaagactttcctcgccaattggcgcttatgaaggaattagtggatttgcttggcctcgaacgcttggaagttcccggtttcgaggcagacgacgtattagcgactctcgcaaagaaagccgaacgtgagggctatgaagtccagatcttgacagcagatcgcgatcttttccagcttttatctccgcgcatctcggtgttacacccggaagggcatcgtatcaccccggaatggctctgggagaaatatggtttgcgtcccgaacaatgggtggattttcgcgccttagcaggcgatccgagcgacaatattccgggagttaaaggtatcggcgagaagacggcgctcaagctccttaaagaatgggggtcgttggagaacttgcttaagaatttagatcaggtcaaaccagagtcagtgcgtgagaagattcttgctcacctcgaagacctcaaattaagccgcgaattgtcccgtgtacgcaccgatttgccgctcgaagttgatttcggtcgccgccgcgaacctgactgggagggtcttaaagcgtttttagagcgtcttgaatttggttcgctcttgcatgaattcggccttttagaaagcccgttactggccgaagaagcaccttggccaccgcccgagggcgcgtttttaggttaccgtttgagtcgcccggaaccgatgtgggccgaattactggctcttgcagcgtctgcccagggacgtgtgtatcgctcggaagaccctcatggtgcgctccgcggcctcttcgaagtccgtggactccttgccaaagacttagctgttgttgcattgcgcgaaggtcttgatttacctccgactgatgatccaatgcttcttgcgtacctcttggacccgtcaaacacgacgcccgaaggcgtagcccgtcgttacggcggcgagtggaccgaagatgcagcgaaacgcgcgttattggccgaacgtttgcacgaaaatttattaggacgtttgcaaggcgaggaacgtctcctctggctttacgaagaagtggagaaaccattgagtcgcgtgctcgcgcatatggaagctaccggtgtcaaattagacgtggcgtatttggagaatctcagccttgaagttgctgcccacatgcgccgcttggaggaagaagtattccgtttagcaggccgttcctttcgccttaactctcgcgatcagttagaacgtgtgttgttcgatgaacttggtctccctcctatcggcaagacagagaagaccggtaaacgtagcacttcagcggcggttttagaagctcttcgcgaagtccatcccattgtggacaagatcttgcagtaccgcgaaatggcgaaattgaaaggcacctatattgaccgtcttccggcattagtccacccgaaaacgggacgcctccatacccgcttcaaccaaacagccacggcgaccggtcgtttgtcctcctctgatccaaaccttcagaatattccagtacgtaccccattgggccagaagatccgccgtgcgtttgtagctgaggagggttggcgtttagtggccctcgattatcgtcaaattgaattacgtgtccttgcccatctttctggcgatgagaacctcatccgcgtgtttcaggaaggcaaagacattcacactcaaacggcaagctggatgtttggattatcagctgaagcgatcgatcctttgatgcgtcgtgcagcgaagaccatcaatttcggtgttctctacggtatgagtgcctttcgtttgtcgcaggaattaggcattccctatgaagaagctcaggcgttcattcagaaatactttcaaagctatcccaaagttaaagcatggatcgagaagactctccgtgaaggccgcacacgtggttacgtagagaccttatttggacgtcgccgctatgttcccgatttaaacgctcgcgtgaaaggcaagcgtgaagccgccgaacgcatggcgttcaacatgcctgtacagggcacggcagctgacctcatgaaacttgcaatggtgcgcctttttccacaattgcgtgaagttggtgcccgcatgctcttgcaggtccacgatgaactcttgttagaagcgccaaaagagcgtgcggaagaggtggcagccctcgcgaaagaagttatggaaggcgtgtggccgttagcggtgcctcttgaagtcgaagttggtattggcgaggattggctggctgccaaagga

SEQ ID NO: 5974 - protein, 841 aa, synthetic construct
  REGION 1..841: note = Variant of DNA polymerase I from Thermus sp. strain 2.9
MHHHHHHGGSGVLPVFEPKGRVLLVDGHHLAYRNFFALKGLTTSLGEPVQGVYGFAKSLLKALKEDGDVVIVVFDAKAPSFRHEAYEAYKAGRAPTPEDFPRQLALMKELVDLLGLERLEVPGFEADDVLATLAKKAEREGYEVQILTADRDLFQLLSPRISVLHPEGHRITPEWLWEKYGLRPEQWVDFRALAGDPSDNIPGVKGIGEKTALKLLKEWGSLENLLKNLDQVKPESVREKILAHLEDLKLSRELSRVRTDLPLEVDFGRRREPDWEGLKAFLERLEFGSLLHEFGLLESPLLAEEAPWPPPEGAFLGYRLSRPEPMWAELLALAASAQGRVYRSEDPHGALRGLFEVRGLLAKDLAVVALREGLDLPPTDDPMLLAYLLDPSNTTPEGVARRYGGEWTEDAAKRALLAERLHENLLGRLQGEERLLWLYEEVEKPLSRVLAHMEATGVKLDVAYLENLSLEVAAHMRRLEEEVFRLAGRSFRLNSRDQLERVLFDELGLPPIGKTEKTGKRSTSAAVLEALREVHPIVDKILQYREMAKLKGTYIDRLPALVHPKTGRLHTRFNQTATATGRLSSSDPNLQNIPVRTPLGQKIRRAFVAEEGWRLVALDYRQIELRVLAHLSGDENLIRVFQEGKDIHTQTASWMFGLSAEAIDPLMRRAAKTINFGVLYGMSAFRLSQELGIPYEEAQAFIQKYFQSYPKVKAWIEKTLREGRTRGYVETLFGRRRYVPDLNARVKGKREAAERMAFNMPVQGTAADLMKLAMVRLFPQLREVGARMLLQVHDELLLEAPKERAEEVAALAKEVMEGVWPLAVPLEVEVGIGEDWLAAKG

SEQ ID NO: 5975 - DNA, 2523 bp, synthetic construct
  misc_feature 1..2523: note = Variant of DNA polymerase I from Thermus sp. strain 2.9
  source 1..2523: mol_type = other DNA
atgcaccatcatcatcatcatggcggtagcggcgtgttaccggtgttcgagcctaaaggtcgcgtgcttctggttgatggccatcatctcgcgtatcgtaacttctttgccctgaaaggattaaccaccagcctgggcgagccggtacagggtgtctacggctttgcaaagtcgctcctgaaagctctgaaagaagacggtgatgtggtgattgttgtctttgatgcgaaagcgccaagttttcgccacgaagcgtacgaagcttacaaagccgggcgtgctccaacgccggaagactttcctcgccaattggcgcttatgaaggaattagtggatttgcttggcctcgaacgcttggaagttcccggtttcgaggcagacgacgtattagcgactctcgcaaagaaagccgaacgtgagggctatgaagtccagatcttgacagcagatcgcgatcttttccagcttttatctccgcgcatctcggtgttacacccggaagggcatcgtatcaccccggaatggctctgggagaaatatggtttgcgtcccgaacaatgggtggattttcgcgccttagcaggcgatccgagcgacaatattccgggagttaaaggtatcggcgagaagacggcgctcaagctccttaaagaatgggggtcgttggagaacttgcttaagaatttagatcaggtcaaaccagagtcagtgcgtgagaagattcttgctcacctcgaagacctcaaattaagccgcgaattgtcccgtgtacgcaccgatttgccgctcgaagttgatttcggtcgccgccgcgaacctgactgggagggtcttaaagcgtttttagagcgtcttgaatttggttcgctcttgcatgaattcggccttttagaaagcccgttactggccgaagaagcaccttggccaccgcccgagggcgcgtttttaggttaccgtttgagtcgcccggaaccgatgtgggccgaattactggctcttgcagcgtctgcccagggacgtgtgtatcgcgcggaagaccctcatggtgcgctccgcggcctcttcgaagtccgtggactccttgccaaagacttagctgttgttgcattgcgcgaaggtcttgatttacctccgactgatgatccaatgcttcttgcgtacctcttggacccgtcaaacacgacgcccgaaggcgtagcccgtcgttacggcggcgagtggaccgaagatgcagcgaaacgcgcgttattggccgaacgtttgcacgaaaatttattaggacgtttgcaaggcgaggaacgtctcctctggctttacgaagaagtggagaaaccattgagtcgcgtgctcgcgcatatggaagctaccggtgtcaaattagacgtggcgtatttggagaatctcagccttgaagttgctgcccacatgcgccgcttggaggaagaagtattccgtttagcaggccgttcctttcgccttaactctcgcgatcagttagaacgtgtgttgttcgatgaacttggtctccctcctatcggcaagacagagaagaccggtaaacgtagcacttcagcggcggttttagaagctcttcgcgaagtccatcccattgtggacaagatcttgcagtaccgcgaaatggcgaaattgaaaggcacctatattgaccgtcttccggcattagtccacccgaaaacgggacgcctccatacccgcttcaaccaaacagccacggcgaccggtcgtttgtcctcctctgatccaaaccttcagaatattccagtacgtaccccattgggccagaagatccgccgtgcgtttgtagctgaggagggttggcgtttagtggccctcgattatcgtcaaattgaattacgtgtccttgcccatctttctggcgatgagaacctcatccgcgtgtttcaggaaggcaaagacattcacactcaaacggcaagctggatgtttggattatcagctgaagcgatcgatcctttgatgcgtcgtgcagcgaagaccatcaatttcggtgttctctacggtatgagtgcctttcgtttgtcgcaggaattaggcattccctatgaagaagctcaggcgttcattcagaaatactttcaaagctatcccaaagttaaagcatggatcgagaagactctccgtgaaggccgcacacgtggttacgtagagaccttatttggacgtcgccgctatgttcccgatttaaacgctcgcgtgaaaggcaagcgtgaagccgccgaacgcatggcgttcaacatgcctgtacagggcacggcagctgacctcatgaaacttgcaatggtgcgcctttttccacaattgcgtgaagttggtgcccgcatggcgttgcaggtccacgatgaactcttgttagaagcgccaaaagagcgtgcggaagaggtggcagccctcgcgaaagaagttatggaaggcgtgtggcccttagcggtgcctcttgaagtcgaagttggtattggcgaggattggctggctgccaaagga

SEQ ID NO: 5976 - protein, 841 aa, synthetic construct
  REGION 1..841: note = Variant of DNA polymerase I from Thermus sp. strain 2.9
MHHHHHHGGSGVLPVFEPKGRVLLVDGHHLAYRNFFALKGLTTSLGEPVQGVYGFAKSLLKALKEDGDVVIVVFDAKAPSFRHEAYEAYKAGRAPTPEDFPRQLALMKELVDLLGLERLEVPGFEADDVLATLAKKAEREGYEVQILTADRDLFQLLSPRISVLHPEGHRITPEWLWEKYGLRPEQWVDFRALAGDPSDNIPGVKGIGEKTALKLLKEWGSLENLLKNLDQVKPESVREKILAHLEDLKLSRELSRVRTDLPLEVDFGRRREPDWEGLKAFLERLEFGSLLHEFGLLESPLLAEEAPWPPPEGAFLGYRLSRPEPMWAELLALAASAQGRVYRAEDPHGALRGLFEVRGLLAKDLAVVALREGLDLPPTDDPMLLAYLLDPSNTTPEGVARRYGGEWTEDAAKRALLAERLHENLLGRLQGEERLLWLYEEVEKPLSRVLAHMEATGVKLDVAYLENLSLEVAAHMRRLEEEVFRLAGRSFRLNSRDQLERVLFDELGLPPIGKTEKTGKRSTSAAVLEALREVHPIVDKILQYREMAKLKGTYIDRLPALVHPKTGRLHTRFNQTATATGRLSSSDPNLQNIPVRTPLGQKIRRAFVAEEGWRLVALDYRQIELRVLAHLSGDENLIRVFQEGKDIHTQTASWMFGLSAEAIDPLMRRAAKTINFGVLYGMSAFRLSQELGIPYEEAQAFIQKYFQSYPKVKAWIEKTLREGRTRGYVETLFGRRRYVPDLNARVKGKREAAERMAFNMPVQGTAADLMKLAMVRLFPQLREVGARMALQVHDELLLEAPKERAEEVAALAKEVMEGVWPLAVPLEVEVGIGEDWLAAKG

SEQ ID NO: 5977 - DNA, 2523 bp, synthetic construct
  misc_feature 1..2523: note = Variant of DNA polymerase I from Thermus sp. strain 2.9
  source 1..2523: mol_type = other DNA
atgcaccatcatcatcatcatggcggtagcggcgtgttaccggtgttcgagcctaaaggtcgcgtgcttctggttgatggccatcatctcgcgtatcgtaacttctttgccctgaaaggattaaccaccagcctgggcgagccggtacagggtgtctacggctttgcaaagtcgctcctgaaagctctgaaagaagacggtgatgtggtgattgttgtctttgatgcgaaagcgccaagttttcgccacgaagcgtacgaagcttacaaagccgggcgtgctccaacgccggaagactttcctcgccaattggcgcttatgaaggaattagtggatttgcttggcctcgaacgcttggaagttcccggtttcgaggcagacgacgtattagcgactctcgcaaagaaagccgaacgtgagggctatgaagtccagatcttgacagcagatcgcgatcttttccagcttttatctccgcgcatctcggtgttacacccggaagggcatcgtatcaccccggaatggctctgggagaaatatggtttgcgtcccgaacaatgggtggattttcgcgccttagcaggcgatccgagcgacaatattccgggagttaaaggtatcggcgagaagacggcgctcaagctccttaaagaatgggggtcgttggagaacttgcttaagaatttagatcaggtcaaaccagagtcagtgcgtgagaagattcttgctcacctcgaagacctcaaattaagccgcgaattgtcccgtgtacgcaccgatttgccgctcgaagttgatttcggtcgccgccgcgaacctgactgggagggtcttaaagcgtttttagagcgtcttgaatttggttcgctcttgcatgaattcggccttttagaaagcccgttactggccgaagaagcaccttggccaccgcccgagggcgcgtttttaggttaccgtttgagtcgcccggaaccgatgtgggccgaattactggctcttgcagcgtctgcccagggacgtgtgtatcgcgcggaagaccctcatggtgcgctccgcggcctcttcgaagtccgtggactccttgccaaagacttagctgttgttgcattgcgcgaaggtcttgatttacctccgactgatgatccaatgcttcttgcgtacctcttggacccgtcaaacacgacgcccgaaggcgtagcccgtcgttacggcggcgagtggaccgaagatgcagcgaaacgcgcgttattggccgaacgtttgcacgaaaatttattaggacgtttgcaaggcgaggaacgtctcctctggctttacgaagaagtggagaaaccattgagtcgcgtgctcgcgcatatggaagctaccggtgtcaaattagacgtggcgtatttggagaatctcagccttgaagttgctgcccacatgcgccgcttggaggaagaagtattccgtttagcaggccgttcctttcgccttaactctcgcgatcagttagaacgtgtgttgttcgatgaacttggtctccctcctatcggcaagacagagaagaccggtaaacgtagcacttcagcggcggttttagaagctcttcgcgaagtccatcccattgtggacaagatcttgcagtaccgcgaaatggcgaaattgaaaggcacctatattgaccgtcttccggcattagtccacccgaaaacgggacgcctccatacccgcttcaaccaaacagccacggcgaccggtcgtttgtcctcctctgatccaaaccttcagaatattccagtacgtaccccattgggccagaagatccgccgtgcgtttgtagctgaggagggttggcgtttagtggccctcgattatcgtcaaattgaattacgtgtccttgcccatctttctggcgatgagaacctcatccgcgtgtttcaggaaggcaaagacattcacactcaaacggcaagctggatgtttggattatcagctgaagcgatcgatcctttgatgcgtcgtgcagcgaagaccatcaatttcggtgttctctacggtatgagtgcctttcgtttgtcgcaggaattaggcattccctatgaagaagctcaggcgttcattcagaaatactttcaaagctatcccaaagttaaagcatggatcgagaagactctccgtgaaggccgcacacgtggttacgtagagaccttatttggacgtcgccgctatgttcccgatttaaacgctcgcgtgaaaaggaagcgtgaagccgccgaacgcatggcgttcaacatgcctgtacagggcacggcagctgacctcatgaaacttgcaatggtgcgcctttttccacaattgcgtgaagttggtgcccgcatgctcttgcaggtccacgatgaactcttgttagaagcgccaaaagagcgtgcggaagaggtggcagccctcgcgaaagaagttatggaaggcgtgtggcccttagcggtgcctcttgaagtcgaagttggtattggcgaggattggctggctgccaaagga

SEQ ID NO: 5978 - protein, 841 aa, synthetic construct
  REGION 1..841: note = Variant of DNA polymerase I from Thermus sp. strain 2.9
MHHHHHHGGSGVLPVFEPKGRVLLVDGHHLAYRNFFALKGLTTSLGEPVQGVYGFAKSLLKALKEDGDVVIVVFDAKAPSFRHEAYEAYKAGRAPTPEDFPRQLALMKELVDLLGLERLEVPGFEADDVLATLAKKAEREGYEVQILTADRDLFQLLSPRISVLHPEGHRITPEWLWEKYGLRPEQWVDFRALAGDPSDNIPGVKGIGEKTALKLLKEWGSLENLLKNLDQVKPESVREKILAHLEDLKLSRELSRVRTDLPLEVDFGRRREPDWEGLKAFLERLEFGSLLHEFGLLESPLLAEEAPWPPPEGAFLGYRLSRPEPMWAELLALAASAQGRVYRAEDPHGALRGLFEVRGLLAKDLAVVALREGLDLPPTDDPMLLAYLLDPSNTTPEGVARRYGGEWTEDAAKRALLAERLHENLLGRLQGEERLLWLYEEVEKPLSRVLAHMEATGVKLDVAYLENLSLEVAAHMRRLEEEVFRLAGRSFRLNSRDQLERVLFDELGLPPIGKTEKTGKRSTSAAVLEALREVHPIVDKILQYREMAKLKGTYIDRLPALVHPKTGRLHTRFNQTATATGRLSSSDPNLQNIPVRTPLGQKIRRAFVAEEGWRLVALDYRQIELRVLAHLSGDENLIRVFQEGKDIHTQTASWMFGLSAEAIDPLMRRAAKTINFGVLYGMSAFRLSQELGIPYEEAQAFIQKYFQSYPKVKAWIEKTLREGRTRGYVETLFGRRRYVPDLNARVKRKREAAERMAFNMPVQGTAADLMKLAMVRLFPQLREVGARMLLQVHDELLLEAPKERAEEVAALAKEVMEGVWPLAVPLEVEVGIGEDWLAAKG

SEQ ID NO: 5979 - DNA, 2523 bp, synthetic construct
  misc_feature 1..2523: note = Variant of DNA polymerase I from Thermus sp. strain 2.9
  source 1..2523: mol_type = other DNA
atgcaccatcatcatcatcatggcggtagcggcgtgttaccggtgttcgagcctaaaggtcgcgtgcttctggttgatggccatcatctcgcgtatcgtaacttctttgccctgaaaggattaaccaccagcctgggcgagccggtacagggtgtctacggctttgcaaagtcgctcctgaaagctctgaaagaagacggtgatgtggtgattgttgtctttgatgcgaaagcgccaagttttcgccacgaagcgtacgaagcttacaaagccgggcgtgctccaacgccggaagactttcctcgccaattggcgcttatgaaggaattagtggatttgcttggcctcgaacgcttggaagttcccggtttcgaggcagacgacgtattagcgactctcgcaaagaaagccgaacgtgagggctatgaagtccagatcttgacagcagatcgcgatcttttccagcttttatctccgcgcatctcggtgttacacccggaagggcatcgtatcaccccggaatggctctgggagaaatatggtttgcgtcccgaacaatgggtggattttcgcgccttagcaggcgatccgagcgacaatattccgggagttaaaggtatcggcgagaagacggcgctcaagctccttaaagaatgggggtcgttggagaacttgcttaagaatttagatcaggtcaaaccagagtcagtgcgtgagaagattcttgctcacctcgaagacctcaaattaagccgcgaattgtcccgtgtacgcaccgatttgccgctcgaagttgatttcggtcgccgccgcgaacctgactgggagggtcttaaagcgtttttagagcgtcttgaatttggttcgctcttgcatgaattcggccttttagaaagcccgttactggccgaagaagcaccttggccaccgcccgagggcgcgtttttaggttaccgtttgagtcgcccggaaccgatgtgggccgaattactggctcttgcagcgtctgcccagggacgtgtgtatcgcgcggaagaccctcatggtgcgctccgcggcctcttcgaagtccgtggactccttgccaaagacttagctgttgttgcattgcgcgaaggtcttgatttacctccgactgatgatccaatgcttcttgcgtacctcttggacccgtcaaacacgacgcccgaaggcgtagcccgtcgttacggcggcgagtggaccgaagatgcagcgaaacgcgcgttattggccgaacgtttgcacgaaaatttattaggacgtttgcaaggcgaggaacgtctcctctggctttacgaagaagtggagaaaccattgagtcgcgtgctcgcgcatatggaagctaccggtgtcaaattagacgtggcgtatttggagaatctcagccttgaagttgctgcccacatgcgccgcttggaggaagaagtattccgtttagcaggccgttcctttcgccttaactctcgcgatcagttagaacgtgtgttgttcgatgaacttggtctccctcctatcggcaagacagagaagaccggtaaacgtagcacttcagcggcggttttagaagctcttcgcgaagtccatcccattgtggacaagatcttgcagtaccgcgaaatggcgaaattgaaaggcacctatattgaccgtcttccggcattagtccacccgaaaacgggacgcctccatacccgcttcaaccaaacagccacggcgaccggtcgtttgtcctcctctgatccaaaccttcagaatattccagtacgtaccccattgggccagaagatccgccgtgcgtttgtagctgaggagggttggtggttagtggccctcgattatcgtcaaattgaattacgtgtccttgcccatctttctggcgatgagaacctcatccgcgtgtttcaggaaggcaaagacattcacactcaaacggcaagctggatgtttggattatcagctgaagcgatcgatcctttgatgcgtcgtgcagcgaagaccatcaatttcggtgttctctacggtatgagtgcctttcgtttgtcgcaggaattaggcattccctatgaagaagctcaggcgttcattcagaaatactttcaaagctatcccaaagttaaagcatggatcgagaagactctccgtgaaggccgcacacgtggttacgtagagaccttatttggacgtcgccgctatgttcccgatttaaacgctcgcgtgaaaggcaagcgtgaagccgccgaacgcatggcgttcaacatgcctgtacagggcacggcagctgacctcatgaaacttgcaatggtgcgcctttttccacaattgcgtgaagttggtgcccgcatgctcttgcaggtccacgatgaactcttgttagaagcgccaaaagagcgtgcggaagaggtggcagccctcgcgaaagaagttatggaaggcgtgtggcccttagcggtgcctcttgaagtcgaagttggtattggcgaggattggctggctgccaaagga

SEQ ID NO: 5980 - protein, 841 aa, synthetic construct
  REGION 1..841: note = Variant of DNA polymerase I from Thermus sp. strain 2.9
MHHHHHHGGSGVLPVFEPKGRVLLVDGHHLAYRNFFALKGLTTSLGEPVQGVYGFAKSLLKALKEDGDVVIVVFDAKAPSFRHEAYEAYKAGRAPTPEDFPRQLALMKELVDLLGLERLEVPGFEADDVLATLAKKAEREGYEVQILTADRDLFQLLSPRISVLHPEGHRITPEWLWEKYGLRPEQWVDFRALAGDPSDNIPGVKGIGEKTALKLLKEWGSLENLLKNLDQVKPESVREKILAHLEDLKLSRELSRVRTDLPLEVDFGRRREPDWEGLKAFLERLEFGSLLHEFGLLESPLLAEEAPWPPPEGAFLGYRLSRPEPMWAELLALAASAQGRVYRAEDPHGALRGLFEVRGLLAKDLAVVALREGLDLPPTDDPMLLAYLLDPSNTTPEGVARRYGGEWTEDAAKRALLAERLHENLLGRLQGEERLLWLYEEVEKPLSRVLAHMEATGVKLDVAYLENLSLEVAAHMRRLEEEVFRLAGRSFRLNSRDQLERVLFDELGLPPIGKTEKTGKRSTSAAVLEALREVHPIVDKILQYREMAKLKGTYIDRLPALVHPKTGRLHTRFNQTATATGRLSSSDPNLQNIPVRTPLGQKIRRAFVAEEGWWLVALDYRQIELRVLAHLSGDENLIRVFQEGKDIHTQTASWMFGLSAEAIDPLMRRAAKTINFGVLYGMSAFRLSQELGIPYEEAQAFIQKYFQSYPKVKAWIEKTLREGRTRGYVETLFGRRRYVPDLNARVKGKREAAERMAFNMPVQGTAADLMKLAMVRLFPQLREVGARMLLQVHDELLLEAPKERAEEVAALAKEVMEGVWPLAVPLEVEVGIGEDWLAAKG

SEQ ID NO: 5981 - DNA, 2523 bp, synthetic construct
  misc_feature 1..2523: note = Variant of DNA polymerase I from Thermus sp. strain 2.9
  source 1..2523: mol_type = other DNA
atgcaccatcatcatcatcatggcggtagcggcgtgttaccggtgttcgagcctaaaggtcgcgtgcttctggttgatggccatcatctcgcgtatcgtaacttctttgccctgaaaggattaaccaccagcctgggcgagccggtacagggtgtctacggctttgcaaagtcgctcctgaaagctctgaaagaagacggtgatgtggtgattgttgtctttgatgcgaaagcgccaagttttcgccacgaagcgtacgaagcttacaaagccgggcgtgctccaacgccggaagactttcctcgccaattggcgcttatgaaggaattagtggatttgcttggcctcgaacgcttggaagttcccggtttcgaggcagacgacgtattagcgactctcgcaaagaaagccgaacgtgagggctatgaagtccagatcttgacagcagatcgcgatcttttccagcttttatctccgcgcatctcggtgttacacccggaagggcatcgtatcaccccggaatggctctgggagaaatatggtttgcgtcccgaacaatgggtggattttcgcgccttagcaggcgatccgagcgacaatattccgggagttaaaggtatcggcgagaagacggcgctcaagctccttaaagaatgggggtcgttggagaacttgcttaagaatttagatcaggtcaaaccagagtcagtgcgtgagaagattcttgctcacctcgaagacctcaaattaagccgcgaattgtcccgtgtacgcaccgatttgccgctcgaagttgatttcggtcgccgccgcgaacctgactgggagggtcttaaagcgtttttagagcgtcttgaatttggttcgctcttgcatgaattcggccttttagaaagcccgttactggccgaagaagcaccttggccaccgcccgagggcgcgtttttaggttaccgtttgagtcgcccggaaccgatgtgggccgaattactggctcttgcagcgtctgcccagggacgtgtgtatcgcgcggaagaccctcatggtgcgctccgcggcctcttcgaagtccgtggactccttgccaaagacttagctgttgttgcattgcgcgaaggtcttgatttacctccgactgatgatccaatgcttcttgcgtacctcttggacccgtcaaacacgacgcccgaaggcgtagcccgtcgttacggcggcgagtggaccgaagatgcagcgaaacgcgcgttattggccgaacgtttgcacgaaaatttattaggacgtttgcaaggcgaggaacgtctcctctggctttacgaagaagtggagaaaccattgagtcgcgtgctcgcgcatatggaagctaccggtgtcaaattagacgtggcgtatttggagaatctcagccttgaagttgctgcccacatgcgccgcttggaggaagaagtattccgtttagcaggccgttcctttcgccttaactctcgcgatcagttagaacgtgtgttgttcgatgaacttggtctccctcctatcggcaagacagagaagaccggtaaacgtagcacttcagcggcggttttagaagctcttcgcgaagtccatcccattgtggacaagatcttgcagtaccgcgaaatggcgaaattgaaaggcacctatattgaccgtcttccggcattagtccacccgaaaacgggacgcctccatacccgcttcaaccaaacagccacggcgaccggtcgtttgtcctcctctgatccaaaccttcagaatattccagtacgtaccccattgggccagaagatccgccgtgcgtttgtagctgaggagggttggcgtttagtggccctcgattatcgtcaaattgaattacgtgtccttgcccatctttctggcgatgagaacctcatccgcgtgtttcaggaaggcaaagacattcacactcaaacggcaagctggatgtttggattatcagctgaagcgatcgatcctttgatgcgtcgtgcagcgaagaccatcaatttcggtgttctctacggtatgagtgcctttcgtttgtcgaaggaattaggcattccctatgaagaagctcaggcgttcattcagaaatactttcaaagctatcccaaagttaaagcatggatcgagaagactctccgtgaaggccgcacacgtggttacgtagagaccttatttggacgtcgccgctatgttcccgatttaaacgctcgcgtgaaaggcaagcgtgaagccgccgaacgcatggcgttcaacatgcctgtacagggcacggcagctgacctcatgaaacttgcaatggtgcgcctttttccacaattgcgtgaagttggtgcccgcatgctcttgcaggtccacgatgaactcttgttagaagcgccaaaagagcgtgcggaagaggtggcagccctcgcgaaagaagttatggaaggcgtgtggcccttagcggtgcctcttgaagtcgaagttggtattggcgaggattggctggctgccaaagga

SEQ ID NO: 5982 - protein, 841 aa, synthetic construct
  REGION 1..841: note = Variant of DNA polymerase I from Thermus sp. strain 2.9
MHHHHHHGGSGVLPVFEPKGRVLLVDGHHLAYRNFFALKGLTTSLGEPVQGVYGFAKSLLKALKEDGDVVIVVFDAKAPSFRHEAYEAYKAGRAPTPEDFPRQLALMKELVDLLGLERLEVPGFEADDVLATLAKKAEREGYEVQILTADRDLFQLLSPRISVLHPEGHRITPEWLWEKYGLRPEQWVDFRALAGDPSDNIPGVKGIGEKTALKLLKEWGSLENLLKNLDQVKPESVREKILAHLEDLKLSRELSRVRTDLPLEVDFGRRREPDWEGLKAFLERLEFGSLLHEFGLLESPLLAEEAPWPPPEGAFLGYRLSRPEPMWAELLALAASAQGRVYRAEDPHGALRGLFEVRGLLAKDLAVVALREGLDLPPTDDPMLLAYLLDPSNTTPEGVARRYGGEWTEDAAKRALLAERLHENLLGRLQGEERLLWLYEEVEKPLSRVLAHMEATGVKLDVAYLENLSLEVAAHMRRLEEEVFRLAGRSFRLNSRDQLERVLFDELGLPPIGKTEKTGKRSTSAAVLEALREVHPIVDKILQYREMAKLKGTYIDRLPALVHPKTGRLHTRFNQTATATGRLSSSDPNLQNIPVRTPLGQKIRRAFVAEEGWRLVALDYRQIELRVLAHLSGDENLIRVFQEGKDIHTQTASWMFGLSAEAIDPLMRRAAKTINFGVLYGMSAFRLSKELGIPYEEAQAFIQKYFQSYPKVKAWIEKTLREGRTRGYVETLFGRRRYVPDLNARVKGKREAAERMAFNMPVQGTAADLMKLAMVRLFPQLREVGARMLLQVHDELLLEAPKERAEEVAALAKEVMEGVWPLAVPLEVEVGIGEDWLAAKG

SEQ ID NO: 5983 - DNA, 2523 bp, synthetic construct
  misc_feature 1..2523: note = Variant of DNA polymerase I from Thermus sp. strain 2.9
  source 1..2523: mol_type = other DNA
atgcaccatcatcatcatcatggcggtagcggcgtgttaccggtgttcgagcctaaaggtcgcgtgcttctggttgatggccatcatctcgcgtatcgtaacttctttgccctgaaaggattaaccaccagcctgggcgagccggtacagggtgtctacggctttgcaaagtcgctcctgaaagctctgaaagaagacggtgatgtggtgattgttgtctttgatgcgaaagcgccaagttttcgccacgaagcgtacgaagcttacaaagccgggcgtgctccaacgccggaagactttcctcgccaattggcgcttatgaaggaattagtggatttgcttggcctcgaacgcttggaagttcccggtttcgaggcagacgacgtattagcgactctcgcaaagaaagccgaacgtgagggctatgaagtccagatcttgacagcagatcgcgatcttttccagcttttatctccgcgcatctcggtgttacacccggaagggcatcgtatcaccccggaatggctctgggagaaatatggtttgcgtcccgaacaatgggtggattttcgcgccttagcaggcgatccgagcgacaatattccgggagttaaaggtatcggcgagaagacggcgctcaagctccttaaagaatgggggtcgttggagaacttgcttaagaatttagatcaggtcaaaccagagtcagtgcgtgagaagattcttgctcacctcgaagacctcaaattaagccgcgaattgtcccgtgtacgcaccgatttgccgctcgaagttgatttcggtcgccgccgcgaacctgactgggagggtcttaaagcgtttttagagcgtcttgaatttggttcgctcttgcatgaattcggccttttagaaagcccgttactggccgaagaagcaccttggccaccgcccgagggcgcgtttttaggttaccgtttgagtcgcccggaaccgatgtgggccgaattactggctcttgcagcgtctgcccagggacgtgtgtatcgcgcggaagaccctcatggtgcgctccgcggcctcttcgaagtccgtggactccttgccaaagacttagctgttgttgcattgcgcgaaggtcttgatttacctccgactgatgatccaatgcttcttgcgtacctcttggacccgtcaaacacgacgcccgaaggcgtagcccgtcgttacggcggcgagtggaccgaagatgcagcgaaacgcgcgttattggccgaacgtttgcacgaaaatttattaggacgtttgcaaggcgaggaacgtctcctctggctttacgaagaagtggagaaaccattgagtcgcgtgctcgcgcatatggaagctaccggtgtcaaattagacgtggcgtatttggagaatctcagccttgaagttgctgcccacatgcgccgcttggaggaagaagtattccgtttagcaggccgttcctttcgccttaactctcgcgatcagttagaacgtgtgttgttcgatgaacttggtctccctcctatcggcaagacagagaagaccggtaaacgtagcacttcagcggcggttttagaagctcttcgcgaagtccatcccattgtggacaagatcttgcagtaccgcgaaatggcgatgttgaaaggcacctatattgaccgtcttccggcattagtccacccgaaaacgggacgcctccatacccgcttcaaccaaacagccacggcgaccggtcgtttgtcctcctctgatccaaaccttcagaatattccagtacgtaccccattgggccagaagatccgccgtgcgtttgtagctgaggagggttggcgtttagtggccctcgattatcgtcaaattgaattacgtgtccttgcccatctttctggcgatgagaacctcatccgcgtgtttcaggaaggcaaagacattcacactcaaacggcaagctggatgtttggattatcagctgaagcgatcgatcctttgatgcgtcgtgcagcgaagaccatcaatttcggtgttctctacggtatgagtgcctttcgtttgtcgcaggaattaggcattccctatgaagaagctcaggcgttcattcagaaatactttcaaagctatcccaaagttaaagcatggatcgagaagactctccgtgaaggccgcacacgtggttacgtagagaccttatttggacgtcgccgctatgttcccgatttaaacgctcgcgtgaaaggcaagcgtgaagccgccgaacgcatggcgttcaacatgcctgtacagggcacggcagctgacctcatgaaacttgcaatggtgcgcctttttccacaattgcgtgaagttggtgcccgcatgctcttgcaggtccacgatgaactcttgttagaagcgccaaaagagcgtgcggaagaggtggcagccctcgcgaaagaagttatggaaggcgtgtggcccttagcggtgcctcttgaagtcgaagttggtattggcgaggattggctggctgccaaagga

SEQ ID NO: 5984 - protein, 841 aa, synthetic construct
  REGION 1..841: note = Variant of DNA polymerase I from Thermus sp. strain 2.9
MHHHHHHGGSGVLPVFEPKGRVLLVDGHHLAYRNFFALKGLTTSLGEPVQGVYGFAKSLLKALKEDGDVVIVVFDAKAPSFRHEAYEAYKAGRAPTPEDFPRQLALMKELVDLLGLERLEVPGFEADDVLATLAKKAEREGYEVQILTADRDLFQLLSPRISVLHPEGHRITPEWLWEKYGLRPEQWVDFRALAGDPSDNIPGVKGIGEKTALKLLKEWGSLENLLKNLDQVKPESVREKILAHLEDLKLSRELSRVRTDLPLEVDFGRRREPDWEGLKAFLERLEFGSLLHEFGLLESPLLAEEAPWPPPEGAFLGYRLSRPEPMWAELLALAASAQGRVYRAEDPHGALRGLFEVRGLLAKDLAVVALREGLDLPPTDDPMLLAYLLDPSNTTPEGVARRYGGEWTEDAAKRALLAERLHENLLGRLQGEERLLWLYEEVEKPLSRVLAHMEATGVKLDVAYLENLSLEVAAHMRRLEEEVFRLAGRSFRLNSRDQLERVLFDELGLPPIGKTEKTGKRSTSAAVLEALREVHPIVDKILQYREMAMLKGTYIDRLPALVHPKTGRLHTRFNQTATATGRLSSSDPNLQNIPVRTPLGQKIRRAFVAEEGWRLVALDYRQIELRVLAHLSGDENLIRVFQEGKDIHTQTASWMFGLSAEAIDPLMRRAAKTINFGVLYGMSAFRLSQELGIPYEEAQAFIQKYFQSYPKVKAWIEKTLREGRTRGYVETLFGRRRYVPDLNARVKGKREAAERMAFNMPVQGTAADLMKLAMVRLFPQLREVGARMLLQVHDELLLEAPKERAEEVAALAKEVMEGVWPLAVPLEVEVGIGEDWLAAKG

SEQ ID NO: 5985 - DNA, 2523 bp, synthetic construct
  misc_feature 1..2523: note = Variant of DNA polymerase I from Thermus sp. strain 2.9
  source 1..2523: mol_type = other DNA
atgcaccatcatcatcatcatggcggtagcggcgtgttaccggtgttcgagcctaaaggtcgcgtgcttctggttgatggccatcatctcgcgtatcgtaacttctttgccctgaaaggattaaccaccagcctgggcgagccggtacagggtgtctacggctttgcaaagtcgctcctgaaagctctgaaagaagacggtgatgtggtgattgttgtctttgatgcgaaagcgccaagttttcgccacgaagcgtacgaagcttacaaagccgggcgtgctccaacgccggaagactttcctcgccaattggcgcttatgaaggaattagtggatttgcttggcctcgaacgcttggaagttcccggtttcgaggcagacgacgtattagcgactctcgcaaagaaagccgaacgtgagggctatgaagtccagatcttgacagcagatcgcgatcttttccagcttttatctccgcgcatctcggtgttacacccggaagggcatcgtatcaccccggaatggctctgggagaaatatggtttgcgtcccgaacaatgggtggattttcgcgccttagcaggcgatccgagcgacaatattccgggagttaaaggtatcggcgagaagacggcgctcaagctccttaaagaatgggggtcgttggagaacttgcttaagaatttagatcaggtcaaaccagagtcagtgcgtgagaagattcttgctcacctcgaagacctcaaattaagccgcgaattgtcccgtgtacgcaccgatttgccgctcgaagttgatttcggtcgccgccgcgaacctgactgggagggtcttaaagcgtttttagagcgtcttgaatttggttcgctcttgcatgaattcggccttttagaaagcccgttactggccgaagaagcaccttggccaccgcccgagggcgcgtttttaggttaccgtttgagtcgcccggaaccgatgtgggccgaattactggctcttgcagcgtctgcccagggacgtgtgtatcgcgcggaagaccctcatggtgcgctccgcggcctcttcgaagtccgtggactccttgccaaagacttagctgttgttgcattgcgcgaaggtcttgatttacctccgactgatgatccaatgcttcttgcgtacctcttggacccgtcaaacacgacgcccgaaggcgtagcccgtcgttacggcggcgagtggaccgaagatgcagcgaaacgcgcgttattggccgaacgtttgcacgaaaatttattaggacgtttgcaaggcgaggaacgtctcctctggctttacgaagaagtggagaaaccattgagtcgcgtgctcgcgcatatggaagctaccggtgtcaaattagacgtggcgtatttggagaatctcagccttgaagttgctgcccacatgcgccgcttggaggaagaagtattccgtttagcaggccgttcctttcgccttaactctcgcgatcagttagaacgtgtgttgttcgatgaacttggtctccctcctatcggcaagacagagaagaccggtaaacgtagcacttcagcggcggttttagaagctcttcgcgaagtccatcccattgtggacaagatcttgcagtaccgcgaaatggcgaaattgaaaggcacctatattgaccgtcttccggcattagtccacccgaaaacgggacgcctccatacccgcttcaaccaaacagccacggcgaccggtcgtttgtcctcctctgatccaaaccttcagaatattccagtacgtaccccattgggccagaagatccgccgtgcgtttgtagctgaggagggttggcgtttagtggccctcgattatcgtcaaattgaattacgtgtccttgcccatctttctggcgatgagaacctcatccgcgtgtttcaggaaggcaaagacattcacactcaaacggcaagctggatgtttggattatcagctgaagcgatcgatcctttgatgcgtcgtgcagcgaagaccatcaatttcggtgttctctacggtatgagtgcctttcgtttgtcgcaggaattaggcattccctatgaagaagctcagggtttcattcagaaatactttcaaagctatcccaaagttaaagcatggatcgagaagactctccgtgaaggccgcacacgtggttacgtagagaccttatttggacgtcgccgctatgttcccgatttaaacggtcgcgtgaaaggcaagcgtgaagccgccgaacgcatggcgttcaacatgcctgtacagggcacggcagctgacctcatgaaacttgcaatggtgcgcctttttccacaattgcgtgaagttggtgcccgcatgctgttgcaggtccacgatgaactcttgttagaagcgccaaaagagcgtgcggaagaggtggcagccctcgcgaaagaagttatggaaggcgtgtggcccttagcggtgcctcttgaagtcgaagttggtattggcgaggattggctggctgccaaagga

SEQ ID NO: 5986 - protein, 841 aa, synthetic construct
  REGION 1..841: note = Variant of DNA polymerase I from Thermus sp. strain 2.9
MHHHHHHGGSGVLPVFEPKGRVLLVDGHHLAYRNFFALKGLTTSLGEPVQGVYGFAKSLLKALKEDGDVVIVVFDAKAPSFRHEAYEAYKAGRAPTPEDFPRQLALMKELVDLLGLERLEVPGFEADDVLATLAKKAEREGYEVQILTADRDLFQLLSPRISVLHPEGHRITPEWLWEKYGLRPEQWVDFRALAGDPSDNIPGVKGIGEKTALKLLKEWGSLENLLKNLDQVKPESVREKILAHLEDLKLSRELSRVRTDLPLEVDFGRRREPDWEGLKAFLERLEFGSLLHEFGLLESPLLAEEAPWPPPEGAFLGYRLSRPEPMWAELLALAASAQGRVYRAEDPHGALRGLFEVRGLLAKDLAVVALREGLDLPPTDDPMLLAYLLDPSNTTPEGVARRYGGEWTEDAAKRALLAERLHENLLGRLQGEERLLWLYEEVEKPLSRVLAHMEATGVKLDVAYLENLSLEVAAHMRRLEEEVFRLAGRSFRLNSRDQLERVLFDELGLPPIGKTEKTGKRSTSAAVLEALREVHPIVDKILQYREMAKLKGTYIDRLPALVHPKTGRLHTRFNQTATATGRLSSSDPNLQNIPVRTPLGQKIRRAFVAEEGWRLVALDYRQIELRVLAHLSGDENLIRVFQEGKDIHTQTASWMFGLSAEAIDPLMRRAAKTINFGVLYGMSAFRLSQELGIPYEEAQGFIQKYFQSYPKVKAWIEKTLREGRTRGYVETLFGRRRYVPDLNGRVKGKREAAERMAFNMPVQGTAADLMKLAMVRLFPQLREVGARMLLQVHDELLLEAPKERAEEVAALAKEVMEGVWPLAVPLEVEVGIGEDWLAAKG

SEQ ID NO: 5987 - DNA, 2523 bp, synthetic construct
  misc_feature 1..2523: note = Variant of DNA polymerase I from Thermus sp. strain 2.9
  source 1..2523: mol_type = other DNA
atgcaccatcatcatcatcatggcggtagcggcgtgttaccggtgttcgagcctaaaggtcgcgtgcttctggttgatggccatcatctcgcgtatcgtaacttctttgccctgaaaggattaaccaccagcctgggcgagccggtacagggtgtctacggctttgcaaagtcgctcctgaaagctctgaaagaagacggtgatgtggtgattgttgtctttgatgcgaaagcgccaagttttcgccacgaagcgtacgaagcttacaaagccgggcgtgctccaacgccggaagactttcctcgccaattggcgcttatgaaggaattagtggatttgcttggcctcgaacgcttggaagttcccggtttcgaggcagacgacgtattagcgactctcgcaaagaaagccgaacgtgagggctatgaagtccagatcttgacagcagatcgcgatcttttccagcttttatctccgcgcatctcggtgttacacccggaagggcatcgtatcaccccggaatggctctgggagaaatatggtttgcgtcccgaacaatgggtggattttcgcgccttagcaggcgatccgagcgacaatattccgggagttaaaggtatcggcgagaagacggcgctcaagctccttaaagaatgggggtcgttggagaacttgcttaagaatttagatcaggtcaaaccagagtcagtgcgtgagaagattcttgctcacctcgaagacctcaaattaagccgcgaattgtcccgtgtacgcaccgatttgccgctcgaagttgatttcggtcgccgccgcgaacctgactgggagggtcttaaagcgtttttagagcgtcttgaatttggttcgctcttgcatgaattcggccttttagaaagcccgttactggccgaagaagcaccttggccaccgcccgagggcgcgtttttaggttaccgtttgagtcgcccggaaccgatgtgggccgaattactggctcttgcagcgtctgcccagggacgtgtgtatcgcgcggaagaccctcatggtgcgctccgcggcctcttcgaagtccgtaccctccttgccaaagacttagctgttgttgcattgcgcgaaggtcttgatttacctccgactgatgatccaatgcttcttgcgtacctcttggacccgtcaaacacgacgcccgaaggcgtagcccgtcgttacggcggcgagtggaccgaagatgcaggcaaacgcgcgttattggccgaacgtttgcacgaaaatttattaggacgtttgcaaggcgaggagcgtctcctgtggctttacgaagaagtggagaaaccattgagtcgcgtgctcgcgcatatggaagctaccggtgtcaaattagacgtggcgtatttggagaatctcagccttgaagttgctgcccacatgcgccgcttggaggaagaagtattccgtttagcaggccgttcctttcgccttaactctcgcgatcagttagaacgtgtgttgttcgatgaacttggtctccctcctatcggcaagacagagaagaccggtaaacgtagcacttcagcggcggttttagaagctcttcgcgaagtccatcccattgtggacaagatcttgcagtaccgcgaaatggcgaaattgaaaggcacctatattgaccgtcttccggcattagtccacccgaaaacgggacgcctccatacccgcttcaaccaaacagccacggcgaccggtcgtttgtcctcctctgatccaaaccttcagaatattccagtacgtacctttttgggccagaagatccgccgtgcgtttgtagctgagccgggttggcgtttagtggccctcgattatcgtcaaattgaattacgtgtccttgcccatctttctggcgatgagaacctcatccgcgtgtttcaggaaggcaaagacattcacactcaaacggcaagctggatgtttggattatcagctgaagcgatcgatcctttgatgcgtcgtgcagcgaagaccatcaatttcggtgttctctacggtatgagtgcctttcgtttgtcgcaggaattaggcattcccctggaagaagctcagggtttcattcagaaatactttcaaggctatcccaaagttaaagcatggatcgagaagactctccgtgaaggccgcacacgtggttacgtagagaccttatttggacgtcgccgctatgttcccgatttaaactcgcgcgtgaaaggcaagcgtgaagccgccgaacgcatggcgttcaacatgcctgtacagggcacggcagctgacctcatgaaacttgcaatggtgcgcctttttccacaattgcgtgaagttggtgcccgcatgctgttgcaggtccacgatgaactcttgttagaagcgccaaaagagcgtgcggaagaggtggcagccctcgcgaaagaagttatggaaggcgtgtggcccttagcggtgcctcttgaagtcgaagttggtattggcgaggattggctggctgccaaagga

SEQ ID NO: 5988 - protein, 841 aa, synthetic construct
  REGION 1..841: note = Variant of DNA polymerase I from Thermus sp. strain 2.9
MHHHHHHGGSGVLPVFEPKGRVLLVDGHHLAYRNFFALKGLTTSLGEPVQGVYGFAKSLLKALKEDGDVVIVVFDAKAPSFRHEAYEAYKAGRAPTPEDFPRQLALMKELVDLLGLERLEVPGFEADDVLATLAKKAEREGYEVQILTADRDLFQLLSPRISVLHPEGHRITPEWLWEKYGLRPEQWVDFRALAGDPSDNIPGVKGIGEKTALKLLKEWGSLENLLKNLDQVKPESVREKILAHLEDLKLSRELSRVRTDLPLEVDFGRRREPDWEGLKAFLERLEFGSLLHEFGLLESPLLAEEAPWPPPEGAFLGYRLSRPEPMWAELLALAASAQGRVYRAEDPHGALRGLFEVRTLLAKDLAVVALREGLDLPPTDDPMLLAYLLDPSNTTPEGVARRYGGEWTEDAGKRALLAERLHENLLGRLQGEERLLWLYEEVEKPLSRVLAHMEATGVKLDVAYLENLSLEVAAHMRRLEEEVFRLAGRSFRLNSRDQLERVLFDELGLPPIGKTEKTGKRSTSAAVLEALREVHPIVDKILQYREMAKLKGTYIDRLPALVHPKTGRLHTRFNQTATATGRLSSSDPNLQNIPVRTFLGQKIRRAFVAEPGWRLVALDYRQIELRVLAHLSGDENLIRVFQEGKDIHTQTASWMFGLSAEAIDPLMRRAAKTINFGVLYGMSAFRLSQELGIPLEEAQGFIQKYFQGYPKVKAWIEKTLREGRTRGYVETLFGRRRYVPDLNSRVKGKREAAERMAFNMPVQGTAADLMKLAMVRLFPQLREVGARMLLQVHDELLLEAPKERAEEVAALAKEVMEGVWPLAVPLEVEVGIGEDWLAAKG

SEQ ID NO: 5989 - DNA, 2523 bp, synthetic construct
  misc_feature 1..2523: note = Variant of DNA polymerase I from Thermus sp. strain 2.9
  source 1..2523: mol_type = other DNA
atgcaccatcatcatcatcatggcggtagcggcgtgttaccggtgttcgagcctaaaggtcgcgtgcttctggttgatggccatcatctcgcgtatcgtaacttctttgccctgaaaggattaaccaccagcctgggcgagccggtacagggtgtctacggctttgcaaagtcgctcctgaaagctctgaaagaagacggtgatgtggtgattgttgtctttgatgcgaaagcgccaagttttcgccacgaagcgtacgaagcttacaaagccgggcgtgctccaacgccggaagactttcctcgccaattggcgcttatgaaggaattagtggatttgcttggcctcgaacgcttggaagttcccggtttcgaggcagacgacgtattagcgactctcgcaaagaaagccgaacgtgagggctatgaagtccagatcttgacagcagatcgcgatcttttccagcttttatctccgcgcatctcggtgttacacccggaagggcatcgtatcaccccggaatggctctgggagaaatatggtttgcgtcccgaacaatgggtggattttcgcgccttagcaggcgatccgagcgacaatattccgggagttaaaggtatcggcgagaagacggcgctcaagctccttaaagaatgggggtcgttggagaacttgcttaagaatttagatcaggtcaaaccagagtcagtgcgtgagaagattcttgctcacctcgaagacctcaaattaagccgcgaattgtcccgtgtacgcaccgatttgccgctcgaagttgatttcggtcgccgccgcgaacctgactgggagggtcttaaagcgtttttagagcgtcttgaatttggttcgctcttgcatgaattcggccttttagaaagcccgttactggccgaagaagcaccttggccaccgcccgagggcgcgtttttaggttaccgtttgagtcgcccggaaccgatgtgggccgaattactggctcttgcagcgtctgcccagggacgtgtgtatcgcgcggaagaccctcatggtgcgctccgcggcctcttcgaagtccgtggcctccttgccaaagacttagctgttgttgcattgcgcgaaggtcttgatttacctccgactgatgatccaatgcttcttgcgtacctcttggacccgtcaaacacgacgcccgaaggcgtagcccgtcgttacggcggcgagtggaccgaagatgcagcgaaacgcgcgttattggccgaacgtttgcacgaaaatttattaggacgtttgcaaggcgaggcgcgtctccgttggctttacgaagaagtggagaaaccattgagtcgcgtgctcgcgcatatggaagctaccggtgtcaaattagacgtggcgtatttggagaatctcagccttgaagttgctgcccacatgcgccgcttggaggaagaagtattccgtttagcaggccgttcctttcgccttaactctcgcgatcagttagaacgtgtgttgttcgatgaacttggtctccctcctatcggcaagacagagaagaccggtaaacgtagcacttcagcggcggttttagaagctcttcgcgaagtccatcccattgtggacaagatcttgcagtaccgcgaaatggcgaaattgaaaggcacctatattgaccgtcttccggcattagtccacccgaaaacgggacgcctccatacccgcttcaaccaaacagccacggcgaccggtcgtttgtcctcctctgatccaaaccttcagaatattccagtacgtacctttttgggccagaagatccgccgtgcgtttgtagctgaggagggttggcgtttagtggccctcgattatcgtcaaattgaattacgtgtccttgcccatctttctggcgatgagaacctcatccgcgtgtttcaggaaggcaaagacattcacactcaaacggcaagctggatgtttggattatcagctgaagcgatcgatcctttgatgcgtcgtgcagcgaagaccatcaatttcggtgttctctacggtatgagtgcctttcgtttgtcgcaggaattaggcattccctatgaagaagctcaggctttcattcagaaatactttcaaagctatcccaaagttaaagcatggatcgagaagactctccgtgaaggccgcacacgtggttacgtagagaccttatttggacgtcgccgctatgttcccgatttaaacggtcgcgtgaaaggcaagcgtgaagccgccgaacgcatggcgttcaacatgcctgtacagggcacggcagctgacctcatgaaacttgcaatggtgcgcctttttccacaattgcgtgaagttggtgcccgcatgctgttgcaggtccacgatgaactcttgttagaagcgccaaaagagcgtgcggaagaggtggcagccctcgcgaaagaagttatggaaggcgtgtggcccttagcggtgcctcttgaagtcgaagttggtattggcgaggattggctggctgccaaagga

SEQ ID NO: 5990 - protein, 841 aa, synthetic construct
  REGION 1..841: note = Variant of DNA polymerase I from Thermus sp. strain 2.9
MHHHHHHGGSGVLPVFEPKGRVLLVDGHHLAYRNFFALKGLTTSLGEPVQGVYGFAKSLLKALKEDGDVVIVVFDAKAPSFRHEAYEAYKAGRAPTPEDFPRQLALMKELVDLLGLERLEVPGFEADDVLATLAKKAEREGYEVQILTADRDLFQLLSPRISVLHPEGHRITPEWLWEKYGLRPEQWVDFRALAGDPSDNIPGVKGIGEKTALKLLKEWGSLENLLKNLDQVKPESVREKILAHLEDLKLSRELSRVRTDLPLEVDFGRRREPDWEGLKAFLERLEFGSLLHEFGLLESPLLAEEAPWPPPEGAFLGYRLSRPEPMWAELLALAASAQGRVYRAEDPHGALRGLFEVRGLLAKDLAVVALREGLDLPPTDDPMLLAYLLDPSNTTPEGVARRYGGEWTEDAAKRALLAERLHENLLGRLQGEARLRWLYEEVEKPLSRVLAHMEATGVKLDVAYLENLSLEVAAHMRRLEEEVFRLAGRSFRLNSRDQLERVLFDELGLPPIGKTEKTGKRSTSAAVLEALREVHPIVDKILQYREMAKLKGTYIDRLPALVHPKTGRLHTRFNQTATATGRLSSSDPNLQNIPVRTFLGQKIRRAFVAEEGWRLVALDYRQIELRVLAHLSGDENLIRVFQEGKDIHTQTASWMFGLSAEAIDPLMRRAAKTINFGVLYGMSAFRLSQELGIPYEEAQAFIQKYFQSYPKVKAWIEKTLREGRTRGYVETLFGRRRYVPDLNGRVKGKREAAERMAFNMPVQGTAADLMKLAMVRLFPQLREVGARMLLQVHDELLLEAPKERAEEVAALAKEVMEGVWPLAVPLEVEVGIGEDWLAAKG

SEQ ID NO: 5991 - DNA, 2523 bp, synthetic construct
  misc_feature 1..2523: note = Variant of DNA polymerase I from Thermus sp. strain 2.9
  source 1..2523: mol_type = other DNA
atgcaccatcatcatcatcatggcggtagcggcgtgttaccggtgttcgagcctaaaggtcgcgtgcttctggttgatggccatcatctcgcgtatcgtaacttctttgccctgaaaggattaaccaccagcctgggcgagccggtacagggtgtctacggctttgcaaagtcgctcctgaaagctctgaaagaagacggtgatgtggtgattgttgtctttgatgcgaaagcgccaagttttcgccacgaagcgtacgaagcttacaaagccgggcgtgctccaacgccggaagactttcctcgccaattggcgcttatgaaggaattagtggatttgcttggcctcgaacgcttggaagttcccggtttcgaggcagacgacgtattagcgactctcgcaaagaaagccgaacgtgagggctatgaagtccagatcttgacagcagatcgcgatcttttccagcttttatctccgcgcatctcggtgttacacccggaagggcatcgtatcaccccggaatggctctgggagaaatatggtttgcgtcccgaacaatgggtggattttcgcgccttagcaggcgatccgagcgacaatattccgggagttaaaggtatcggcgagaagacggcgctcaagctccttaaagaatgggggtcgttggagaacttgcttaagaatttagatcaggtcaaaccagagtcagtgcgtgagaagattcttgctcacctcgaagacctcaaattaagccgcgaattgtcccgtgtacgcaccgatttgccgctcgaagttgatttcggtcgccgccgcgaacctgactgggagggtcttaaagcgtttttagagcgtcttgaatttggttcgctcttgcatgaattcggccttttagaaagcccgttactggccgaagaagcaccttggccaccgcccgagggcgcgtttttaggttaccgtttgagtcgcccggaaccgatgtgggccgaattactggctcttgcagcgtctgcccagggacgtgtgtatcgcgcggaagaccctcatggtgcgctccgcggcctcttcgaagtccgtggactccttgccaaagacttagctgttgttgcattgcgcgaaggtcttgatttacctccgactgatgatccaatgcttcttgcgtacctcttggacccgtcaaacacgacgcccgaaggcgtagcccgtcgttacggcggcgagtggaccgaagatgcagcgaaacgcgcgttattggccgaacgtttgcacgaaaatttattaggacgtttgcaaggcgaggaacgtctcctctggctttacgaagaagtggagaaaccattgagtcgcgtgctcgcgcatatggaagctaccggtgtcaaattagacgtggcgtatttggagaatctcagccttgaagttgctgcccacatgcgccgcttggaggaagaagtattccgtttagtgggccgttcctttcgccttaactctcgcgatcagttagaacgtgtgttgttcgatgaacttggtctccctcctatcggcaagacagagaagaccggtaaacgtagcacttcagcggcggttttagaagctcttcgcgaagtccatcccattgtggacaagatcttgcagtaccgcgaaatggcgaaattgaaaggcacctatattgaccgtcttccggcattagtccacccgaaaacgggacgcctccatacccgcttcaaccaaacagccacggcgaccggtcgtttgtcctcctctgatccaaaccttcagaatattccagtacgtaccccattgggccagaagatccgccgtgcgtttgtagctgaggagggttggcgtttagtggccctcgattatcgtcaaattgaattacgtgtccttgcccatctttctggcgatgagaacctcatccgcgtgtttcaggaaggcaaagacattcacactcaaacggcaagctggatgtttggattatcagctgaagcgatcgatcctttgatgcgtcgtgcagcgaagaccatcaatttcggtgttctctacggtatgagtgcctttcgtttgtcgcaggaattaggcattccctatgaagaagctcaggcgttcattcagaaatactttcaaagctatcccaaagttaaagcatggatcgagaagactctccgtgaaggccgcacacgtggttacgtagagaccttatttggacgtcgccgctatgttcccgatttaaacgctcgcgtgaaaggcaagcgtgaagccgccgaacgcatggcgttcaacatgcctgtacagggcacggcagctgacctcatgaaacttgcaatggtgcgcctttttccacaattgcgtgaagttggtgcccgcatgctcttgcaggtccacgatgaactcttgttagaagcgccaaaagagcgtgcggaagaggtggcagccctcgcgaaagaagttatggaaggcgtgtggcccttagcggtgcctcttgaagtcgaagttggtattggcgaggattggctggctgccaaagga

SEQ ID NO: 5992 - protein, 841 aa, synthetic construct
  REGION 1..841: note = Variant of DNA polymerase I from Thermus sp. strain 2.9
MHHHHHHGGSGVLPVFEPKGRVLLVDGHHLAYRNFFALKGLTTSLGEPVQGVYGFAKSLLKALKEDGDVVIVVFDAKAPSFRHEAYEAYKAGRAPTPEDFPRQLALMKELVDLLGLERLEVPGFEADDVLATLAKKAEREGYEVQILTADRDLFQLLSPRISVLHPEGHRITPEWLWEKYGLRPEQWVDFRALAGDPSDNIPGVKGIGEKTALKLLKEWGSLENLLKNLDQVKPESVREKILAHLEDLKLSRELSRVRTDLPLEVDFGRRREPDWEGLKAFLERLEFGSLLHEFGLLESPLLAEEAPWPPPEGAFLGYRLSRPEPMWAELLALAASAQGRVYRAEDPHGALRGLFEVRGLLAKDLAVVALREGLDLPPTDDPMLLAYLLDPSNTTPEGVARRYGGEWTEDAAKRALLAERLHENLLGRLQGEERLLWLYEEVEKPLSRVLAHMEATGVKLDVAYLENLSLEVAAHMRRLEEEVFRLVGRSFRLNSRDQLERVLFDELGLPPIGKTEKTGKRSTSAAVLEALREVHPIVDKILQYREMAKLKGTYIDRLPALVHPKTGRLHTRFNQTATATGRLSSSDPNLQNIPVRTPLGQKIRRAFVAEEGWRLVALDYRQIELRVLAHLSGDENLIRVFQEGKDIHTQTASWMFGLSAEAIDPLMRRAAKTINFGVLYGMSAFRLSQELGIPYEEAQAFIQKYFQSYPKVKAWIEKTLREGRTRGYVETLFGRRRYVPDLNARVKGKREAAERMAFNMPVQGTAADLMKLAMVRLFPQLREVGARMLLQVHDELLLEAPKERAEEVAALAKEVMEGVWPLAVPLEVEVGIGEDWLAAKG

SEQ ID NO: 5993 - DNA, 2523 bp, synthetic construct
  misc_feature 1..2523: note = Variant of DNA polymerase I from Thermus sp. strain 2.9
  source 1..2523: mol_type = other DNA
atgcaccatcatcatcatcatggcggtagcggcgtgttaccggtgttcgagcctaaaggtcgcgtgcttctggttgatggccatcatctcgcgtatcgtaacttctttgccctgaaaggattaaccaccagcctgggcgagccggtacagggtgtctacggctttgcaaagtcgctcctgaaagctctgaaagaagacggtgatgtggtgattgttgtctttgatgcgaaagcgccaagttttcgccacgaagcgtacgaagcttacaaagccgggcgtgctccaacgccggaagactttcctcgccaattggcgcttatgaaggaattagtggatttgcttggcctcgaacgcttggaagttcccggtttcgaggcagacgacgtattagcgactctcgcaaagaaagccgaacgtgagggctatgaagtccagatcttgacagcagatcgcgatcttttccagcttttatctccgcgcatctcggtgttacacccggaagggcatcgtatcaccccggaatggctctgggagaaatatggtttgcgtcccgaacaatgggtggattttcgcgccttagcaggcgatccgagcgacaatattccgggagttaaaggtatcggcgagaagacggcgctcaagctccttaaagaatgggggtcgttggagaacttgcttaagaatttagatcaggtcaaaccagagtcagtgcgtgagaagattcttgctcacctcgaagacctcaaattaagccgcgaattgtcccgtgtacgcaccgatttgccgctcgaagttgatttcggtcgccgccgcgaacctgactgggagggtcttaaagcgtttttagagcgtcttgaatttggttcgctcttgcatgaattcggccttttagaaagcccgttactggccgaagaagcaccttggccaccgcccgagggcgcgtttttaggttaccgtttgagtcgcccggaaccgatgtgggccgaattactggctcttgcagcgtctgcccagggacgtgtgtatcgcgcggaagaccctcatggtgcgctccgcggcctcttcgaagtccgtggactccttgccaaagacttagctgttgttgcattgcgcgaaggtcttgatttacctccgactgatgatccaatgcttcttgcgtacctcttggacccgtcaaacacgacgcccgaaggcgtagcccgtcgttacggcggcgagtggaccgaagatgcagcgaaacgcgcgttattggccgaacgtttgcacgaaaatttattaggacgtttgcaaggcgaggaacgtctcctctggctttacgaagaagtggagaaaccattgagtcgcgtgctcgcgcatatggaagctaccggtgtcaaattagacgtggcgtatttggagaatctcagccttgaagttgctgcccacatgcgccgcttggaggaagaagtattccgtttagcaggccgttcctttcgccttaactctcgcgatcagttagaacgtgtgttgttcgatgaacttggtctccctcctatcggcaagacagagaagaccggtaaacgtagcacttcagcggcggttttagaagctcttcgcgaagtccatcccattgtggacaagatcaagcagtaccgcgaaatggcgaaattgaaaggcacctatattgaccgtcttccggcattagtccacccgaaaacgggacgcctccatacccgcttcaaccaaacagccacggcgaccggtcgtttgtcctcctctgatccaaaccttcagaatattccagtacgtaccccattgggccagaagatccgccgtgcgtttgtagctgaggagggttggcgtttagtggccctcgattatcgtcaaattgaattacgtgtccttgcccatctttctggcgatgagaacctcatccgcgtgtttcaggaaggcaaagacattcacactcaaacggcaagctggatgtttggattatcagctgaagcgatcgatcctttgatgcgtcgtgcagcgaagaccatcaatttcggtgttctctacggtatgagtgcctttcgtttgtcgcaggaattaggcattccctatgaagaagctcaggcgttcattcagaaatactttcaaagctatcccaaagttaaagcatggatcgagaagactctccgtgaaggccgcacacgtggttacgtagagaccttatttggacgtcgccgctatgttcccgatttaaacgctcgcgtgaaaggcaagcgtgaagccgccgaacgcatggcgttcaacatgcctgtacagggcacggcagctgacctcatgaaacttgcaatggtgcgcctttttccacaattgcgtgaagttggtgcccgcatgctcttgcaggtccacgatgaactcttgttagaagcgccaaaagagcgtgcggaagaggtggcagccctcgcgaaagaagttatggaaggcgtgtggcccttagcggtgcctcttgaagtcgaagttggtattggcgaggattggctggctgccaaagga

SEQ ID NO: 5994 - protein, 841 aa, synthetic construct
  REGION 1..841: note = Variant of DNA polymerase I from Thermus sp. strain 2.9
MHHHHHHGGSGVLPVFEPKGRVLLVDGHHLAYRNFFALKGLTTSLGEPVQGVYGFAKSLLKALKEDGDVVIVVFDAKAPSFRHEAYEAYKAGRAPTPEDFPRQLALMKELVDLLGLERLEVPGFEADDVLATLAKKAEREGYEVQILTADRDLFQLLSPRISVLHPEGHRITPEWLWEKYGLRPEQWVDFRALAGDPSDNIPGVKGIGEKTALKLLKEWGSLENLLKNLDQVKPESVREKILAHLEDLKLSRELSRVRTDLPLEVDFGRRREPDWEGLKAFLERLEFGSLLHEFGLLESPLLAEEAPWPPPEGAFLGYRLSRPEPMWAELLALAASAQGRVYRAEDPHGALRGLFEVRGLLAKDLAVVALREGLDLPPTDDPMLLAYLLDPSNTTPEGVARRYGGEWTEDAAKRALLAERLHENLLGRLQGEERLLWLYEEVEKPLSRVLAHMEATGVKLDVAYLENLSLEVAAHMRRLEEEVFRLAGRSFRLNSRDQLERVLFDELGLPPIGKTEKTGKRSTSAAVLEALREVHPIVDKIKQYREMAKLKGTYIDRLPALVHPKTGRLHTRFNQTATATGRLSSSDPNLQNIPVRTPLGQKIRRAFVAEEGWRLVALDYRQIELRVLAHLSGDENLIRVFQEGKDIHTQTASWMFGLSAEAIDPLMRRAAKTINFGVLYGMSAFRLSQELGIPYEEAQAFIQKYFQSYPKVKAWIEKTLREGRTRGYVETLFGRRRYVPDLNARVKGKREAAERMAFNMPVQGTAADLMKLAMVRLFPQLREVGARMLLQVHDELLLEAPKERAEEVAALAKEVMEGVWPLAVPLEVEVGIGEDWLAAKG

SEQ ID NO: 5995 - DNA, 2523 bp, synthetic construct
  misc_feature 1..2523: note = Variant of DNA polymerase I from Thermus sp. strain 2.9
  source 1..2523: mol_type = other DNA
atgcaccatcatcatcatcatggcggtagcggcgtgttaccggtgttcgagcctaaaggtcgcgtgcttctggttgatggccatcatctcgcgtatcgtaacttctttgccctgaaaggattaaccaccagcctgggcgagccggtacagggtgtctacggctttgcaaagtcgctcctgaaagctctgaaagaagacggtgatgtggtgattgttgtctttgatgcgaaagcgccaagttttcgccacgaagcgtacgaagcttacaaagccgggcgtgctccaacgccggaagactttcctcgccaattggcgcttatgaaggaattagtggatttgcttggcctcgaacgcttggaagttcccggtttcgaggcagacgacgtattagcgactctcgcaaagaaagccgaacgtgagggctatgaagtccagatcttgacagcagatcgcgatcttttccagcttttatctccgcgcatctcggtgttacacccggaagggcatcgtatcaccccggaatggctctgggagaaatatggtttgcgtcccgaacaatgggtggattttcgcgccttagcaggcgatccgagcgacaatattccgggagttaaaggtatcggcgagaagacggcgctcaagctccttaaagaatgggggtcgttggagaacttgcttaagaatttagatcaggtcaaaccagagtcagtgcgtgagaagattcttgctcacctcgaagacctcaaattaagccgcgaattgtcccgtgtacgcaccgatttgccgctcgaagttgatttcggtcgccgccgcgaacctgactgggagggtcttaaagcgtttttagagcgtcttgaatttggttcgctcttgcatgaattcggccttttagaaagcccgttactggccgaagaagcaccttggccaccgcccgagggcgcgtttttaggttaccgtttgagtactccggaaccgatgtgggccgaattactggctcttgcagcgtctgcccagggacgtgtgtatcgcgcggaagaccctcatggtgcgctccgcggcctcttcgaagtccgtggactccttgccaaagacttagctgttgttgcattgcgcgaaggtcttgatttacctccgactgatgatccaatgcttcttgcgtacctcttggacccgtcaaacacgacgcccgaaggcgtagcccgtcgttacggcggcgagtggaccgaagatgcagcgaaacgcgcgttattggccgaacgtttgcacgaaaatttattaggacgtttgcaaggcgaggaacgtctcctctggctttacgaagaagtggagaaaccattgagtcgcgtgctcgcgcatatggaagctaccggtgtcaaattagacgtggcgtatttggagaatctcagccttgaagttgctgcccacatgcgccgcttggaggaagaagtattccgtttagcaggccgttcctttcgccttaactctcgcgatcagttagaacgtgtgttgttcgatgaacttggtctccctcctatcggcaagacagagaagaccggtaaacgtagcacttcagcggcggttttagaagctcttcgcgaagtccatcccattgtggacaagatcttgcagtaccgcgaaatggcgaaattgaaaggcacctatattgaccgtcttccggcattagtccacccgaaaacgggacgcctccatacccgcttcaaccaaacagccacggcgaccggtcgtttgtcctcctctgatccaaaccttcagaatattccagtacgtaccccattgggccagaagatccgccgtgcgtttgtagctgaggagggttggcgtttagtggccctcgattatcgtcaaattgaattacgtgtccttgcccatctttctggcgatgagaacctcatccgcgtgtttcaggaaggcaaagacattcacactcaaacggcaagctggatgtttggattatcagctgaagcgatcgatcctttgatgcgtcgtgcagcgaagaccatcaatttcggtgttctctacggtatgagtgcctttcgtttgtcgcaggaattaggcattccctatgaagaagctcaggcgttcattcagaaatactttcaaagctatcccaaagttaaagcatggatcgagaagactctccgtgaaggccgcacacgtggttacgtagagaccttatttggacgtcgccgctatgttcccgatttaaacgctcgcgtgaaaggcaagcgtgaagccgccgaacgcatggcgttcaacatgcctgtacagggcacggcagctgacctcatgaaacttgcaatggtgcgcctttttccacaattgcgtgaagttggtgcccgcatgctcttgcaggtccacgatgaactcttgttagaagcgccaaaagagcgtgcggaagaggtggcagccctcgcgaaagaagttatggaaggcgtgtggcccttagcggtgcctcttgaagtcgaagttggtattggcgaggattggctggctgccaaagga

SEQ ID NO: 5996 - protein, 841 aa, synthetic construct
  REGION 1..841: note = Variant of DNA polymerase I from Thermus sp. strain 2.9
MHHHHHHGGSGVLPVFEPKGRVLLVDGHHLAYRNFFALKGLTTSLGEPVQGVYGFAKSLLKALKEDGDVVIVVFDAKAPSFRHEAYEAYKAGRAPTPEDFPRQLALMKELVDLLGLERLEVPGFEADDVLATLAKKAEREGYEVQILTADRDLFQLLSPRISVLHPEGHRITPEWLWEKYGLRPEQWVDFRALAGDPSDNIPGVKGIGEKTALKLLKEWGSLENLLKNLDQVKPESVREKILAHLEDLKLSRELSRVRTDLPLEVDFGRRREPDWEGLKAFLERLEFGSLLHEFGLLESPLLAEEAPWPPPEGAFLGYRLSTPEPMWAELLALAASAQGRVYRAEDPHGALRGLFEVRGLLAKDLAVVALREGLDLPPTDDPMLLAYLLDPSNTTPEGVARRYGGEWTEDAAKRALLAERLHENLLGRLQGEERLLWLYEEVEKPLSRVLAHMEATGVKLDVAYLENLSLEVAAHMRRLEEEVFRLAGRSFRLNSRDQLERVLFDELGLPPIGKTEKTGKRSTSAAVLEALREVHPIVDKILQYREMAKLKGTYIDRLPALVHPKTGRLHTRFNQTATATGRLSSSDPNLQNIPVRTPLGQKIRRAFVAEEGWRLVALDYRQIELRVLAHLSGDENLIRVFQEGKDIHTQTASWMFGLSAEAIDPLMRRAAKTINFGVLYGMSAFRLSQELGIPYEEAQAFIQKYFQSYPKVKAWIEKTLREGRTRGYVETLFGRRRYVPDLNARVKGKREAAERMAFNMPVQGTAADLMKLAMVRLFPQLREVGARMLLQVHDELLLEAPKERAEEVAALAKEVMEGVWPLAVPLEVEVGIGEDWLAAKG

SEQ ID NO: 5997 - DNA, 2523 bp, synthetic construct
  misc_feature 1..2523: note = Variant of DNA polymerase I from Thermus sp. strain 2.9
  source 1..2523: mol_type = other DNA
atgcaccatcatcatcatcatggcggtagcggcgtgttaccggtgttcgagcctaaaggtcgcgtgcttctggttgatggccatcatctcgcgtatcgtaacttctttgccctgaaaggattaaccaccagcctgggcgagccggtacagggtgtctacggctttgcaaagtcgctcctgaaagctctgaaagaagacggtgatgtggtgattgttgtctttgatgcgaaagcgccaagttttcgccacgaagcgtacgaagcttacaaagccgggcgtgctccaacgccggaagactttcctcgccaattggcgcttatgaaggaattagtggatttgcttggcctcgaacgcttggaagttcccggtttcgaggcagacgacgtattagcgactctcgcaaagaaagccgaacgtgagggctatgaagtccagatcttgacagcagatcgcgatcttttccagcttttatctccgcgcatctcggtgttacacccggaagggcatcgtatcaccccggaatggctctgggagaaatatggtttgcgtcccgaacaatgggtggattttcgcgccttagcaggcgatccgagcgacaatattccgggagttaaaggtatcggcgagaagacggcgctcaagctccttaaagaatgggggtcgttggagaacttgcttaagaatttagatcaggtcaaaccagagtcagtgcgtgagaagattcttgctcacctcgaagacctcaaattaagccgcgaattgtcccgtgtacgcaccgatttgccgctcgaagttgatttcggtcgccgccgcgaacctgactgggagggtcttaaagcgtttttagagcgtcttgaatttggttcgctcttgcatgaattcggccttttagaaagcccgttactggccgaagaagcaccttggccaccgcccgagggcgcgtttttaggttaccgtttgagtcgcccggaaccgatgtgggccgaattactggctcttgcagcgtctgcccagggacgtgtgtatcgcgcggaagaccctcatggtgcgctccgcggcctcttcgaagtccgtggactccttgccaaagacttagctgttgttgcattgcgcgaaggtcttgatttacctccgactgatgatccaatgcttcttgcgtacctcttggacccgtcaaacacgacgcccgaaggcgtagcccgtcgttacggcggcgagtggaccgaagatgcagcgaaacgcgcgttattggccgaacgtttgcacgaaaatttattaggacgtttgcaaggcgaggaacgtctccagtggctttacgaagaagtggagaaaccattgagtcgcgtgctcgcgcatatggaagctaccggtgtcaaattagacgtggcgtatttggagaatctcagccttgaagttgctgcccacatgcgccgcttggaggaagaagtattccgtttagcaggccgttcctttcgccttaactctcgcgatcagttagaacgtgtgttgttcgatgaacttggtctccctcctatcggcaagacagagaagaccggtaaacgtagcacttcagcggcggttttagaagctcttcgcgaagtccatcccattgtggacaagatcttgcagtaccgcgaaatggcgaaattgaaaggcacctatattgaccgtcttccggcattagtccacccgaaaacgggacgcctccatacccgcttcaaccaaacagccacggcgaccggtcgtttgtcctcctctgatccaaaccttcagaatattccagtacgtaccccattgggccagaagatccgccgtgcgtttgtagctgaggagggttggcgtttagtggccctcgattatcgtcaaattgaattacgtgtccttgcccatctttctggcgatgagaacctcatccgcgtgtttcaggaaggcaaagacattcacactcaaacggcaagctggatgtttggattatcagctgaagcgatcgatcctttgatgcgtcgtgcagcgaagaccatcaatttcggtgttctctacggtatgagtgcctttcgtttgtcgcaggaattaggcattccctatgaagaagctcaggcgttcattcagaaatactttcaaagctatcccaaagttaaagcatggatcgagaagactctccgtgaaggccgcacacgtggttacgtagagaccttatttggacgtcgccgctatgttcccgatttaaacgctcgcgtgaaaggcaagcgtgaagccgccgaacgcatggcgttcaacatgcctgtacagggcacggcagctgacctcatgaaacttgcaatggtgcgcctttttccacaattgcgtgaagttggtgcccgcatgctcttgcaggtccacgatgaactcttgttagaagcgccaaaagagcgtgcggaagaggtggcagccctcgcgaaagaagttatggaaggcgtgtggcccttagcggtgcctcttgaagtcgaagttggtattggcgaggattggctggctgccaaagga

SEQ ID NO: 5998 - protein, 841 aa, synthetic construct
  REGION 1..841: note = Variant of DNA polymerase I from Thermus sp. strain 2.9
MHHHHHHGGSGVLPVFEPKGRVLLVDGHHLAYRNFFALKGLTTSLGEPVQGVYGFAKSLLKALKEDGDVVIVVFDAKAPSFRHEAYEAYKAGRAPTPEDFPRQLALMKELVDLLGLERLEVPGFEADDVLATLAKKAEREGYEVQILTADRDLFQLLSPRISVLHPEGHRITPEWLWEKYGLRPEQWVDFRALAGDPSDNIPGVKGIGEKTALKLLKEWGSLENLLKNLDQVKPESVREKILAHLEDLKLSRELSRVRTDLPLEVDFGRRREPDWEGLKAFLERLEFGSLLHEFGLLESPLLAEEAPWPPPEGAFLGYRLSRPEPMWAELLALAASAQGRVYRAEDPHGALRGLFEVRGLLAKDLAVVALREGLDLPPTDDPMLLAYLLDPSNTTPEGVARRYGGEWTEDAAKRALLAERLHENLLGRLQGEERLQWLYEEVEKPLSRVLAHMEATGVKLDVAYLENLSLEVAAHMRRLEEEVFRLAGRSFRLNSRDQLERVLFDELGLPPIGKTEKTGKRSTSAAVLEALREVHPIVDKILQYREMAKLKGTYIDRLPALVHPKTGRLHTRFNQTATATGRLSSSDPNLQNIPVRTPLGQKIRRAFVAEEGWRLVALDYRQIELRVLAHLSGDENLIRVFQEGKDIHTQTASWMFGLSAEAIDPLMRRAAKTINFGVLYGMSAFRLSQELGIPYEEAQAFIQKYFQSYPKVKAWIEKTLREGRTRGYVETLFGRRRYVPDLNARVKGKREAAERMAFNMPVQGTAADLMKLAMVRLFPQLREVGARMLLQVHDELLLEAPKERAEEVAALAKEVMEGVWPLAVPLEVEVGIGEDWLAAKG

SEQ ID NO: 5999 - DNA, 2523 bp, synthetic construct
  misc_feature 1..2523: note = Variant of DNA polymerase I from Thermus sp. strain 2.9
  source 1..2523: mol_type = other DNA
atgcaccatcatcatcatcatggcggtagcggcgtgttaccggtgttcgagcctaaaggtcgcgtgcttctggttgatggccatcatctcgcgtatcgtaacttctttgccctgaaaggattaaccaccagcctgggcgagccggtacagggtgtctacggctttgcaaagtcgctcctgaaagctctgaaagaagacggtgatgtggtgattgttgtctttgatgcgaaagcgccaagttttcgccacgaagcgtacgaagcttacaaagccgggcgtgctccaacgccggaagactttcctcgccaattggcgcttatgaaggaattagtggatttgcttggcctcgaacgcttggaagttcccggtttcgaggcagacgacgtattagcgactctcgcaaagaaagccgaacgtgagggctatgaagtccagatcttgacagcagatcgcgatcttttccagcttttatctccgcgcatctcggtgttacacccggaagggcatcgtatcaccccggaatggctctgggagaaatatggtttgcgtcccgaacaatgggtggattttcgcgccttagcaggcgatccgagcgacaatattccgggagttaaaggtatcggcgagaagacggcgctcaagctccttaaagaatgggggtcgttggagaacttgcttaagaatttagatcaggtcaaaccagagtcagtgcgtgagaagattcttgctcacctcgaagacctcaaattaagccgcgaattgtcccgtgtacgcaccgatttgccgctcgaagttgatttcggtcgccgccgcgaacctgactgggagggtcttaaagcgtttttagagcgtcttgaatttggttcgctcttgcatgaattcggccttttagaaagcccgttactggccgaagaagcaccttggccaccgcccgagggcgcgtttttaggttaccgtttgagtcgcccggaaccgatgtgggccgaattactggctcttgcagcgtctgcccagcatcgtgtgtatcgcgcggaagaccctcatggtgcgctccgcggcctcttcgaagtccgtggactccttgccaaagacttagctgttgttgcattgcgcgaaggtcttgatttacctccgactgatgatccaatgcttcttgcgtacctcttggacccgtcaaacacgacgcccgaaggcgtagcccgtcgttacggcggcgagtggaccgaagatgcagcgaaacgcgcgttattggccgaacgtttgcacgaaaatttattaggacgtttgcaaggcgaggaacgtctcctctggctttacgaagaagtggagaaaccattgagtcgcgtgctcgcgcatatggaagctaccggtgtcaaattagacgtggcgtatttggagaatctcagccttgaagttgctgcccacatgcgccgcttggaggaagaagtattccgtttagcaggccgttcctttcgccttaactctcgcgatcagttagaacgtgtgttgttcgatgaacttggtctccctcctatcggcaagacagagaagaccggtaaacgtagcacttcagcggcggttttagaagctcttcgcgaagtccatcccattgtggacaagatcttgcagtaccgcgaaatggcgaaattgaaaggcacctatattgaccgtcttccggcattagtccacccgaaaacgggacgcctccatacccgcttcaaccaaacagccacggcgaccggtcgtttgtcctcctctgatccaaaccttcagaatattccagtacgtaccccattgggccagaagatccgccgtgcgtttgtagctgaggagggttggcgtttagtggccctcgattatcgtcaaattgaattacgtgtccttgcccatctttctggcgatgagaacctcatccgcgtgtttcaggaaggcaaagacattcacactcaaacggcaagctggatgtttggattatcagctgaagcgatcgatcctttgatgcgtcgtgcagcgaagaccatcaatttcggtgttctctacggtatgagtgcctttcgtttgtcgcaggaattaggcattccctatgaagaagctcaggcgttcattcagaaatactttcaaagctatcccaaagttaaagcatggatcgagaagactctccgtgaaggccgcacacgtggttacgtagagaccttatttggacgtcgccgctatgttcccgatttaaacgctcgcgtgaaaggcaagcgtgaagccgccgaacgcatggcgttcaacatgcctgtacagggcacggcagctgacctcatgaaacttgcaatggtgcgcctttttccacaattgcgtgaagttggtgcccgcatgctcttgcaggtccacgatgaactcttgttagaagcgccaaaagagcgtgcggaagaggtggcagccctcgcgaaagaagttatggaaggcgtgtggcccttagcggtgcctcttgaagtcgaagttggtattggcgaggattggctggctgccaaagga

SEQ ID NO: 6000 - protein, 841 aa, synthetic construct
  REGION 1..841: note = Variant of DNA polymerase I from Thermus sp. strain 2.9
MHHHHHHGGSGVLPVFEPKGRVLLVDGHHLAYRNFFALKGLTTSLGEPVQGVYGFAKSLLKALKEDGDVVIVVFDAKAPSFRHEAYEAYKAGRAPTPEDFPRQLALMKELVDLLGLERLEVPGFEADDVLATLAKKAEREGYEVQILTADRDLFQLLSPRISVLHPEGHRITPEWLWEKYGLRPEQWVDFRALAGDPSDNIPGVKGIGEKTALKLLKEWGSLENLLKNLDQVKPESVREKILAHLEDLKLSRELSRVRTDLPLEVDFGRRREPDWEGLKAFLERLEFGSLLHEFGLLESPLLAEEAPWPPPEGAFLGYRLSRPEPMWAELLALAASAQHRVYRAEDPHGALRGLFEVRGLLAKDLAVVALREGLDLPPTDDPMLLAYLLDPSNTTPEGVARRYGGEWTEDAAKRALLAERLHENLLGRLQGEERLLWLYEEVEKPLSRVLAHMEATGVKLDVAYLENLSLEVAAHMRRLEEEVFRLAGRSFRLNSRDQLERVLFDELGLPPIGKTEKTGKRSTSAAVLEALREVHPIVDKILQYREMAKLKGTYIDRLPALVHPKTGRLHTRFNQTATATGRLSSSDPNLQNIPVRTPLGQKIRRAFVAEEGWRLVALDYRQIELRVLAHLSGDENLIRVFQEGKDIHTQTASWMFGLSAEAIDPLMRRAAKTINFGVLYGMSAFRLSQELGIPYEEAQAFIQKYFQSYPKVKAWIEKTLREGRTRGYVETLFGRRRYVPDLNARVKGKREAAERMAFNMPVQGTAADLMKLAMVRLFPQLREVGARMLLQVHDELLLEAPKERAEEVAALAKEVMEGVWPLAVPLEVEVGIGEDWLAAKG

SEQ ID NO: 6001 - DNA, 2523 bp, synthetic construct
  misc_feature 1..2523: note = Variant of DNA polymerase I from Thermus sp. strain 2.9
  source 1..2523: mol_type = other DNA
atgcaccatcatcatcatcatggcggtagcggcgtgttaccggtgttcgagcctaaaggtcgcgtgcttctggttgatggccatcatctcgcgtatcgtaacttctttgccctgaaaggattaaccaccagcctgggcgagccggtacagggtgtctacggctttgcaaagtcgctcctgaaagctctgaaagaagacggtgatgtggtgattgttgtctttgatgcgaaagcgccaagttttcgccacgaagcgtacgaagcttacaaagccgggcgtgctccaacgccggaagactttcctcgccaattggcgcttatgaaggaattagtggatttgcttggcctcgaacgcttggaagttcccggtttcgaggcagacgacgtattagcgactctcgcaaagaaagccgaacgtgagggctatgaagtccagatcttgacagcagatcgcgatcttttccagcttttatctccgcgcatctcggtgttacacccggaagggcatcgtatcaccccggaatggctctgggagaaatatggtttgcgtcccgaacaatgggtggattttcgcgccttagcaggcgatccgagcgacaatattccgggagttaaaggtatcggcgagaagacggcgctcaagctccttaaagaatgggggtcgttggagaacttgcttaagaatttagatcaggtcaaaccagagtcagtgcgtgagaagattcttgctcacctcgaagacctcaaattaagccgcgaattgtcccgtgtacgcaccgatttgccgctcgaagttgatttcggtcgccgccgcgaacctgactgggagggtcttaaagcgtttttagagcgtcttgaatttggttcgctcttgcatgaattcggccttttagaaagcccgttactggccgaagaagcaccttggccaccgcccgagggcgcgtttttaggttaccgtttgagtcgcccggaaccgatgtgggccgaattactggctcttgcagcgtctgcccagggacgtgtgtatcgcgcggaagaccctcatggtgcgctccgcggcctcttcgaagtccgtggcctccttgccaaagacttagctgttgttgcattgcgcgaaggtcttgatttacctccgactgatgatccaatgcttcttgcgtacctcttggacccgtcaaacacgacgcccgaaggcgtagcccgtcgttacggcggcgagtggaccgaagatgcagcgaaacgcgcgttattggccgaacgtttgcacgaaaatttattaggacgtttgcaaggcgaggagcgtctccgttggctttacgaagaagtggagaaaccattgagtcgcgtgctcgcgcatatggaagctaccggtgtcaaattagacgtggcgtatttggagaatctcagccttgaagttgctgcccacatgcgccgcttggaggaagaagtattccgtttagcaggccgttcctttcgccttaactctcgcgatcagttagaacgtgtgttgttcgatgaacttggtctccctcctatcggcaagacagagaagaccggtaaacgtagcacttcagcggcggttttagaagctcttcgcgaagtccatcccattgtggacaagatcttgcagtaccgcgaaatggcgaaattgaaaggcacctatattgaccgtcttccggcattagtccacccgaaaacgggacgcctccatacccgcttcaaccaaacagccacggcgaccggtcgtttgtcctcctctgatccaaaccttcagaatattccagtacgtaccccattgggccagaagatccgccgtgcgtttgtagctgaggagggttggcgtttagtggccctcgattatcgtcaaattgaattacgtgtccttgcccatctttctggcgatgagaacctcatccgcgtgtttcaggaaggcaaagacattcacactcaaacggcaagctggatgtttggattatcagctgaagcgatcgatcctttgatgcgtcgtgcagcgaagaccatcaatttcggtgttctctacggtatgagtgcctttcgtttgtcgcaggaattaggcattccctatgaagaagctcagggtttcattcagaaatactttcaaagctatcccaaagttaaagcatggatcgagaagactctccgtgaaggccgcacacgtggttacgtagagaccttatttggacgtcgccgctatgttcccgatttaaacggtcgcgtgaaaggcaagcgtgaagccgccgaacgcatggcgttcaacatgcctgtacagggcacggcagctgacctcatgaaacttgcaatggtgcgcctttttccacaattgcgtgaagttggtgcccgcatgctgttgcaggtccacgatgaactcttgttagaagcgccaaaagagcgtgcggaagaggtggcagccctcgcgaaagaagttatggaaggcgtgtggcccttagcggtgcctcttgaagtcgaagttggtattggcgaggattggctggctgccaaagga

SEQ ID NO: 6002 - protein, 841 aa, synthetic construct
  REGION 1..841: note = Variant of DNA polymerase I from Thermus sp. strain 2.9
MHHHHHHGGSGVLPVFEPKGRVLLVDGHHLAYRNFFALKGLTTSLGEPVQGVYGFAKSLLKALKEDGDVVIVVFDAKAPSFRHEAYEAYKAGRAPTPEDFPRQLALMKELVDLLGLERLEVPGFEADDVLATLAKKAEREGYEVQILTADRDLFQLLSPRISVLHPEGHRITPEWLWEKYGLRPEQWVDFRALAGDPSDNIPGVKGIGEKTALKLLKEWGSLENLLKNLDQVKPESVREKILAHLEDLKLSRELSRVRTDLPLEVDFGRRREPDWEGLKAFLERLEFGSLLHEFGLLESPLLAEEAPWPPPEGAFLGYRLSRPEPMWAELLALAASAQGRVYRAEDPHGALRGLFEVRGLLAKDLAVVALREGLDLPPTDDPMLLAYLLDPSNTTPEGVARRYGGEWTEDAAKRALLAERLHENLLGRLQGEERLRWLYEEVEKPLSRVLAHMEATGVKLDVAYLENLSLEVAAHMRRLEEEVFRLAGRSFRLNSRDQLERVLFDELGLPPIGKTEKTGKRSTSAAVLEALREVHPIVDKILQYREMAKLKGTYIDRLPALVHPKTGRLHTRFNQTATATGRLSSSDPNLQNIPVRTPLGQKIRRAFVAEEGWRLVALDYRQIELRVLAHLSGDENLIRVFQEGKDIHTQTASWMFGLSAEAIDPLMRRAAKTINFGVLYGMSAFRLSQELGIPYEEAQGFIQKYFQSYPKVKAWIEKTLREGRTRGYVETLFGRRRYVPDLNGRVKGKREAAERMAFNMPVQGTAADLMKLAMVRLFPQLREVGARMLLQVHDELLLEAPKERAEEVAALAKEVMEGVWPLAVPLEVEVGIGEDWLAAKG

SEQ ID NO: 6003 - DNA, 2523 bp, synthetic construct
  misc_feature 1..2523: note = Variant of DNA polymerase I from Thermus sp. strain 2.9
  source 1..2523: mol_type = other DNA
atgcaccatcatcatcatcatggcggtagcggcgtgttaccggtgttcgagcctaaaggtcgcgtgcttctggttgatggccatcatctcgcgtatcgtaacttctttgccctgaaaggattaaccaccagcctgggcgagccggtacagggtgtctacggctttgcaaagtcgctcctgaaagctctgaaagaagacggtgatgtggtgattgttgtctttgatgcgaaagcgccaagttttcgccacgaagcgtacgaagcttacaaagccgggcgtgctccaacgccggaagactttcctcgccaattggcgcttatgaaggaattagtggatttgcttggcctcgaacgcttggaagttcccggtttcgaggcagacgacgtattagcgactctcgcaaagaaagccgaacgtgagggctatgaagtccagatcttgacagcagatcgcgatcttttccagcttttatctccgcgcatctcggtgttacacccggaagggcatcgtatcaccccggaatggctctgggagaaatatggtttgcgtcccgaacaatgggtggattttcgcgccttagcaggcgatccgagcgacaatattccgggagttaaaggtatcggcgagaagacggcgctcaagctccttaaagaatgggggtcgttggagaacttgcttaagaatttagatcaggtcaaaccagagtcagtgcgtgagaagattcttgctcacctcgaagacctcaaattaagccgcgaattgtcccgtgtacgcaccgatttgccgctcgaagttgatttcggtcgccgccgcgaacctgactgggagggtcttaaagcgtttttagagcgtcttgaatttggttcgctcttgcatgaattcggccttttagaaagcccgttactggccgaagaagcaccttggccaccgcccgagggcgcgtttttaggttaccgtttgagtcgcccggaaccgatgtgggccgaattactggctcttgcagcgtctgcccagggacgtgtgtatcgcgcggaagaccctcatggtgcgctccgcggcctcttcgaagtccgtaccctccttgccaaagacttagctgttgttgcattgcgcgaaggtcttgatttacctccgactgatgatccaatgcttcttgcgtacctcttggacccgtcaaacacgacgcccgaaggcgtagcccgtcgttacggcggcgagtggaccgaagatgcagccaaacgcgcgttattggccgaacgtttgcacgaaaatttattaggacgtttgcaaggcgaggaacgtctcctctggctttacgaagaagtggagaaaccattgagtcgcgtgctcgcgcatatggaagctaccggtgtcaaattagacgtggcgtatttggagaatctcagccttgaagttgctgcccacatgcgccgcttggaggaagaagtattccgtttagcaggccgttcctttcgccttaactctcgcgatcagttagaacgtgtgttgttcgatgaacttggtctccctcctatcggcaagacagagaagaccggtaaacgtagcacttcagcggcggttttagaagctcttcgcgaagtccatcccattgtggacaagatcttgcagtaccgcgaaatggcgaaattgaaaggcacctatattgaccgtcttccggcattagtccacccgaaaacgggacgcctccatacccgcttcaaccaaacagccacggcgaccggtcgtttgtcctcctctgatccaaaccttcagaatattccagtacgtaccccattgggccagaagatccgccgtgcgtttgtagctgaggagggttgggcgttagtggccctcgattatcgtcaaattgaattacgtgtccttgcccatctttctggcgatgagaacctcatccgcgtgtttcaggaaggcaaagacattcacactcaaacggcaagctggatgtttggattatcagctgaagcgatcgatcctttgatgcgtcgtgcagcgaagaccatcaatttcggtgttctctacggtatgagtgcctttcgtttgtcgcaggaattaggcattccctatgaagaagctcaggcgttcattcagaaatactttcaaagctatcccaaagttaaagcatggatcgagaagactctccgtgaaggccgcacacgtggttacgtagagaccttatttggacgtcgccgctatgttcccgatttaaacgctcgcgtgaaaggcaagcgtgaagccgccgaacgcatggcgttcaacatgcctgtacagggcacggcagctgacctcatgaaacttgcaatggtgcgcctttttccacaattgcgtgaagttggtgcccgcatgctgttgcaggtccacgatgaactcttgttagaagcgccaaaagagcgtgcggaagaggtggcagccctcgcgaaagaagttatggaaggcgtgtggcccttagcggtgcctcttgaagtcgaagttggtattggcgaggattggctggctgccaaagga

SEQ ID NO: 6004 - protein, 841 aa, synthetic construct
  REGION 1..841: note = Variant of DNA polymerase I from Thermus sp. strain 2.9
MHHHHHHGGSGVLPVFEPKGRVLLVDGHHLAYRNFFALKGLTTSLGEPVQGVYGFAKSLLKALKEDGDVVIVVFDAKAPSFRHEAYEAYKAGRAPTPEDFPRQLALMKELVDLLGLERLEVPGFEADDVLATLAKKAEREGYEVQILTADRDLFQLLSPRISVLHPEGHRITPEWLWEKYGLRPEQWVDFRALAGDPSDNIPGVKGIGEKTALKLLKEWGSLENLLKNLDQVKPESVREKILAHLEDLKLSRELSRVRTDLPLEVDFGRRREPDWEGLKAFLERLEFGSLLHEFGLLESPLLAEEAPWPPPEGAFLGYRLSRPEPMWAELLALAASAQGRVYRAEDPHGALRGLFEVRTLLAKDLAVVALREGLDLPPTDDPMLLAYLLDPSNTTPEGVARRYGGEWTEDAAKRALLAERLHENLLGRLQGEERLLWLYEEVEKPLSRVLAHMEATGVKLDVAYLENLSLEVAAHMRRLEEEVFRLAGRSFRLNSRDQLERVLFDELGLPPIGKTEKTGKRSTSAAVLEALREVHPIVDKILQYREMAKLKGTYIDRLPALVHPKTGRLHTRFNQTATATGRLSSSDPNLQNIPVRTPLGQKIRRAFVAEEGWALVALDYRQIELRVLAHLSGDENLIRVFQEGKDIHTQTASWMFGLSAEAIDPLMRRAAKTINFGVLYGMSAFRLSQELGIPYEEAQAFIQKYFQSYPKVKAWIEKTLREGRTRGYVETLFGRRRYVPDLNARVKGKREAAERMAFNMPVQGTAADLMKLAMVRLFPQLREVGARMLLQVHDELLLEAPKERAEEVAALAKEVMEGVWPLAVPLEVEVGIGEDWLAAKG

SEQ ID NO: 6005 - DNA, 2523 bp, synthetic construct
  misc_feature 1..2523: note = Variant of DNA polymerase I from Thermus sp. strain 2.9
  source 1..2523: mol_type = other DNA
atgcaccatcatcatcatcatggcggtagcggcgtgttaccggtgttcgagcctaaaggtcgcgtgcttctggttgatggccatcatctcgcgtatcgtaacttctttgccctgaaaggattaaccaccagcctgggcgagccggtacagggtgtctacggctttgcaaagtcgctcctgaaagctctgaaagaagacggtgatgtggtgattgttgtctttgatgcgaaagcgccaagttttcgccacgaagcgtacgaagcttacaaagccgggcgtgctccaacgccggaagactttcctcgccaattggcgcttatgaaggaattagtggatttgcttggcctcgaacgcttggaagttcccggtttcgaggcagacgacgtattagcgactctcgcaaagaaagccgaacgtgagggctatgaagtccagatcttgacagcagatcgcgatcttttccagcttttatctccgcgcatctcggtgttacacccggaagggcatcgtatcaccccggaatggctctgggagaaatatggtttgcgtcccgaacaatgggtggattttcgcgccttagcaggcgatccgagcgacaatattccgggagttaaaggtatcggcgagaagacggcgctcaagctccttaaagaatgggggtcgttggagaacttgcttaagaatttagatcaggtcaaaccagagtcagtgcgtgagaagattcttgctcacctcgaagacctcaaattaagccgcgaattgtcccgtgtacgcaccgatttgccgctcgaagttgatttcggtcgccgccgcgaacctgactgggagggtcttaaagcgtttttagagcgtcttgaatttggttcgctcttgcatgaattcggccttttagaaagcccgttactggccgaagaagcaccttggccaccgcccgagggcgcgtttttaggttaccgtttgagtcgcccggaaccgatgtgggccgaattactggctcttgcagcgtctgcccagggacgtgtgtatcgcgcggaagaccctcatggtgcgctccgcggcctcttcgaagtccgtggcctccttgccaaagacttagctgttgttgcattgcgcgaaggtcttgatttacctccgactgatgatccaatgcttcttgcgtacctcttggacccgtcaaacacgacgcccgaaggcgtagcccgtcgttacggcggcgagtggaccgaagatgcagccaaacgcgcgttattggccgaacgtttgcacgaaaatttattaggacgtttgcaaggcgaggaacgtctcctgtggctttacgaagaagtggagaaaccattgagtcgcgtgctcgcgcatatggaagctaccggtgtcaaattagacgtggcgtatttggagaatctcctgcttgaagttgctgcccacatgcgccgcttggaggaagaagtattccgtttagcaggccgttcctttcgccttaactctcgcgatcagttagaacgtgtgttgttcgatgaacttggtctccctcctatcggcaagacagagaagaccggtaaacgtagcacttcagcggcggttttagaagctcttcgcgaagtccatcccattgtggacaagatcttgcagtaccgcgaaatggcgaaattgaaaggcacctatattgaccgtcttccggcattagtccacccgaaaacgggacgcctccatacccgcttcaaccaaacagccacggcgaccggtcgtttgtcctcctctgatccaaaccttcagaatattccagtacgtaccccattgggccagaagatccgccgtgcgtttgtagctgaggagggttgggcgttagtggccctcgattatcgtcaaattgaattacgtgtccttgcccatctttctggcgatgagaacctcatccgcgtgtttcaggaaggcaaagacattcacactcaaacggcaagctggatgtttggattatcagctgaagcgatcgatcctttgatgcgtcgtgcagcgaagaccatcaatttcggtgttctctacggtatgagtgcctttcgtttgtcgcaggaattaggcattcccctggaagaagctcaggctttcattcagaaatactttcaaagctatcccaaagttaaagcatggatcgagaagactctccgtgaaggccgcacacgtggttacgtagagaccttatttggacgtcgccgctatgttcccgatttaaactcgcgcgtgaaaggcaagcgtgaagccgccgaacgcatggcgttcaacatgcctgtacagggcacggcagctgacctcatgaaacttgcaatggtgcgcctttttccacaattgcgtgaagttggtgcccgcatgctgttgcaggtccacgatgaactcttgttagaagcgccaaaagagcgtgcggaagaggtggcagccctcgcgaaagaagttatggaaggcgtgtggcccttagcggtgcctcttgaagtcgaagttggtattggcgaggattggctggctgccaaagga

SEQ ID NO: 6006 - protein, 841 aa, synthetic construct
  REGION 1..841: note = Variant of DNA polymerase I from Thermus sp. strain 2.9
MHHHHHHGGSGVLPVFEPKGRVLLVDGHHLAYRNFFALKGLTTSLGEPVQGVYGFAKSLLKALKEDGDVVIVVFDAKAPSFRHEAYEAYKAGRAPTPEDFPRQLALMKELVDLLGLERLEVPGFEADDVLATLAKKAEREGYEVQILTADRDLFQLLSPRISVLHPEGHRITPEWLWEKYGLRPEQWVDFRALAGDPSDNIPGVKGIGEKTALKLLKEWGSLENLLKNLDQVKPESVREKILAHLEDLKLSRELSRVRTDLPLEVDFGRRREPDWEGLKAFLERLEFGSLLHEFGLLESPLLAEEAPWPPPEGAFLGYRLSRPEPMWAELLALAASAQGRVYRAEDPHGALRGLFEVRGLLAKDLAVVALREGLDLPPTDDPMLLAYLLDPSNTTPEGVARRYGGEWTEDAAKRALLAERLHENLLGRLQGEERLLWLYEEVEKPLSRVLAHMEATGVKLDVAYLENLLLEVAAHMRRLEEEVFRLAGRSFRLNSRDQLERVLFDELGLPPIGKTEKTGKRSTSAAVLEALREVHPIVDKILQYREMAKLKGTYIDRLPALVHPKTGRLHTRFNQTATATGRLSSSDPNLQNIPVRTPLGQKIRRAFVAEEGWALVALDYRQIELRVLAHLSGDENLIRVFQEGKDIHTQTASWMFGLSAEAIDPLMRRAAKTINFGVLYGMSAFRLSQELGIPLEEAQAFIQKYFQSYPKVKAWIEKTLREGRTRGYVETLFGRRRYVPDLNSRVKGKREAAERMAFNMPVQGTAADLMKLAMVRLFPQLREVGARMLLQVHDELLLEAPKERAEEVAALAKEVMEGVWPLAVPLEVEVGIGEDWLAAKG

SEQ ID NO: 6007 - DNA, 2523 bp, synthetic construct
  misc_feature 1..2523: note = Variant of DNA polymerase I from Thermus sp. strain 2.9
  source 1..2523: mol_type = other DNA
atgcaccatcatcatcatcatggcggtagcggcgtgttaccggtgttcgagcctaaaggtcgcgtgcttctggttgatggccatcatctcgcgtatcgtaacttctttgccctgaaaggattaaccaccagcctgggcgagccggtacagggtgtctacggctttgcaaagtcgctcctgaaagctctgaaagaagacggtgatgtggtgattgttgtctttgatgcgaaagcgccaagttttcgccacgaagcgtacgaagcttacaaagccgggcgtgctccaacgccggaagactttcctcgccaattggcgcttatgaaggaattagtggatttgcttggcctcgaacgcttggaagttcccggtttcgaggcagacgacgtattagcgactctcgcaaagaaagccgaacgtgagggctatgaagtccagatcttgacagcagatcgcgatcttttccagcttttatctccgcgcatctcggtgttacacccggaagggcatcgtatcaccccggaatggctctgggagaaatatggtttgcgtcccgaacaatgggtggattttcgcgccttagcaggcgatccgagcgacaatattccgggagttaaaggtatcggcgagaagacggcgctcaagctccttaaagaatgggggtcgttggagaacttgcttaagaatttagatcaggtcaaaccagagtcagtgcgtgagaagattcttgctcacctcgaagacctcaaattaagccgcgaattgtcccgtgtacgcaccgatttgccgctcgaagttgatttcggtcgccgccgcgaacctgactgggagggtcttaaagcgtttttagagcgtcttgaatttggttcgctcttgcatgaattcggccttttagaaagcccgttactggccgaagaagcaccttggccaccgcccgagggcgcgtttttaggttaccgtttgagtcgcccggaaccgatgtgggccgaattactggctcttgcagcgtctgcccagggacgtgtgtatcgcgcggaagaccctcatggtgcgctccgcggcctcttcgaagtccgtggactccttgccaaagacttagctgttgttgcattgcgcgaaggtcttgatttacctccgactgatgatccaatgcttcttgcgtacctcttggacccgtcaaacacgacgcccgaaggcgtagcccgtcgttacggcggcgagtggaccgaagatgcagcgaaacgcgcgttattggccgaacgtttgcacgaaaatttattaggacgtttgcaaggcgaggaacgtctcctctggctttacgaagaagtggagaaaccattgagtcgcgtgctcgcgcatatggaagctaccggtgtcaaattagacgtggcgtatttggagaatctcagccttgaagttgctgcccacatgcgccgcttggaggaagaagtattccgtttagcaggccgttcctttcgccttaactctcgcgatcagttagaacgtgtgttgttcgatgaacttggtctccctcctatcggcaagacagagaagaccggtaaacgtagcacttcagcggcggttttagaagctcttcgcgaagtccatcccattgtggacaagatcttgcagtaccgcgaaatggcgaaattgaaaggcacctatattgaccgtcttccggcattagtccacccgaaaacgggacgcctccatacccgcttcaaccaaacagccacggcgaccggtcgtttgtcctcctctgatccaaaccttcagaatattccagtacgtaccccattgggccagaagatccgccgtgcgtttgtagctgaggagggttggcgtttagtgttgctcgattatcgtcaaattgaattacgtgtccttgcccatctttctggcgatgagaacctcatccgcgtgtttcaggaaggcaaagacattcacactcaaacggcaagctggatgtttggattatcagctgaagcgatcgatcctttgatgcgtcgtgcagcgaagaccatcaatttcggtgttctctacggtatgagtgcctttcgtttgtcgcaggaattaggcattccctatgaagaagctcaggcgttcattcagaaatactttcaaagctatcccaaagttaaagcatggatcgagaagactctccgtgaaggccgcacacgtggttacgtagagaccttatttggacgtcgccgctatgttcccgatttaaacgctcgcgtgaaaggcaagcgtgaagccgccgaacgcatggcgttcaacatgcctgtacagggcacggcagctgacctcatgaaacttgcaatggtgcgcctttttccacaattgcgtgaagttggtgcccgcatgctcttgcaggtccacgatgaactcttgttagaagcgccaaaagagcgtgcggaagaggtggcagccctcgcgaaagaagttatggaaggcgtgtggcccttagcggtgcctcttgaagtcgaagttggtattggcgaggattggctggctgccaaagga

SEQ ID NO: 6008 - protein, 841 aa, synthetic construct
  REGION 1..841: note = Variant of DNA polymerase I from Thermus sp. strain 2.9
MHHHHHHGGSGVLPVFEPKGRVLLVDGHHLAYRNFFALKGLTTSLGEPVQGVYGFAKSLLKALKEDGDVVIVVFDAKAPSFRHEAYEAYKAGRAPTPEDFPRQLALMKELVDLLGLERLEVPGFEADDVLATLAKKAEREGYEVQILTADRDLFQLLSPRISVLHPEGHRITPEWLWEKYGLRPEQWVDFRALAGDPSDNIPGVKGIGEKTALKLLKEWGSLENLLKNLDQVKPESVREKILAHLEDLKLSRELSRVRTDLPLEVDFGRRREPDWEGLKAFLERLEFGSLLHEFGLLESPLLAEEAPWPPPEGAFLGYRLSRPEPMWAELLALAASAQGRVYRAEDPHGALRGLFEVRGLLAKDLAVVALREGLDLPPTDDPMLLAYLLDPSNTTPEGVARRYGGEWTEDAAKRALLAERLHENLLGRLQGEERLLWLYEEVEKPLSRVLAHMEATGVKLDVAYLENLSLEVAAHMRRLEEEVFRLAGRSFRLNSRDQLERVLFDELGLPPIGKTEKTGKRSTSAAVLEALREVHPIVDKILQYREMAKLKGTYIDRLPALVHPKTGRLHTRFNQTATATGRLSSSDPNLQNIPVRTPLGQKIRRAFVAEEGWRLVLLDYRQIELRVLAHLSGDENLIRVFQEGKDIHTQTASWMFGLSAEAIDPLMRRAAKTINFGVLYGMSAFRLSQELGIPYEEAQAFIQKYFQSYPKVKAWIEKTLREGRTRGYVETLFGRRRYVPDLNARVKGKREAAERMAFNMPVQGTAADLMKLAMVRLFPQLREVGARMLLQVHDELLLEAPKERAEEVAALAKEVMEGVWPLAVPLEVEVGIGEDWLAAKG

SEQ ID NO: 6009 - DNA, 2523 bp, synthetic construct
  misc_feature 1..2523: note = Variant of DNA polymerase I from Thermus sp. strain 2.9
  source 1..2523: mol_type = other DNA
atgcaccatcatcatcatcatggcggtagcggcgtgttaccggtgttcgagcctaaaggtcgcgtgcttctggttgatggccatcatctcgcgtatcgtaacttctttgccctgaaaggattaaccaccagcctgggcgagccggtacagggtgtctacggctttgcaaagtcgctcctgaaagctctgaaagaagacggtgatgtggtgattgttgtctttgatgcgaaagcgccaagttttcgccacgaagcgtacgaagcttacaaagccgggcgtgctccaacgccggaagactttcctcgccaattggcgcttatgaaggaattagtggatttgcttggcctcgaacgcttggaagttcccggtttcgaggcagacgacgtattagcgactctcgcaaagaaagccgaacgtgagggctatgaagtccagatcttgacagcagatcgcgatcttttccagcttttatctccgcgcatctcggtgttacacccggaagggcatcgtatcaccccggaatggctctgggagaaatatggtttgcgtcccgaacaatgggtggattttcgcgccttagcaggcgatccgagcgacaatattccgggagttaaaggtatcggcgagaagacggcgctcaagctccttaaagaatgggggtcgttggagaacttgcttaagaatttagatcaggtcaaaccagagtcagtgcgtgagaagattcttgctcacctcgaagacctcaaattaagccgcgaattgtcccgtgtacgcaccgatttgccgctcgaagttgatttcggtcgccgccgcgaacctgactgggagggtcttaaagcgtttttagagcgtcttgaatttggttcgctcttgcatgaattcggccttttagaaagcccgttactggccgaagaagcaccttggccaccgcccgagggcgcgtttttaggttaccgtttgagtcgcccggaaccgatgtgggccgaattactggctcttgcagcgtctgcccagggacgtgtgtatcgcgcggaagaccctcatggtgcgctccgcggcctcttcgaagtccgtggactccttgccaaagacttagctgttgttgcattgcgcgaaggtcttgatttacctccgactgatgatccaatgcttcttgcgtacctcttggacccgtcaaacacgacgcccgaaggcgtagcccgtcgttacggcggcgagtggaccgaagatgcagcgaaacgcgcgttattggccgaacgtttgcacgaaaatttattaggacgtttgcaaggcgaggaacgtctcctctggctttacgaagaagtggagaaaccattgagtcgcgtgctcgcgcatatggaagctaccggtgtcaaattagacgtggcgtatttggagaatctcagccttgaagttgctgcccacatgcgccgcttggaggaagaagtattccgtttagcaggccgttcctttcgccttaactctcgcgatcagttagaacgtgtgttgttcgatgaacttggtctccctcctatcggcaagacagagaagaccggtaaacgtagcacttcagcggcggttttagaagctcttcgcgaagtccatcccattgtggacaagatcttgcagtaccgcgaaatggcgaaattgaaaggcacctatattgaccgtcttccggcattagtccacccgaaaacgggacgcctccatacccgcttcaaccaaacagccacggcgaccggtcgtttgtcctcctctgatccaaaccttcagaatattccagtacgtaccccattgggccagaagatccgccgtgcgtttgtagctgaggagggttggcgtttagtggccctcgattatcgtcaaattgaattacgtgtccttgcccatctttctggcgatgagaacctcatccgcgtgtttcaggaaggcaaagacattcacactcaaacggcaagctggatgtttggattatcagctgaagcgatcgatcctttgatgcgtcgtgcagcgaagaccatcaatttcggtgttctctacggtatgagtgcctttcgtttgtcgcaggaattaggcattccctatgaagaagctcaggcgttcattcagaaatactttcaaagctatcccaaagttaaagggtggatcgagaagactctccgtgaaggccgcacacgtggttacgtagagaccttatttggacgtcgccgctatgttcccgatttaaacgctcgcgtgaaaggcaagcgtgaagccgccgaacgcatggcgttcaacatgcctgtacagggcacggcagctgacctcatgaaacttgcaatggtgcgcctttttccacaattgcgtgaagttggtgcccgcatgctcttgcaggtccacgatgaactcttgttagaagcgccaaaagagcgtgcggaagaggtggcagccctcgcgaaagaagttatggaaggcgtgtggcccttagcggtgcctcttgaagtcgaagttggtattggcgaggattggctggctgccaaagga

SEQ ID NO: 6010 - protein, 841 aa, synthetic construct
  REGION 1..841: note = Variant of DNA polymerase I from Thermus sp. strain 2.9
MHHHHHHGGSGVLPVFEPKGRVLLVDGHHLAYRNFFALKGLTTSLGEPVQGVYGFAKSLLKALKEDGDVVIVVFDAKAPSFRHEAYEAYKAGRAPTPEDFPRQLALMKELVDLLGLERLEVPGFEADDVLATLAKKAEREGYEVQILTADRDLFQLLSPRISVLHPEGHRITPEWLWEKYGLRPEQWVDFRALAGDPSDNIPGVKGIGEKTALKLLKEWGSLENLLKNLDQVKPESVREKILAHLEDLKLSRELSRVRTDLPLEVDFGRRREPDWEGLKAFLERLEFGSLLHEFGLLESPLLAEEAPWPPPEGAFLGYRLSRPEPMWAELLALAASAQGRVYRAEDPHGALRGLFEVRGLLAKDLAVVALREGLDLPPTDDPMLLAYLLDPSNTTPEGVARRYGGEWTEDAAKRALLAERLHENLLGRLQGEERLLWLYEEVEKPLSRVLAHMEATGVKLDVAYLENLSLEVAAHMRRLEEEVFRLAGRSFRLNSRDQLERVLFDELGLPPIGKTEKTGKRSTSAAVLEALREVHPIVDKILQYREMAKLKGTYIDRLPALVHPKTGRLHTRFNQTATATGRLSSSDPNLQNIPVRTPLGQKIRRAFVAEEGWRLVALDYRQIELRVLAHLSGDENLIRVFQEGKDIHTQTASWMFGLSAEAIDPLMRRAAKTINFGVLYGMSAFRLSQELGIPYEEAQAFIQKYFQSYPKVKGWIEKTLREGRTRGYVETLFGRRRYVPDLNARVKGKREAAERMAFNMPVQGTAADLMKLAMVRLFPQLREVGARMLLQVHDELLLEAPKERAEEVAALAKEVMEGVWPLAVPLEVEVGIGEDWLAAKG

SEQ ID NO: 6011 - DNA, 2523 bp, synthetic construct
  misc_feature 1..2523: note = Variant of DNA polymerase I from Thermus sp. strain 2.9
  source 1..2523: mol_type = other DNA
atgcaccatcatcatcatcatggcggtagcggcgtgttaccggtgttcgagcctaaaggtcgcgtgcttctggttgatggccatcatctcgcgtatcgtaacttctttgccctgaaaggattaaccaccagcctgggcgagccggtacagggtgtctacggctttgcaaagtcgctcctgaaagctctgaaagaagacggtgatgtggtgattgttgtctttgatgcgaaagcgccaagttttcgccacgaagcgtacgaagcttacaaagccgggcgtgctccaacgccggaagactttcctcgccaattggcgcttatgaaggaattagtggatttgcttggcctcgaacgcttggaagttcccggtttcgaggcagacgacgtattagcgactctcgcaaagaaagccgaacgtgagggctatgaagtccagatcttgacagcagatcgcgatcttttccagcttttatctccgcgcatctcggtgttacacccggaagggcatcgtatcaccccggaatggctctgggagaaatatggtttgcgtcccgaacaatgggtggattttcgcgccttagcaggcgatccgagcgacaatattccgggagttaaaggtatcggcgagaagacggcgctcaagctccttaaagaatgggggtcgttggagaacttgcttaagaatttagatcaggtcaaaccagagtcagtgcgtgagaagattcttgctcacctcgaagacctcaaattaagccgcgaattgtcccgtgtacgcaccgatttgccgctcgaagttgatttcggtcgccgccgcgaacctgactgggagggtcttaaagcgtttttagagcgtcttgaatttggttcgctcttgcatgaattcggccttttagaaagcccgttactggccgaagaagcaccttggccaccgcccgagggcgcgtttttaggttaccgtttgagtcgcccggaaccgatgtgggccgaattactggctcttgcagcgtctgcccagggacgtgtgtatcgcgcggaagaccctcatggtgcgctccgcggcctcttcgaagtccgtggactccttgccaaagacttagctgttgttgcattgcgcgaaggtcttgatttacctccgactgatgatccaatgcttcttgcgtacctcttggacccgtcaaacacgacgcccgaaggcgtagcccgtcgttacggcggcgagtggaccgaagatgcagcgaaacgcgcgttattggccgaacgtttgcacgaaaatttattaggacgtttgcaaggcgaggaacgtctcctctggctttacgaagaagtggagaaaccattgagtcgcgtgctcgcgcatatggaagctaccggtgtcaaattagacgtggcgtatttggagaatctcagccttgaagttgctgcccacatgcgccgcttggaggaagaagtattccgtttagcaggccgttcctttcgccttaactctcgcgatcagttagaacgtgtgttgttcgatgaacttggtctccctcctatcggcaagacagagatgaccggtaaacgtagcacttcagcggcggttttagaagctcttcgcgaagtccatcccattgtggacaagatcttgcagtaccgcgaaatggcgaaattgaaaggcacctatattgaccgtcttccggcattagtccacccgaaaacgggacgcctccatacccgcttcaaccaaacagccacggcgaccggtcgtttgtcctcctctgatccaaaccttcagaatattccagtacgtaccccattgggccagaagatccgccgtgcgtttgtagctgaggagggttggcgtttagtggccctcgattatcgtcaaattgaattacgtgtccttgcccatctttctggcgatgagaacctcatccgcgtgtttcaggaaggcaaagacattcacactcaaacggcaagctggatgtttggattatcagctgaagcgatcgatcctttgatgcgtcgtgcagcgaagaccatcaatttcggtgttctctacggtatgagtgcctttcgtttgtcgcaggaattaggcattccctatgaagaagctcaggcgttcattcagaaatactttcaaagctatcccaaagttaaagcatggatcgagaagactctccgtgaaggccgcacacgtggttacgtagagaccttatttggacgtcgccgctatgttcccgatttaaacgctcgcgtgaaaggcaagcgtgaagccgccgaacgcatggcgttcaacatgcctgtacagggcacggcagctgacctcatgaaacttgcaatggtgcgcctttttccacaattgcgtgaagttggtgcccgcatgctcttgcaggtccacgatgaactcttgttagaagcgccaaaagagcgtgcggaagaggtggcagccctcgcgaaagaagttatggaaggcgtgtggcccttagcggtgcctcttgaagtcgaagttggtattggcgaggattggctggctgccaaagga

SEQ ID NO: 6012 - protein, 841 aa, synthetic construct
  REGION 1..841: note = Variant of DNA polymerase I from Thermus sp. strain 2.9
MHHHHHHGGSGVLPVFEPKGRVLLVDGHHLAYRNFFALKGLTTSLGEPVQGVYGFAKSLLKALKEDGDVVIVVFDAKAPSFRHEAYEAYKAGRAPTPEDFPRQLALMKELVDLLGLERLEVPGFEADDVLATLAKKAEREGYEVQILTADRDLFQLLSPRISVLHPEGHRITPEWLWEKYGLRPEQWVDFRALAGDPSDNIPGVKGIGEKTALKLLKEWGSLENLLKNLDQVKPESVREKILAHLEDLKLSRELSRVRTDLPLEVDFGRRREPDWEGLKAFLERLEFGSLLHEFGLLESPLLAEEAPWPPPEGAFLGYRLSRPEPMWAELLALAASAQGRVYRAEDPHGALRGLFEVRGLLAKDLAVVALREGLDLPPTDDPMLLAYLLDPSNTTPEGVARRYGGEWTEDAAKRALLAERLHENLLGRLQGEERLLWLYEEVEKPLSRVLAHMEATGVKLDVAYLENLSLEVAAHMRRLEEEVFRLAGRSFRLNSRDQLERVLFDELGLPPIGKTEMTGKRSTSAAVLEALREVHPIVDKILQYREMAKLKGTYIDRLPALVHPKTGRLHTRFNQTATATGRLSSSDPNLQNIPVRTPLGQKIRRAFVAEEGWRLVALDYRQIELRVLAHLSGDENLIRVFQEGKDIHTQTASWMFGLSAEAIDPLMRRAAKTINFGVLYGMSAFRLSQELGIPYEEAQAFIQKYFQSYPKVKAWIEKTLREGRTRGYVETLFGRRRYVPDLNARVKGKREAAERMAFNMPVQGTAADLMKLAMVRLFPQLREVGARMLLQVHDELLLEAPKERAEEVAALAKEVMEGVWPLAVPLEVEVGIGEDWLAAKG

SEQ ID NO: 6013 - DNA, 2523 bp, synthetic construct
  misc_feature 1..2523: note = Variant of DNA polymerase I from Thermus sp. strain 2.9
  source 1..2523: mol_type = other DNA
atgcaccatcatcatcatcatggcggtagcggcgtgttaccggtgttcgagcctaaaggtcgcgtgcttctggttgatggccatcatctcgcgtatcgtaacttctttgccctgaaaggattaaccaccagcctgggcgagccggtacagggtgtctacggctttgcaaagtcgctcctgaaagctctgaaagaagacggtgatgtggtgattgttgtctttgatgcgaaagcgccaagttttcgccacgaagcgtacgaagcttacaaagccgggcgtgctccaacgccggaagactttcctcgccaattggcgcttatgaaggaattagtggatttgcttggcctcgaacgcttggaagttcccggtttcgaggcagacgacgtattagcgactctcgcaaagaaagccgaacgtgagggctatgaagtccagatcttgacagcagatcgcgatcttttccagcttttatctccgcgcatctcggtgttacacccggaagggcatcgtatcaccccggaatggctctgggagaaatatggtttgcgtcccgaacaatgggtggattttcgcgccttagcaggcgatccgagcgacaatattccgggagttaaaggtatcggcgagaagacggcgctcaagctccttaaagaatgggggtcgttggagaacttgcttaagaatttagatcaggtcaaaccagagtcagtgcgtgagaagattcttgctcacctcgaagacctcaaattaagccgcgaattgtcccgtgtacgcaccgatttgccgctcgaagttgatttcggtcgccgccgcgaacctgactgggagggtcttaaagcgtttttagagcgtcttgaatttggttcgctcttgcatgaattcggccttttagaaagcccgttactggccgaagaagcaccttggccaccgcccgagggcgcgtttttaggttaccgtttgagtcgcccggaaccgatgtgggccgaattactggctcttgcagcgtctgcccagggacgtgtgtatcgcgcggaagaccctcatggtgcgctccgcggcctcttcgaagtccgtggcctccttgccaaagacttagctgttgttgcattgcgcgaaggtcttgatttacctccgactgatgatccaatgcttcttgcgtacctcttggacccgtcaaacacgacgcccgaaggcgtagcccgtcgttacggcggcgagtggaccgaagatgcagcgaaacgcgcgttattggccgaacgtttgcacgaaaatttattaggacgtttgcaaggcgaggagcgtctcctgtggctttacgaagaagtggagaaaccattgagtcgcgtgctcgcgcatatggaagctaccggtgtcaaattagacgtggcgtatttggagaatctcctgcttgaagttgctgcccacatgcgccgcttggaggaagaagtattccgtttagcaggccgttcctttcgccttaactctcgcgatcagttagaacgtgtgttgttcgatgaacttggtctccctcctatcggcaagacagagaagaccggtaaacgtagcacttcagcggcggttttagaagctcttcgcgaagtccatcccattgtggacaagatcttgcagtaccgcgaaatggcgaaattgaaaggcacctatattgaccgtcttccggcattagtccacccgaaaacgggacgcctccatacccgcttcaaccaaacagccacggcgaccggtcgtttgtcctcctctgatccaaaccttcagaatattccagtacgtaccccattgggccagaagatccgccgtgcgtttgtagctgaggagggttggcgtttagtggccctcgattatcgtcaaattgaattacgtgtccttgcccatctttctggcgatgagaacctcatccgcgtgtttcaggaaggcaaagacattcacactcaaacggcaagctggatgtttggattatcagctgaagcgatcgatcctttgatgcgtcgtgcagcgaagaccatcaatttcggtgttctctacggtatgagtgcctttcgtttgtcgcaggaattaggcattccctatgaagaagctcaggcgttcattcagaaatactttcaaagctatcccaaagttaaagcatggatcgagaagactctccgtgaaggccgcacacgtggttacgtagagaccttatttggacgtcgccgctatgttcccgatttaaactcgcgcgtgaaaggcaagcgtgaagccgccgaacgcatggcgttcaacatgcctgtacagggcacggcagctgacctcatgaaacttgcaatggtgcgcctttttccacaattgcgtgaagttggtgcccgcatgctcttgcaggtccacgatgaactcttgttagaagcgccaaaagagcgtgcggaagaggtggcagccctcgcgaaagaagttatggaaggcgtgtggcccttagcggtgcctcttgaagtcgaagttggtattggcgaggattggctggctgccaaagga

SEQ ID NO: 6014 - protein, 841 aa, synthetic construct
  REGION 1..841: note = Variant of DNA polymerase I from Thermus sp. strain 2.9
MHHHHHHGGSGVLPVFEPKGRVLLVDGHHLAYRNFFALKGLTTSLGEPVQGVYGFAKSLLKALKEDGDVVIVVFDAKAPSFRHEAYEAYKAGRAPTPEDFPRQLALMKELVDLLGLERLEVPGFEADDVLATLAKKAEREGYEVQILTADRDLFQLLSPRISVLHPEGHRITPEWLWEKYGLRPEQWVDFRALAGDPSDNIPGVKGIGEKTALKLLKEWGSLENLLKNLDQVKPESVREKILAHLEDLKLSRELSRVRTDLPLEVDFGRRREPDWEGLKAFLERLEFGSLLHEFGLLESPLLAEEAPWPPPEGAFLGYRLSRPEPMWAELLALAASAQGRVYRAEDPHGALRGLFEVRGLLAKDLAVVALREGLDLPPTDDPMLLAYLLDPSNTTPEGVARRYGGEWTEDAAKRALLAERLHENLLGRLQGEERLLWLYEEVEKPLSRVLAHMEATGVKLDVAYLENLLLEVAAHMRRLEEEVFRLAGRSFRLNSRDQLERVLFDELGLPPIGKTEKTGKRSTSAAVLEALREVHPIVDKILQYREMAKLKGTYIDRLPALVHPKTGRLHTRFNQTATATGRLSSSDPNLQNIPVRTPLGQKIRRAFVAEEGWRLVALDYRQIELRVLAHLSGDENLIRVFQEGKDIHTQTASWMFGLSAEAIDPLMRRAAKTINFGVLYGMSAFRLSQELGIPYEEAQAFIQKYFQSYPKVKAWIEKTLREGRTRGYVETLFGRRRYVPDLNSRVKGKREAAERMAFNMPVQGTAADLMKLAMVRLFPQLREVGARMLLQVHDELLLEAPKERAEEVAALAKEVMEGVWPLAVPLEVEVGIGEDWLAAKG

SEQ ID NO: 6015 - DNA, 2523 bp, synthetic construct
  misc_feature 1..2523: note = Variant of DNA polymerase I from Thermus sp. strain 2.9
  source 1..2523: mol_type = other DNA
atgcaccatcatcatcatcatggcggtagcggcgtgttaccggtgttcgagcctaaaggtcgcgtgcttctggttgatggccatcatctcgcgtatcgtaacttctttgccctgaaaggattaaccaccagcctgggcgagccggtacagggtgtctacggctttgcaaagtcgctcctgaaagctctgaaagaagacggtgatgtggtgattgttgtctttgatgcgaaagcgccaagttttcgccacgaagcgtacgaagcttacaaagccgggcgtgctccaacgccggaagactttcctcgccaattggcgcttatgaaggaattagtggatttgcttggcctcgaacgcttggaagttcccggtttcgaggcagacgacgtattagcgactctcgcaaagaaagccgaacgtgagggctatgaagtccagatcttgacagcagatcgcgatcttttccagcttttatctccgcgcatctcggtgttacacccggaagggcatcgtatcaccccggaatggctctgggagaaatatggtttgcgtcccgaacaatgggtggattttcgcgccttagcaggcgatccgagcgacaatattccgggagttaaaggtatcggcgagaagacggcgctcaagctccttaaagaatgggggtcgttggagaacttgcttaagaatttagatcaggtcaaaccagagtcagtgcgtgagaagattcttgctcacctcgaagacctcaaattaagccgcgaattgtcccgtgtacgcaccgatttgccgctcgaagttgatttcggtcgccgccgcgaacctgactgggagggtcttaaagcgtttttagagcgtcttgaatttggttcgctcttgcatgaattcggccttttagaaagcccgttactggccgaagaagcaccttggccaccgcccgagggcgcgtttttaggttaccgtttgagtcgcccggaaccgatgtgggccgaattactggctcttgcagcgtctgcccagggacgtgtgtatcgcgcggaagaccctcatggtgcgctccgcggcctcttcgaagtccgtggactccttgccaaagacttagctgttgttgcattgcgcgaaggtcttgatttacctccgactgatgatccaatgcttcttgcgtacctcttggacccgtcaaacacgacgcccgaaggcgtagcccgtcgttacggcggcgagtggaccgaagatgcagcgaaacgcgcgttattggccgaacgtttgcacgaaaatttattaggacgtttgcaaggcgaggaacgtctcctctggctttacgaagaagtggagaaaccattgagtcgcgtgctcgcgcatatggaagctaccggtgtcaaattagacgtggcgtatttggagaatcttcaccttcgggttgctgcccacatgcgccgcttggaggaagaagtattccgtttagcaggccgttcctttcgccttaactctcgcgatcagttagaacgtgtgttgttcgatgaacttggtctccctcctatcggcaagacagagaagaccggtaaacgtagcacttcagcggcggttttagaagctcttcgcgaagtccatcccattgtggacaagatcttgcagtaccgcgaaatggcgaaattgaaaggcacctatattgaccgtcttccggcattagtccacccgaaaacgggacgcctccatacccgcttcaaccaaacagccacggcgaccggtcgtttgtcctcctctgatccaaaccttcagaatattccagtacgtaccccattgggccagaagatccgccgtgcgtttgtagctgaggagggttggcgtttagtggccctcgattatcgtcaaattgaattacgtgtccttgcccatctttctggcgatgagaacctcatccgcgtgtttcaggaaggcaaagacattcacactcaaacggcaagctggatgtttggattatcagctgaagcgatcgatcctttgatgcgtcgtgcagcgaagaccatcaatttcggtgttctctacggtatgagtgcctttcgtttgtcgcaggaattaggcattccctatgaagaagctcaggcgttcattcagaaatactttcaaagctatcccaaagttaaagcatggatcgagaagactctccgtgaaggccgcacacgtggttacgtagagaccttatttggacgtcgccgctatgttcccgatttaaacgctcgcgtgaaaggcaagcgtgaagccgccgaacgcatggcgttcaacatgcctgtacagggcacggcagctgacctcatgaaacttgcaatggtgcgcctttttccacaattgcgtgaagttggtgcccgcatgctcttgcaggtccacgatgaactcttgttagaagcgccaaaagagcgtgcggaagaggtggcagccctcgcgaaagaagttatggaaggcgtgtggcccttagcggtgcctcttgaagtcgaagttggtattggcgaggattggctggctgccaaagga

SEQ ID NO: 6016 - protein, 841 aa, synthetic construct
  REGION 1..841: note = Variant of DNA polymerase I from Thermus sp. strain 2.9
MHHHHHHGGSGVLPVFEPKGRVLLVDGHHLAYRNFFALKGLTTSLGEPVQGVYGFAKSLLKALKEDGDVVIVVFDAKAPSFRHEAYEAYKAGRAPTPEDFPRQLALMKELVDLLGLERLEVPGFEADDVLATLAKKAEREGYEVQILTADRDLFQLLSPRISVLHPEGHRITPEWLWEKYGLRPEQWVDFRALAGDPSDNIPGVKGIGEKTALKLLKEWGSLENLLKNLDQVKPESVREKILAHLEDLKLSRELSRVRTDLPLEVDFGRRREPDWEGLKAFLERLEFGSLLHEFGLLESPLLAEEAPWPPPEGAFLGYRLSRPEPMWAELLALAASAQGRVYRAEDPHGALRGLFEVRGLLAKDLAVVALREGLDLPPTDDPMLLAYLLDPSNTTPEGVARRYGGEWTEDAAKRALLAERLHENLLGRLQGEERLLWLYEEVEKPLSRVLAHMEATGVKLDVAYLENLHLRVAAHMRRLEEEVFRLAGRSFRLNSRDQLERVLFDELGLPPIGKTEKTGKRSTSAAVLEALREVHPIVDKILQYREMAKLKGTYIDRLPALVHPKTGRLHTRFNQTATATGRLSSSDPNLQNIPVRTPLGQKIRRAFVAEEGWRLVALDYRQIELRVLAHLSGDENLIRVFQEGKDIHTQTASWMFGLSAEAIDPLMRRAAKTINFGVLYGMSAFRLSQELGIPYEEAQAFIQKYFQSYPKVKAWIEKTLREGRTRGYVETLFGRRRYVPDLNARVKGKREAAERMAFNMPVQGTAADLMKLAMVRLFPQLREVGARMLLQVHDELLLEAPKERAEEVAALAKEVMEGVWPLAVPLEVEVGIGEDWLAAKG

SEQ ID NO: 6017 - DNA, 2523 bp, synthetic construct
  misc_feature 1..2523: note = Variant of DNA polymerase I from Thermus sp. strain 2.9
  source 1..2523: mol_type = other DNA
atgcaccatcatcatcatcatggcggtagcggcgtgttaccggtgttcgagcctaaaggtcgcgtgcttctggttgatggccatcatctcgcgtatcgtaacttctttgccctgaaaggattaaccaccagcctgggcgagccggtacagggtgtctacggctttgcaaagtcgctcctgaaagctctgaaagaagacggtgatgtggtgattgttgtctttgatgcgaaagcgccaagttttcgccacgaagcgtacgaagcttacaaagccgggcgtgctccaacgccggaagactttcctcgccaattggcgcttatgaaggaattagtggatttgcttggcctcgaacgcttggaagttcccggtttcgaggcagacgacgtattagcgactctcgcaaagaaagccgaacgtgagggctatgaagtccagatcttgacagcagatcgcgatcttttccagcttttatctccgcgcatctcggtgttacacccggaagggcatcgtatcaccccggaatggctctgggagaaatatggtttgcgtcccgaacaatgggtggattttcgcgccttagcaggcgatccgagcgacaatattccgggagttaaaggtatcggcgagaagacggcgctcaagctccttaaagaatgggggtcgttggagaacttgcttaagaatttagatcaggtcaaaccagagtcagtgcgtgagaagattcttgctcacctcgaagacctcaaattaagccgcgaattgtcccgtgtacgcaccgatttgccgctcgaagttgatttcggtcgccgccgcgaacctgactgggagggtcttaaagcgtttttagagcgtcttgaatttggttcgctcttgcatgaattcggccttttagaaagcccgttactggccgaagaagcaccttggccaccgcccgagggcgcgtttttaggttaccgtttgagtcgcccggaaccgatgtgggccgaattactggctcttgcagcgtctgcccagggacgtgtgtatcgcgcggaagaccctcatggtgcgctccgcggcctcttcgaagtccgtggactccttgccaaagacttagctgttgttgcattgcgcgaaggtcttgatttacctccgactgatgatccaatgcttcttgcgtacctcttggacccgtcaaacacgacgcccgaaggcgtagcccgtcgttacggcggcgagtggaccgaagatgcagcgaaacgcgcgttattggccgaacgtttgcacgaaaatttattaggacgtttgcaaggcgaggaacgtctcctctggctttacgaagaagtggagaaaccattgagtgaggtgctcgcgcatatggaagctaccggtgtcaaattagacgtggcgtatttggagaatctcagccttgaagttgctgcccacatgcgccgcttggaggaagaagtattccgtttagcaggccgttcctttcgccttaactctcgcgatcagttagaacgtgtgttgttcgatgaacttggtctccctcctatcggcaagacagagaagaccggtaaacgtagcacttcagcggcggttttagaagctcttcgcgaagtccatcccattgtggacaagatcttgcagtaccgcgaaatggcgaaattgaaaggcacctatattgaccgtcttccggcattagtccacccgaaaacgggacgcctccatacccgcttcaaccaaacagccacggcgaccggtcgtttgtcctcctctgatccaaaccttcagaatattccagtacgtaccccattgggccagaagatccgccgtgcgtttgtagctgaggagggttggcgtttagtggccctcgattatcgtcaaattgaattacgtgtccttgcccatctttctggcgatgagaacctcatccgcgtgtttcaggaaggcaaagacattcacactcaaacggcaagctggatgtttggattatcagctgaagcgatcgatcctttgatgcgtcgtgcagcgaagaccatcaatttcggtgttctctacggtatgagtgcctttcgtttgtcgcaggaattaggcattccctatgaagaagctcaggcgttcattcagaaatactttcaaagctatcccaaagttaaagcatggatcgagaagactctccgtgaaggccgcacacgtggttacgtagagaccttatttggacgtcgccgctatgttcccgatttaaacgctcgcgtgaaaggcaagcgtgaagccgccgaacgcatggcgttcaacatgcctgtacagggcacggcagctgacctcatgaaacttgcaatggtgcgcctttttccacaattgcgtgaagttggtgcccgcatgctcttgcaggtccacgatgaactcttgttagaagcgccaaaagagcgtgcggaagaggtggcagccctcgcgaaagaagttatggaaggcgtgtggcccttagcggtgcctcttgaagtcgaagttggtattggcgaggattggctggctgccaaagga

SEQ ID NO: 6018 - protein, 841 aa, synthetic construct
  REGION 1..841: note = Variant of DNA polymerase I from Thermus sp. strain 2.9
MHHHHHHGGSGVLPVFEPKGRVLLVDGHHLAYRNFFALKGLTTSLGEPVQGVYGFAKSLLKALKEDGDVVIVVFDAKAPSFRHEAYEAYKAGRAPTPEDFPRQLALMKELVDLLGLERLEVPGFEADDVLATLAKKAEREGYEVQILTADRDLFQLLSPRISVLHPEGHRITPEWLWEKYGLRPEQWVDFRALAGDPSDNIPGVKGIGEKTALKLLKEWGSLENLLKNLDQVKPESVREKILAHLEDLKLSRELSRVRTDLPLEVDFGRRREPDWEGLKAFLERLEFGSLLHEFGLLESPLLAEEAPWPPPEGAFLGYRLSRPEPMWAELLALAASAQGRVYRAEDPHGALRGLFEVRGLLAKDLAVVALREGLDLPPTDDPMLLAYLLDPSNTTPEGVARRYGGEWTEDAAKRALLAERLHENLLGRLQGEERLLWLYEEVEKPLSEVLAHMEATGVKLDVAYLENLSLEVAAHMRRLEEEVFRLAGRSFRLNSRDQLERVLFDELGLPPIGKTEKTGKRSTSAAVLEALREVHPIVDKILQYREMAKLKGTYIDRLPALVHPKTGRLHTRFNQTATATGRLSSSDPNLQNIPVRTPLGQKIRRAFVAEEGWRLVALDYRQIELRVLAHLSGDENLIRVFQEGKDIHTQTASWMFGLSAEAIDPLMRRAAKTINFGVLYGMSAFRLSQELGIPYEEAQAFIQKYFQSYPKVKAWIEKTLREGRTRGYVETLFGRRRYVPDLNARVKGKREAAERMAFNMPVQGTAADLMKLAMVRLFPQLREVGARMLLQVHDELLLEAPKERAEEVAALAKEVMEGVWPLAVPLEVEVGIGEDWLAAKG

SEQ ID NO: 6019 - DNA, 2523 bp, synthetic construct
  misc_feature 1..2523: note = Variant of DNA polymerase I from Thermus sp. strain 2.9
  source 1..2523: mol_type = other DNA
atgcaccatcatcatcatcatggcggtagcggcgtgttaccggtgttcgagcctaaaggtcgcgtgcttctggttgatggccatcatctcgcgtatcgtaacttctttgccctgaaaggattaaccaccagcctgggcgagccggtacagggtgtctacggctttgcaaagtcgctcctgaaagctctgaaagaagacggtgatgtggtgattgttgtctttgatgcgaaagcgccaagttttcgccacgaagcgtacgaagcttacaaagccgggcgtgctccaacgccggaagactttcctcgccaattggcgcttatgaaggaattagtggatttgcttggcctcgaacgcttggaagttcccggtttcgaggcagacgacgtattagcgactctcgcaaagaaagccgaacgtgagggctatgaagtccagatcttgacagcagatcgcgatcttttccagcttttatctccgcgcatctcggtgttacacccggaagggcatcgtatcaccccggaatggctctgggagaaatatggtttgcgtcccgaacaatgggtggattttcgcgccttagcaggcgatccgagcgacaatattccgggagttaaaggtatcggcgagaagacggcgctcaagctccttaaagaatgggggtcgttggagaacttgcttaagaatttagatcaggtcaaaccagagtcagtgcgtgagaagattcttgctcacctcgaagacctcaaattaagccgcgaattgtcccgtgtacgcaccgatttgccgctcgaagttgatttcggtcgccgccgcgaacctgactgggagggtcttaaagcgtttttagagcgtcttgaatttggttcgctcttgcatgaattcggccttttagaaagcccgttactggccgaagaagcaccttggccaccgcccgagggcgcgtttttaggttaccgtttgagtcgcccggaaccgatgtgggccgaattactggctcttgcagcgtctgcccagggacgtgtgtatcgcgcggaagaccctcatggtgcgctccgcggcctcttcgaagtccgtggcctccttgccaaagacttagctgttgttgcattgcgcgaaggtcttgatttacctccgactgatgatccaatgcttcttgcgtacctcttggacccgtcaaacacgacgcccgaaggcgtagcccgtcgttacggcggcgagtggtgggaagatgcagccaaacgcgcgttattggccgaacgtttgcacgaaaatttattaggacgtttgcaaggcgaggaacgtctcctctggctttacgaagaagtggagaaaccattgagtcgcgtgctcgcgcatatggaagctaccggtgtcaaattagacgtggcgtatttggagaatctcagccttgaagttgctgcccacatgcgccgcttggaggaagaagtattccgtttagcaggccgttcctttcgccttaactctcgcgatcagttagaacgtgtgttgttcgatgaacttggtctccctcctatcggcaagacagagaagaccggtaaacgtagcacttcagcggcggttttagaagctcttcgcgaagtccatcccattgtggacaagatcttgcagtaccgcgaaatggcgaaattgaaaggcacctatattgaccgtcttccggcattagtccacccgaaaacgggacgcctccatacccgcttcaaccaaacagccacggcgaccggtcgtttgtcctcctctgatccaaaccttcagaatattccagtacgtaccccattgggccagaagatccgccgtgcgtttgtagctgagccgggttgggcgttagtggccctcgattatcgtcaaattgaattacgtgtccttgcccatctttctggcgatgagaacctcatccgcgtgtttcaggaaggcaaagacattcacactcaaacggcaagctggatgtttggattatcagctgaagcgatcgatcctttgatgcgtcgtgcagcgaagaccatcaatttcggtgttctctacggtatgagtgcctttcgtttgtcgcaggaattaggcattcccctggaagaagctcaggctttcattcagaaatactttcaaggctatcccaaagttaaagcatggatcgagaagactctccgtgaaggccgcacacgtggttacgtagagaccttatttggacgtcgccgctatgttcccgatttaaacgctcgcgtgaaaggcaagcgtgaagccgccgaacgcatggcgttcaacatgcctgtacagggcacggcagctgacctcatgaaacttgcaatggtgcgcctttttccacaattgcgtgaagttggtgcccgcatgctgttgcaggtccacgatgaactcttgttagaagcgccaaaagagcgtgcggaagaggtggcagccctcgcgaaagaagttatggaaggcgtgtggcccttagcggtgcctcttgaagtcgaagttggtattggcgaggattggctggctgccaaagga

SEQ ID NO: 6020 - protein, 841 aa, synthetic construct
  REGION 1..841: note = Variant of DNA polymerase I from Thermus sp. strain 2.9
MHHHHHHGGSGVLPVFEPKGRVLLVDGHHLAYRNFFALKGLTTSLGEPVQGVYGFAKSLLKALKEDGDVVIVVFDAKAPSFRHEAYEAYKAGRAPTPEDFPRQLALMKELVDLLGLERLEVPGFEADDVLATLAKKAEREGYEVQILTADRDLFQLLSPRISVLHPEGHRITPEWLWEKYGLRPEQWVDFRALAGDPSDNIPGVKGIGEKTALKLLKEWGSLENLLKNLDQVKPESVREKILAHLEDLKLSRELSRVRTDLPLEVDFGRRREPDWEGLKAFLERLEFGSLLHEFGLLESPLLAEEAPWPPPEGAFLGYRLSRPEPMWAELLALAASAQGRVYRAEDPHGALRGLFEVRGLLAKDLAVVALREGLDLPPTDDPMLLAYLLDPSNTTPEGVARRYGGEWWEDAAKRALLAERLHENLLGRLQGEERLLWLYEEVEKPLSRVLAHMEATGVKLDVAYLENLSLEVAAHMRRLEEEVFRLAGRSFRLNSRDQLERVLFDELGLPPIGKTEKTGKRSTSAAVLEALREVHPIVDKILQYREMAKLKGTYIDRLPALVHPKTGRLHTRFNQTATATGRLSSSDPNLQNIPVRTPLGQKIRRAFVAEPGWALVALDYRQIELRVLAHLSGDENLIRVFQEGKDIHTQTASWMFGLSAEAIDPLMRRAAKTINFGVLYGMSAFRLSQELGIPLEEAQAFIQKYFQGYPKVKAWIEKTLREGRTRGYVETLFGRRRYVPDLNARVKGKREAAERMAFNMPVQGTAADLMKLAMVRLFPQLREVGARMLLQVHDELLLEAPKERAEEVAALAKEVMEGVWPLAVPLEVEVGIGEDWLAAKG

SEQ ID NO: 6021 - DNA, 2523 bp, synthetic construct
  misc_feature 1..2523: note = Variant of DNA polymerase I from Thermus sp. strain 2.9
  source 1..2523: mol_type = other DNA
atgcaccatcatcatcatcatggcggtagcggcgtgttaccggtgttcgagcctaaaggtcgcgtgcttctggttgatggccatcatctcgcgtatcgtaacttctttgccctgaaaggattaaccaccagcctgggcgagccggtacagggtgtctacggctttgcaaagtcgctcctgaaagctctgaaagaagacggtgatgtggtgattgttgtctttgatgcgaaagcgccaagttttcgccacgaagcgtacgaagcttacaaagccgggcgtgctccaacgccggaagactttcctcgccaattggcgcttatgaaggaattagtggatttgcttggcctcgaacgcttggaagttcccggtttcgaggcagacgacgtattagcgactctcgcaaagaaagccgaacgtgagggctatgaagtccagatcttgacagcagatcgcgatcttttccagcttttatctccgcgcatctcggtgttacacccggaagggcatcgtatcaccccggaatggctctgggagaaatatggtttgcgtcccgaacaatgggtggattttcgcgccttagcaggcgatccgagcgacaatattccgggagttaaaggtatcggcgagaagacggcgctcaagctccttaaagaatgggggtcgttggagaacttgcttaagaatttagatcaggtcaaaccagagtcagtgcgtgagaagattcttgctcacctcgaagacctcaaattaagccgcgaattgtcccgtgtacgcaccgatttgccgctcgaagttgatttcggtcgccgccgcgaacctgactgggagggtcttaaagcgtttttagagcgtcttgaatttggttcgctcttgcatgaattcggccttttagaaagcccgttactggccgaagaagcaccttggccaccgcccgagggcgcgtttttaggttaccgtttgagtcgcccggaaccgatgtgggccgaattactggctcttgcagcgtctgcccagggacgtgtgtatcgcgcggaagaccctcatggtgcgctccgcggcctcttcgaagtccgtggcctccttgccaaagacttagctgttgttgcattgcgcgaaggtcttgatttacctccgactgatgatccaatgcttcttgcgtacctcttggacccgtcaaacacgacgcccgaaggcgtagcccgtcgttacggcggcgagtggaccgaagatgcagcgaaacgcgcgttattggccgaacgtttgcacgaaaatttattaggacgtttgcaaggcgaggaacgtctcctctggctttacgaagaagtggagaaaccattgagtcgcgtgctcgcgcatatggaagctaccggtgtcaaattagacgtggcgtatttggagaatctcagccttgaagttgctgcccacatgcgccgcttggaggaagaagtattccgtttagcaggccgttcctttcgccttaactctcgcgatcagttagaacgtgtgttgttcgatgaacttggtctccctcctatcggcaagacagagaagaccggtaaacgtagcacttcagcggcggttttagaagctcttcgcgaagtccatcccattgtggacaagatcttgcagtaccgcgaaatggcgaaattgaaaggcacctatattgaccgtcttccggcattagtccacccgaaaacgggacgcctccatacccgcttcaaccaaacagccacggcgaccggtcgtttgtcctcctctgatccaaaccttcagaatattccagtacgtaccccattgggccagaagatccgccgtgcgtttgtagctgagccgggttgggcgttagtggccctcgattatcgtcaaattgaattacgtgtccttgcccatctttctggcgatgagaacctcatccgcgtgtttcaggaaggcaaagacattcacactcaaacggcaagctggatgtttggattatcagctgaagcgatcgatcctttgatgcgtcgtgcagcgaagaccatcaatttcggtgttctctacggtatgagtgcctttcgtttgtcgcaggaattaggcattccctatgaagaagctcaggcgttcattcagaaatactttcaaagctatcccaaagttaaagcatggatcgagaagactctccgtgaaggccgcacacgtggttacgtagagaccttatttggacgtcgccgctatgttcccgatttaaacgctcgcgtgaaaggcaagcgtgaagccgccgaacgcatggcgttcaacatgcctgtacagggcacggcagctgacctcatgaaacttgcaatggtgcgcctttttccacaattgcgtgaagttggtgcccgcatgctgttgcaggtccacgatgaactcttgttagaagcgccaaaagagcgtgcggaagaggtggcagccctcgcgaaagaagttatggaaggcgtgtggcccttagcggtgcctcttgaagtcgaagttggtattggcgaggattggctggctgccaaagga

SEQ ID NO: 6022 - protein, 841 aa, synthetic construct
  REGION 1..841: note = Variant of DNA polymerase I from Thermus sp. strain 2.9
MHHHHHHGGSGVLPVFEPKGRVLLVDGHHLAYRNFFALKGLTTSLGEPVQGVYGFAKSLLKALKEDGDVVIVVFDAKAPSFRHEAYEAYKAGRAPTPEDFPRQLALMKELVDLLGLERLEVPGFEADDVLATLAKKAEREGYEVQILTADRDLFQLLSPRISVLHPEGHRITPEWLWEKYGLRPEQWVDFRALAGDPSDNIPGVKGIGEKTALKLLKEWGSLENLLKNLDQVKPESVREKILAHLEDLKLSRELSRVRTDLPLEVDFGRRREPDWEGLKAFLERLEFGSLLHEFGLLESPLLAEEAPWPPPEGAFLGYRLSRPEPMWAELLALAASAQGRVYRAEDPHGALRGLFEVRGLLAKDLAVVALREGLDLPPTDDPMLLAYLLDPSNTTPEGVARRYGGEWTEDAAKRALLAERLHENLLGRLQGEERLLWLYEEVEKPLSRVLAHMEATGVKLDVAYLENLSLEVAAHMRRLEEEVFRLAGRSFRLNSRDQLERVLFDELGLPPIGKTEKTGKRSTSAAVLEALREVHPIVDKILQYREMAKLKGTYIDRLPALVHPKTGRLHTRFNQTATATGRLSSSDPNLQNIPVRTPLGQKIRRAFVAEPGWALVALDYRQIELRVLAHLSGDENLIRVFQEGKDIHTQTASWMFGLSAEAIDPLMRRAAKTINFGVLYGMSAFRLSQELGIPYEEAQAFIQKYFQSYPKVKAWIEKTLREGRTRGYVETLFGRRRYVPDLNARVKGKREAAERMAFNMPVQGTAADLMKLAMVRLFPQLREVGARMLLQVHDELLLEAPKERAEEVAALAKEVMEGVWPLAVPLEVEVGIGEDWLAAKG

SEQ ID NO: 6023 - DNA, 2523 bp, synthetic construct
  misc_feature 1..2523: note = Variant of DNA polymerase I from Thermus sp. strain 2.9
  source 1..2523: mol_type = other DNA
atgcaccatcatcatcatcatggcggtagcggcgtgttaccggtgttcgagcctaaaggtcgcgtgcttctggttgatggccatcatctcgcgtatcgtaacttctttgccctgaaaggattaaccaccagcctgggcgagccggtacagggtgtctacggctttgcaaagtcgctcctgaaagctctgaaagaagacggtgatgtggtgattgttgtctttgatgcgaaagcgccaagttttcgccacgaagcgtacgaagcttacaaagccgggcgtgctccaacgccggaagactttcctcgccaattggcgcttatgaaggaattagtggatttgcttggcctcgaacgcttggaagttcccggtttcgaggcagacgacgtattagcgactctcgcaaagaaagccgaacgtgagggctatgaagtccagatcttgacagcagatcgcgatcttttccagcttttatctccgcgcatctcggtgttacacccggaagggcatcgtatcaccccggaatggctctgggagaaatatggtttgcgtcccgaacaatgggtggattttcgcgccttagcaggcgatccgagcgacaatattccgggagttaaaggtatcggcgagaagacggcgctcaagctccttaaagaatgggggtcgttggagaacttgcttaagaatttagatcaggtcaaaccagagtcagtgcgtgagaagattcttgctcacctcgaagacctcaaattaagccgcgaattgtcccgtgtacgcaccgatttgccgctcgaagttgatttcggtcgccgccgcgaacctgactgggagggtcttaaagcgtttttagagcgtcttgaatttggttcgctcttgcatgaattcggccttttagaaagcccgttactggccgaagaagcaccttggccaccgcccgagggcgcgtttttaggttaccgtttgagtcgcccggaaccgatgtgggccgaattactggctcttgcagcgtctgcccagggacgtgtgtatcgcgcggaagaccctcatggtgcgctccgcggcctcttcgaagtccgtggcctccttgccaaagacttagctgttgttgcattgcgcgaaggtcttgatttacctccgactgatgatccaatgcttcttgcgtacctcttggacccgtcaaacacgacgcccgaaggcgtagcccgtcgttacggcggcgagtggtgggaagatgcagccaaacgcgcgttattggccgaacgtttgcacgaaaatttattaggacgtttgcaaggcgaggcgcgtctcctgtggctttacgaagaagtggagaaaccattgagtcgcgtgctcgcgcatatggaagctaccggtgtcaaattagacgtggcgtatttggagaatctcagccttgaagttgctgcccacatgcgccgcttggaggaagaagtattccgtttagcaggccgttcctttcgccttaactctcgcgatcagttagaacgtgtgttgttcgatgaacttggtctccctcctatcggcaagacagagaagaccggtaaacgtagcacttcagcggcggttttagaagctcttcgcgaagtccatcccattgtggacaagatcttgcagtaccgcgaaatggcgaaattgaaaggcacctatattgaccgtcttccggcattagtccacccgaaaacgggacgcctccatacccgcttcaaccaaacagccacggcgaccggtcgtttgtcctcctctgatccaaaccttcagaatattccagtacgtaccccattgggccagaagatccgccgtgcgtttgtagctgaggagggttggcgtttagtggccctcgattatcgtcaaattgaattacgtgtccttgcccatctttctggcgatgagaacctcatccgcgtgtttcaggaaggcaaagacattcacactcaaacggcaagctggatgtttggattatcagctgaagcgatcgatcctttgatgcgtcgtgcagcgaagaccatcaatttcggtgttctctacggtatgagtgcctttcgtttgtcgcaggaattaggcattccctatgaagaagctcagggtttcattcagaaatactttcaaggctatcccaaagttaaagcatggatcgagaagactctccgtgaaggccgcacacgtggttacgtagagaccttatttggacgtcgccgctatgttcccgatttaaactcgcgcgtgaaaggcaagcgtgaagccgccgaacgcatggcgttcaacatgcctgtacagggcacggcagctgacctcatgaaacttgcaatggtgcgcctttttccacaattgcgtgaagttggtgcccgcatgctgttgcaggtccacgatgaactcttgttagaagcgccaaaagagcgtgcggaagaggtggcagccctcgcgaaagaagttatggaaggcgtgtggcccttagcggtgcctcttgaagtcgaagttggtattggcgaggattggctggctgccaaagga

SEQ ID NO: 6024 - protein, 841 aa, synthetic construct
  REGION 1..841: note = Variant of DNA polymerase I from Thermus sp. strain 2.9
MHHHHHHGGSGVLPVFEPKGRVLLVDGHHLAYRNFFALKGLTTSLGEPVQGVYGFAKSLLKALKEDGDVVIVVFDAKAPSFRHEAYEAYKAGRAPTPEDFPRQLALMKELVDLLGLERLEVPGFEADDVLATLAKKAEREGYEVQILTADRDLFQLLSPRISVLHPEGHRITPEWLWEKYGLRPEQWVDFRALAGDPSDNIPGVKGIGEKTALKLLKEWGSLENLLKNLDQVKPESVREKILAHLEDLKLSRELSRVRTDLPLEVDFGRRREPDWEGLKAFLERLEFGSLLHEFGLLESPLLAEEAPWPPPEGAFLGYRLSRPEPMWAELLALAASAQGRVYRAEDPHGALRGLFEVRGLLAKDLAVVALREGLDLPPTDDPMLLAYLLDPSNTTPEGVARRYGGEWWEDAAKRALLAERLHENLLGRLQGEARLLWLYEEVEKPLSRVLAHMEATGVKLDVAYLENLSLEVAAHMRRLEEEVFRLAGRSFRLNSRDQLERVLFDELGLPPIGKTEKTGKRSTSAAVLEALREVHPIVDKILQYREMAKLKGTYIDRLPALVHPKTGRLHTRFNQTATATGRLSSSDPNLQNIPVRTPLGQKIRRAFVAEEGWRLVALDYRQIELRVLAHLSGDENLIRVFQEGKDIHTQTASWMFGLSAEAIDPLMRRAAKTINFGVLYGMSAFRLSQELGIPYEEAQGFIQKYFQGYPKVKAWIEKTLREGRTRGYVETLFGRRRYVPDLNSRVKGKREAAERMAFNMPVQGTAADLMKLAMVRLFPQLREVGARMLLQVHDELLLEAPKERAEEVAALAKEVMEGVWPLAVPLEVEVGIGEDWLAAKG

SEQ ID NO: 6025 - DNA, 2523 bp, synthetic construct
  misc_feature 1..2523: note = Variant of DNA polymerase I from Thermus sp. strain 2.9
  source 1..2523: mol_type = other DNA
atgcaccatcatcatcatcatggcggtagcggcgtgttaccggtgttcgagcctaaaggtcgcgtgcttctggttgatggccatcatctcgcgtatcgtaacttctttgccctgaaaggattaaccaccagcctgggcgagccggtacagggtgtctacggctttgcaaagtcgctcctgaaagctctgaaagaagacggtgatgtggtgattgttgtctttgatgcgaaagcgccaagttttcgccacgaagcgtacgaagcttacaaagccgggcgtgctccaacgccggaagactttcctcgccaattggcgcttatgaaggaattagtggatttgcttggcctcgaacgcttggaagttcccggtttcgaggcagacgacgtattagcgactctcgcaaagaaagccgaacgtgagggctatgaagtccagatcttgacagcagatcgcgatcttttccagcttttatctccgcgcatctcggtgttacacccggaagggcatcgtatcaccccggaatggctctgggagaaatatggtttgcgtcccgaacaatgggtggattttcgcgccttagcaggcgatccgagcgacaatattccgggagttaaaggtatcggcgagaagacggcgctcaagctccttaaagaatgggggtcgttggagaacttgcttaagaatttagatcaggtcaaaccagagtcagtgcgtgagaagattcttgctcacctcgaagacctcaaattaagccgcgaattgtcccgtgtacgcaccgatttgccgctcgaagttgatttcggtcgccgccgcgaacctgactgggagggtcttaaagcgtttttagagcgtcttgaatttggttcgctcttgcatgaattcggccttttagaaagcccgttactggccgaagaagcaccttggccaccgcccgagggcgcgtttttaggttaccgtttgagtcgcccggaaccgatgtgggccgaattactggctcttgcagcgtctgcccagggacgtgtgtatcgcgcggaagaccctcatggtgcgctccgcggcctcttcgaagtccgtggactccttgccaaagacttagctgttgttgcattgcgcgaaggtcttgatttacctccgactgatgatccaatgcttcttgcgtacctcttggacccgtcaaacacgacgcccgaaggcgtagcccgtcgttacggcggcgagtggaccgaagatgcagcgaaacgcgcgttattggccgaacgtttgcacgaaaatttattaggacgtttgcaaggcgaggaacgtctcctctggctttacgaagaagtggagaaaccattgagtcgcgtgctcgcgcatatggaagctaccggtgtcaaattagacgtggcgtatttggagaatctcagccttgaagttgctgcccacatgcgccgcttggaggaagaagtattccgtttagcaggccgttcctttcgccttaactctcgcgatcagttagaacgtgtgttgttcgatgaacttggtctccctcctatcggcaagacagagaagaccggtaaacgtagcacttcagcggcggttttagaagctcttcgcgaagtccatcccattgtggacaagatcttgcagtaccgcgaaatggcgaaattgaaaggcacctatattgaccgtcttccggcattagtccacccgaaaacgggacgcctccatacccgcttcaaccaaacagccacggcgaccggtcgtttgtcctcctctgatccaaaccttcagaatattccagtacgtaccccattgggccagaagatccgccgtgcgtttgtagctgaggagggttggcgtttagtggccctcgattatcgtcaaattgaattacgtgtccttgcccatctttctggcgatgagaacctcatccgcgtgtttcaggaaggcaaagacattcacactcaaacggcaagctggatgtttggattatcagctgaagcgatcgatcctttgatgcgtcgtgcagcgaagaccatcaatttcggtgttctctacggtatgagtgcctttcgtttgtcgcaggaattaggcattccctatgaagaagctcaggcgttcattcagaaatactttcaaagctatcccaaagttaaaccttggatcgagaagactctccgtgaaggccgcacacgtggttacgtagagaccttatttggacgtcgccgctatgttcccgatttaaacgctcgcgtgaaaggcaagcgtgaagccgccgaacgcatggcgttcaacatgcctgtacagggcacggcagctgacctcatgaaacttgcaatggtgcgcctttttccacaattgcgtgaagttggtgcccgcatgctcttgcaggtccacgatgaactcttgttagaagcgccaaaagagcgtgcggaagaggtggcagccctcgcgaaagaagttatggaaggcgtgtggcccttagcggtgcctcttgaagtcgaagttggtattggcgaggattggctggctgccaaagga

SEQ ID NO: 6026 - protein, 841 aa, synthetic construct
  REGION 1..841: note = Variant of DNA polymerase I from Thermus sp. strain 2.9
MHHHHHHGGSGVLPVFEPKGRVLLVDGHHLAYRNFFALKGLTTSLGEPVQGVYGFAKSLLKALKEDGDVVIVVFDAKAPSFRHEAYEAYKAGRAPTPEDFPRQLALMKELVDLLGLERLEVPGFEADDVLATLAKKAEREGYEVQILTADRDLFQLLSPRISVLHPEGHRITPEWLWEKYGLRPEQWVDFRALAGDPSDNIPGVKGIGEKTALKLLKEWGSLENLLKNLDQVKPESVREKILAHLEDLKLSRELSRVRTDLPLEVDFGRRREPDWEGLKAFLERLEFGSLLHEFGLLESPLLAEEAPWPPPEGAFLGYRLSRPEPMWAELLALAASAQGRVYRAEDPHGALRGLFEVRGLLAKDLAVVALREGLDLPPTDDPMLLAYLLDPSNTTPEGVARRYGGEWTEDAAKRALLAERLHENLLGRLQGEERLLWLYEEVEKPLSRVLAHMEATGVKLDVAYLENLSLEVAAHMRRLEEEVFRLAGRSFRLNSRDQLERVLFDELGLPPIGKTEKTGKRSTSAAVLEALREVHPIVDKILQYREMAKLKGTYIDRLPALVHPKTGRLHTRFNQTATATGRLSSSDPNLQNIPVRTPLGQKIRRAFVAEEGWRLVALDYRQIELRVLAHLSGDENLIRVFQEGKDIHTQTASWMFGLSAEAIDPLMRRAAKTINFGVLYGMSAFRLSQELGIPYEEAQAFIQKYFQSYPKVKPWIEKTLREGRTRGYVETLFGRRRYVPDLNARVKGKREAAERMAFNMPVQGTAADLMKLAMVRLFPQLREVGARMLLQVHDELLLEAPKERAEEVAALAKEVMEGVWPLAVPLEVEVGIGEDWLAAKG

SEQ ID NO: 6027 - DNA, 2523 bp, synthetic construct
  misc_feature 1..2523: note = Variant of DNA polymerase I from Thermus sp. strain 2.9
  source 1..2523: mol_type = other DNA
atgcaccatcatcatcatcatggcggtagcggcgtgttaccggtgttcgagcctaaaggtcgcgtgcttctggttgatggccatcatctcgcgtatcgtaacttctttgccctgaaaggattaaccaccagcctgggcgagccggtacagggtgtctacggctttgcaaagtcgctcctgaaagctctgaaagaagacggtgatgtggtgattgttgtctttgatgcgaaagcgccaagttttcgccacgaagcgtacgaagcttacaaagccgggcgtgctccaacgccggaagactttcctcgccaattggcgcttatgaaggaattagtggatttgcttggcctcgaacgcttggaagttcccggtttcgaggcagacgacgtattagcgactctcgcaaagaaagccgaacgtgagggctatgaagtccagatcttgacagcagatcgcgatcttttccagcttttatctccgcgcatctcggtgttacacccggaagggcatcgtatcaccccggaatggctctgggagaaatatggtttgcgtcccgaacaatgggtggattttcgcgccttagcaggcgatccgagcgacaatattccgggagttaaaggtatcggcgagaagacggcgctcaagctccttaaagaatgggggtcgttggagaacttgcttaagaatttagatcaggtcaaaccagagtcagtgcgtgagaagattcttgctcacctcgaagacctcaaattaagccgcgaattgtcccgtgtacgcaccgatttgccgctcgaagttgatttcggtcgccgccgcgaacctgactgggagggtcttaaagcgtttttagagcgtcttgaatttggttcgctcttgcatgaattcggccttttagaaagcccgttactggccgaagaagcaccttggccaccgcccgagggcgcgtttttaggttaccgtttgagtcgcccggaaccgatgtgggccgaattactggctcttgcagcgtctgcccagggacgtgtgtatcgcgcggaagaccctcatggtgcgctccgcggcctcttcgaagtccgtggactccttgccaaagacttagctgttgttgcattgcgcgaaggtcttgatttacctccgactgatgatccaatgcttcttgcgtacctcttggacccgtcaaacacgacgcccgaaggctgggcccgtcgttacggcggcgagtggaccgaagatgcagcgaaacgcgcgttattggccgaacgtttgcacgaaaatttattaggacgtttgcaaggcgaggaacgtctcctctggctttacgaagaagtggagaaaccattgagtcgcgtgctcgcgcatatggaagctaccggtgtcaaattagacgtggcgtatttggagaatctcagccttgaagttgctgcccacatgcgccgcttggaggaagaagtattccgtttagcaggccgttcctttcgccttaactctcgcgatcagttagaacgtgtgttgttcgatgaacttggtctccctcctatcggcaagacagagaagaccggtaaacgtagcacttcagcggcggttttagaagctcttcgcgaagtccatcccattgtggacaagatcttgcagtaccgcgaaatggcgaaattgaaaggcacctatattgaccgtcttccggcattagtccacccgaaaacgggacgcctccatacccgcttcaaccaaacagccacggcgaccggtcgtttgtcctcctctgatccaaaccttcagaatattccagtacgtaccccattgggccagaagatccgccgtgcgtttgtagctgaggagggttggcgtttagtggccctcgattatcgtcaaattgaattacgtgtccttgcccatctttctggcgatgagaacctcatccgcgtgtttcaggaaggcaaagacattcacactcaaacggcaagctggatgtttggattatcagctgaagcgatcgatcctttgatgcgtcgtgcagcgaagaccatcaatttcggtgttctctacggtatgagtgcctttcgtttgtcgcaggaattaggcattccctatgaagaagctcaggcgttcattcagaaatactttcaaagctatcccaaagttaaagcatggatcgagaagactctccgtgaaggccgcacacgtggttacgtagagaccttatttggacgtcgccgctatgttcccgatttaaacgctcgcgtgaaaggcaagcgtgaagccgccgaacgcatggcgttcaacatgcctgtacagggcacggcagctgacctcatgaaacttgcaatggtgcgcctttttccacaattgcgtgaagttggtgcccgcatgctcttgcaggtccacgatgaactcttgttagaagcgccaaaagagcgtgcggaagaggtggcagccctcgcgaaagaagttatggaaggcgtgtggcccttagcggtgcctcttgaagtcgaagttggtattggcgaggattggctggctgccaaagga

SEQ ID NO: 6028 - protein, 841 aa, synthetic construct
  REGION 1..841: note = Variant of DNA polymerase I from Thermus sp. strain 2.9
MHHHHHHGGSGVLPVFEPKGRVLLVDGHHLAYRNFFALKGLTTSLGEPVQGVYGFAKSLLKALKEDGDVVIVVFDAKAPSFRHEAYEAYKAGRAPTPEDFPRQLALMKELVDLLGLERLEVPGFEADDVLATLAKKAEREGYEVQILTADRDLFQLLSPRISVLHPEGHRITPEWLWEKYGLRPEQWVDFRALAGDPSDNIPGVKGIGEKTALKLLKEWGSLENLLKNLDQVKPESVREKILAHLEDLKLSRELSRVRTDLPLEVDFGRRREPDWEGLKAFLERLEFGSLLHEFGLLESPLLAEEAPWPPPEGAFLGYRLSRPEPMWAELLALAASAQGRVYRAEDPHGALRGLFEVRGLLAKDLAVVALREGLDLPPTDDPMLLAYLLDPSNTTPEGWARRYGGEWTEDAAKRALLAERLHENLLGRLQGEERLLWLYEEVEKPLSRVLAHMEATGVKLDVAYLENLSLEVAAHMRRLEEEVFRLAGRSFRLNSRDQLERVLFDELGLPPIGKTEKTGKRSTSAAVLEALREVHPIVDKILQYREMAKLKGTYIDRLPALVHPKTGRLHTRFNQTATATGRLSSSDPNLQNIPVRTPLGQKIRRAFVAEEGWRLVALDYRQIELRVLAHLSGDENLIRVFQEGKDIHTQTASWMFGLSAEAIDPLMRRAAKTINFGVLYGMSAFRLSQELGIPYEEAQAFIQKYFQSYPKVKAWIEKTLREGRTRGYVETLFGRRRYVPDLNARVKGKREAAERMAFNMPVQGTAADLMKLAMVRLFPQLREVGARMLLQVHDELLLEAPKERAEEVAALAKEVMEGVWPLAVPLEVEVGIGEDWLAAKG

SEQ ID NO: 6029 - DNA, 2523 bp, synthetic construct
  misc_feature 1..2523: note = Variant of DNA polymerase I from Thermus sp. strain 2.9
  source 1..2523: mol_type = other DNA
atgcaccatcatcatcatcatggcggtagcggcgtgttaccggtgttcgagcctaaaggtcgcgtgcttctggttgatggccatcatctcgcgtatcgtaacttctttgccctgaaaggattaaccaccagcctgggcgagccggtacagggtgtctacggctttgcaaagtcgctcctgaaagctctgaaagaagacggtgatgtggtgattgttgtctttgatgcgaaagcgccaagttttcgccacgaagcgtacgaagcttacaaagccgggcgtgctccaacgccggaagactttcctcgccaattggcgcttatgaaggaattagtggatttgcttggcctcgaacgcttggaagttcccggtttcgaggcagacgacgtattagcgactctcgcaaagaaagccgaacgtgagggctatgaagtccagatcttgacagcagatcgcgatcttttccagcttttatctccgcgcatctcggtgttacacccggaagggcatcgtatcaccccggaatggctctgggagaaatatggtttgcgtcccgaacaatgggtggattttcgcgccttagcaggcgatccgagcgacaatattccgggagttaaaggtatcggcgagaagacggcgctcaagctccttaaagaatgggggtcgttggagaacttgcttaagaatttagatcaggtcaaaccagagtcagtgcgtgagaagattcttgctcacctcgaagacctcaaattaagccgcgaattgtcccgtgtacgcaccgatttgccgctcgaagttgatttcggtcgccgccgcgaacctgactgggagggtcttaaagcgtttttagagcgtcttgaatttggttcgctcttgcatgaattcggccttttagaaagcccgttactggccgaagaagcaccttggccaccgcccgagggcgcgtttttaggttaccgtttgagtcgcccggaaccgatgtgggccgaattactggctcttgcagcgtctgcccagggacgtgtgtatcgcgcggaagaccctcatggtgcgctccgcggcctcttcgaagtccgtggactccttgccaaagacttagctgttgttgcattgcgcgaaggtcttgatttacctccgactgatgatccaatgcttcttgcgtacctcttggacccgtcaaacacgacgcccgaaggcgtagcccgtcgttacggcggcgagtggaccgaagatgcagcgaaacgcgcgttattggccgaacgtttgcacgaaaatttattaggacgtttgcaaggcgaggaacgtctcctctggctttacgaagaagtggagaaaccattgagtcgcgtgctcgcgcatatggaagctaccggtgtcaaattagacgtggcgtatttggagaatctcagccttgaagttgctgcccacatgcgccgcttggaggaagaagtattccatttagcaggccgttcctttcgccttaactctcgcgatcagttagaacgtgtgttgttcgatgaacttggtctccctcctatcggcaagacagagaagaccggtaaacgtagcacttcagcggcggttttagaagctcttcgcgaagtccatcccattgtggacaagatcttgcagtaccgcgaaatggcgaaattgaaaggcacctatattgaccgtcttccggcattagtccacccgaaaacgggacgcctccatacccgcttcaaccaaacagccacggcgaccggtcgtttgtcctcctctgatccaaaccttcagaatattccagtacgtaccccattgggccagaagatccgccgtgcgtttgtagctgaggagggttggcgtttagtggccctcgattatcgtcaaattgaattacgtgtccttgcccatctttctggcgatgagaacctcatccgcgtgtttcaggaaggcaaagacattcacactcaaacggcaagctggatgtttggattatcagctgaagcgatcgatcctttgatgcgtcgtgcagcgaagaccatcaatttcggtgttctctacggtatgagtgcctttcgtttgtcgcaggaattaggcattccctatgaagaagctcaggcgttcattcagaaatactttcaaagctatcccaaagttaaagcatggatcgagaagactctccgtgaaggccgcacacgtggttacgtagagaccttatttggacgtcgccgctatgttcccgatttaaacgctcgcgtgaaaggcaagcgtgaagccgccgaacgcatggcgttcaacatgcctgtacagggcacggcagctgacctcatgaaacttgcaatggtgcgcctttttccacaattgcgtgaagttggtgcccgcatgctcttgtcggtccacgatgaactcttgttagaagcgccaaaagagcgtgcggaagaggtggcagccctcgcgaaagaagttatggaaggcgtgtggcccttagcggtgcctcttgaagtcgaagttggtattggcgaggattggctggctgccaaagga

SEQ ID NO: 6030 - protein, 841 aa, synthetic construct
  REGION 1..841: note = Variant of DNA polymerase I from Thermus sp. strain 2.9
MHHHHHHGGSGVLPVFEPKGRVLLVDGHHLAYRNFFALKGLTTSLGEPVQGVYGFAKSLLKALKEDGDVVIVVFDAKAPSFRHEAYEAYKAGRAPTPEDFPRQLALMKELVDLLGLERLEVPGFEADDVLATLAKKAEREGYEVQILTADRDLFQLLSPRISVLHPEGHRITPEWLWEKYGLRPEQWVDFRALAGDPSDNIPGVKGIGEKTALKLLKEWGSLENLLKNLDQVKPESVREKILAHLEDLKLSRELSRVRTDLPLEVDFGRRREPDWEGLKAFLERLEFGSLLHEFGLLESPLLAEEAPWPPPEGAFLGYRLSRPEPMWAELLALAASAQGRVYRAEDPHGALRGLFEVRGLLAKDLAVVALREGLDLPPTDDPMLLAYLLDPSNTTPEGVARRYGGEWTEDAAKRALLAERLHENLLGRLQGEERLLWLYEEVEKPLSRVLAHMEATGVKLDVAYLENLSLEVAAHMRRLEEEVFHLAGRSFRLNSRDQLERVLFDELGLPPIGKTEKTGKRSTSAAVLEALREVHPIVDKILQYREMAKLKGTYIDRLPALVHPKTGRLHTRFNQTATATGRLSSSDPNLQNIPVRTPLGQKIRRAFVAEEGWRLVALDYRQIELRVLAHLSGDENLIRVFQEGKDIHTQTASWMFGLSAEAIDPLMRRAAKTINFGVLYGMSAFRLSQELGIPYEEAQAFIQKYFQSYPKVKAWIEKTLREGRTRGYVETLFGRRRYVPDLNARVKGKREAAERMAFNMPVQGTAADLMKLAMVRLFPQLREVGARMLLSVHDELLLEAPKERAEEVAALAKEVMEGVWPLAVPLEVEVGIGEDWLAAKG

SEQ ID NO: 6031 - DNA, 2523 bp, synthetic construct
  misc_feature 1..2523: note = Variant of DNA polymerase I from Thermus sp. strain 2.9
  source 1..2523: mol_type = other DNA
atgcaccatcatcatcatcatggcggtagcggcgtgttaccggtgttcgagcctaaaggtcgcgtgcttctggttgatggccatcatctcgcgtatcgtaacttctttgccctgaaaggattaaccaccagcctgggcgagccggtacagggtgtctacggctttgcaaagtcgctcctgaaagctctgaaagaagacggtgatgtggtgattgttgtctttgatgcgaaagcgccaagttttcgccacgaagcgtacgaagcttacaaagccgggcgtgctccaacgccggaagactttcctcgccaattggcgcttatgaaggaattagtggatttgcttggcctcgaacgcttggaagttcccggtttcgaggcagacgacgtattagcgactctcgcaaagaaagccgaacgtgagggctatgaagtccagatcttgacagcagatcgcgatcttttccagcttttatctccgcgcatctcggtgttacacccggaagggcatcgtatcaccccggaatggctctgggagaaatatggtttgcgtcccgaacaatgggtggattttcgcgccttagcaggcgatccgagcgacaatattccgggagttaaaggtatcggcgagaagacggcgctcaagctccttaaagaatgggggtcgttggagaacttgcttaagaatttagatcaggtcaaaccagagtcagtgcgtgagaagattcttgctcacctcgaagacctcaaattaagccgcgaattgtcccgtgtacgcaccgatttgccgctcgaagttgatttcggtcgccgccgcgaacctgactgggagggtcttaaagcgtttttagagcgtcttgaatttggttcgctcttgcatgaattcggccttttagaaagcccgttactggccgaagaagcaccttggccaccgcccgagggcgcgtttttaggttaccgtttgagtcgcccggaaccgatgtgggccgaattactggctcttgcagcgtctgcccagggacgtgtgtatcgcgcggaagaccctcatggtgcgctccgcggcctcttcgaagtccgtggactccttgccaaagacttagctgttgttgcattgcgcgaaggtcttgatttacctccgactgatgatccaatgcttcttgcgtacctcttggacccgtcaaacacgacgcccgaaggcgtagcccgtcgttacggcggcgagtggaccgaagatgcagcgaaacgcgcgttattggccgaacgtttgcacgaaaatttattaggacgtttgcaaggcgaggaacgtctcctctggctttacgaagaagtggagaaaccattgagtcgcgtgctcgcgcatatggaagctaccggtgtcaaattagacgtggcgtatttggagaatctcagccttgaagttgctgcccacatgcgccgcttggaggaagaagtattccgtttagcaggccgttcctttcgccttaactctcgcgatcagttagaacgtgtgttgttcgatgaacttggtctccctcctatcggcaagacagagaagaccggtaaacgtagcacttcagcggcggttttagaagctcttcgcgaagtccatcccattgtggacaagatcttgcagtaccgcgaaatggcgaaattgaaaggcacctatattgaccgtcttccggcattagtccacccgaaaacgggacgcctccatacccgcttcaaccaaacagccacggcgaccggtcgtttgtcctcctcttctccaaaccttcagaatattccagtacgtaccccattgggccagaagatccgccgtgcgtttgtagctgaggagggttggcgtttagtggccctcgattatcgtcaaattgaattacgtgtccttgcccatctttctggcgatgagaacctcatccgcgtgtttcaggaaggcaaagacattcacactcaaacggcaagctggatgtttggattatcagctgaagcgatcgatcctttgatgcgtcgtgcagcgaagaccatcaatttcggtgttctctacggtatgagtgcctttcgtttgtcgcaggaattaggcattccctatgaagaagctcaggcgttcattcagaaatactttcaaagctatcccaaagttaaagcatggatcgagaagactctccgtgaaggccgcacacgtggttacgtagagaccttatttggacgtcgccgctatgttcccgatttaaacgctcgcgtgaaaggcaagcgtgaagccgccgaacgcatggcgttcaacatgcctgtacagggcacggcagctgacctcatgaaacttgcaatggtgcgcctttttccacaattgcgtgaagttggtgcccgcatgctcttgcaggtccacgatgaactcttgttagaagcgccaaaagagcgtgcggaagaggtggcagccctcgcgaaagaagttatggaaggcgtgtggcccttagcggtgcctcttgaagtcgaagttggtattggcgaggattggctggctgccaaagga

SEQ ID NO: 6032 - protein, 841 aa, synthetic construct
  REGION 1..841: note = Variant of DNA polymerase I from Thermus sp. strain 2.9
MHHHHHHGGSGVLPVFEPKGRVLLVDGHHLAYRNFFALKGLTTSLGEPVQGVYGFAKSLLKALKEDGDVVIVVFDAKAPSFRHEAYEAYKAGRAPTPEDFPRQLALMKELVDLLGLERLEVPGFEADDVLATLAKKAEREGYEVQILTADRDLFQLLSPRISVLHPEGHRITPEWLWEKYGLRPEQWVDFRALAGDPSDNIPGVKGIGEKTALKLLKEWGSLENLLKNLDQVKPESVREKILAHLEDLKLSRELSRVRTDLPLEVDFGRRREPDWEGLKAFLERLEFGSLLHEFGLLESPLLAEEAPWPPPEGAFLGYRLSRPEPMWAELLALAASAQGRVYRAEDPHGALRGLFEVRGLLAKDLAVVALREGLDLPPTDDPMLLAYLLDPSNTTPEGVARRYGGEWTEDAAKRALLAERLHENLLGRLQGEERLLWLYEEVEKPLSRVLAHMEATGVKLDVAYLENLSLEVAAHMRRLEEEVFRLAGRSFRLNSRDQLERVLFDELGLPPIGKTEKTGKRSTSAAVLEALREVHPIVDKILQYREMAKLKGTYIDRLPALVHPKTGRLHTRFNQTATATGRLSSSSPNLQNIPVRTPLGQKIRRAFVAEEGWRLVALDYRQIELRVLAHLSGDENLIRVFQEGKDIHTQTASWMFGLSAEAIDPLMRRAAKTINFGVLYGMSAFRLSQELGIPYEEAQAFIQKYFQSYPKVKAWIEKTLREGRTRGYVETLFGRRRYVPDLNARVKGKREAAERMAFNMPVQGTAADLMKLAMVRLFPQLREVGARMLLQVHDELLLEAPKERAEEVAALAKEVMEGVWPLAVPLEVEVGIGEDWLAAKG

SEQ ID NO: 6033 - DNA, 2523 bp, synthetic construct
  misc_feature 1..2523: note = Variant of DNA polymerase I from Thermus sp. strain 2.9
  source 1..2523: mol_type = other DNA
atgcaccatcatcatcatcatggcggtagcggcgtgttaccggtgttcgagcctaaaggtcgcgtgcttctggttgatggccatcatctcgcgtatcgtaacttctttgccctgaaaggattaaccaccagcctgggcgagccggtacagggtgtctacggctttgcaaagtcgctcctgaaagctctgaaagaagacggtgatgtggtgattgttgtctttgatgcgaaagcgccaagttttcgccacgaagcgtacgaagcttacaaagccgggcgtgctccaacgccggaagactttcctcgccaattggcgcttatgaaggaattagtggatttgcttggcctcgaacgcttggaagttcccggtttcgaggcagacgacgtattagcgactctcgcaaagaaagccgaacgtgagggctatgaagtccagatcttgacagcagatcgcgatcttttccagcttttatctccgcgcatctcggtgttacacccggaagggcatcgtatcaccccggaatggctctgggagaaatatggtttgcgtcccgaacaatgggtggattttcgcgccttagcaggcgatccgagcgacaatattccgggagttaaaggtatcggcgagaagacggcgctcaagctccttaaagaatgggggtcgttggagaacttgcttaagaatttagatcaggtcaaaccagagtcagtgcgtgagaagattcttgctcacctcgaagacctcaaattaagccgcgaattgtcccgtgtacgcaccgatttgccgctcgaagttgatttcggtcgccgccgcgaacctgactgggagggtcttaaagcgtttttagagcgtcttgaatttggttcgctcttgcatgaattcggccttttagaaagcccgttactggccgaagaagcaccttggccaccgcccgagggcgcgtttttaggttaccgtttgagtcgcccggaaccgatgtgggccgaattactggctcttgcagcgtctgcccagggacgtgtgtatcgcgcggaagaccctcatggtgcgctccgcggcctcttcgaagtccgtggactccttgccaaagacttagctgttgttgcattgcgcgaaggtcttgatttacctccgactgatgatccaatgcttcttgcgtacctcttggacccgtcaaacacgacgcccgaaggcgtagcccgtcgttacggcggcgagtggaccgaagatgcagcgaaacgcgcgttattggccgaacgtttgcacgaaaatttattaggacgtttgcaaggcgaggaacgtctcctctggctttacgaagaagtggagaaaccattgagtcgcgtgctcgcgcatatggaagctaccggtgtcaaattagacgtggcgtatttggagaatctcagccttgaagttgctgcccacatgcgccgcttggaggaagaagtattccgtttagcaggccgttcctttcgccttaactctcgcgatcagttagaacgtgtgttgttcgatgaacttggtctccctcctatcggcaagacagagaagaccggtaaacgtagcacttcagcggcggttttagaagctcttcgcgaagtccatcccattgtggacaagatcttgcagtaccgcgaaatggcgaaattgaaaggcacctatattgaccgtcttccggcattagtccacccgaaaacgggacgcctccatacccgcttcaaccaaacagccacggcgaccggtcgtttgtcctcctctgatccaaaccttcagaatattccagtacgtaccccattgggccagaagatccgccgtgcgtttgtagctgaggagggttggcgtttagtggccctcgattatcgtcaaattgaattacgtgtccttgcccatctttctggcgatgagaacctcatccgcgtgtttcaggaaggcaaagacattcacactcaaacggcaagctggatgtttggattatcagctgaagcgatcgatcctttgatgcgtcgtgcagcgaagaccatcaatttcggtgttctctacggtatgagtgcctttcgtttgtcgcaggaattaggcattccctatgaagaagctcaggcgttcattcagaaatactttcaaagctatcccaaagttaaagcatggatcgagaagactctccgtgaaggccgcacacgtggttacgtagagaccttatttggacgtcgccgctatgttcccgatttaaacgctcgcgtgaaaggcaagcgtgaagccgccgaacgcatggcgttcaacatgcctgtacagggcacggcagctgacctcatgaaacttgcaatggtgcgcctttttccacaattgcgtgaagttggtgcccgcatgctcttgcaggtccacgatgaactcttgttagaagcgccaaaagagcgtgcggaagaggtggcagccctcgcgaaagaagttatgcatggcgtgtggcccttagcggtgcctcttgaagtcgaagttggtattggcgaggattggctggctgccaaagga

SEQ ID NO: 6034 - protein, 841 aa, synthetic construct
  REGION 1..841: note = Variant of DNA polymerase I from Thermus sp. strain 2.9
MHHHHHHGGSGVLPVFEPKGRVLLVDGHHLAYRNFFALKGLTTSLGEPVQGVYGFAKSLLKALKEDGDVVIVVFDAKAPSFRHEAYEAYKAGRAPTPEDFPRQLALMKELVDLLGLERLEVPGFEADDVLATLAKKAEREGYEVQILTADRDLFQLLSPRISVLHPEGHRITPEWLWEKYGLRPEQWVDFRALAGDPSDNIPGVKGIGEKTALKLLKEWGSLENLLKNLDQVKPESVREKILAHLEDLKLSRELSRVRTDLPLEVDFGRRREPDWEGLKAFLERLEFGSLLHEFGLLESPLLAEEAPWPPPEGAFLGYRLSRPEPMWAELLALAASAQGRVYRAEDPHGALRGLFEVRGLLAKDLAVVALREGLDLPPTDDPMLLAYLLDPSNTTPEGVARRYGGEWTEDAAKRALLAERLHENLLGRLQGEERLLWLYEEVEKPLSRVLAHMEATGVKLDVAYLENLSLEVAAHMRRLEEEVFRLAGRSFRLNSRDQLERVLFDELGLPPIGKTEKTGKRSTSAAVLEALREVHPIVDKILQYREMAKLKGTYIDRLPALVHPKTGRLHTRFNQTATATGRLSSSDPNLQNIPVRTPLGQKIRRAFVAEEGWRLVALDYRQIELRVLAHLSGDENLIRVFQEGKDIHTQTASWMFGLSAEAIDPLMRRAAKTINFGVLYGMSAFRLSQELGIPYEEAQAFIQKYFQSYPKVKAWIEKTLREGRTRGYVETLFGRRRYVPDLNARVKGKREAAERMAFNMPVQGTAADLMKLAMVRLFPQLREVGARMLLQVHDELLLEAPKERAEEVAALAKEVMHGVWPLAVPLEVEVGIGEDWLAAKG

SEQ ID NO: 6035 - DNA, 2523 bp, synthetic construct
  misc_feature 1..2523: note = Variant of DNA polymerase I from Thermus sp. strain 2.9
  source 1..2523: mol_type = other DNA
atgcaccatcatcatcatcatggcggtagcggcgtgttaccggtgttcgagcctaaaggtcgcgtgcttctggttgatggccatcatctcgcgtatcgtaacttctttgccctgaaaggattaaccaccagcctgggcgagccggtacagggtgtctacggctttgcaaagtcgctcctgaaagctctgaaagaagacggtgatgtggtgattgttgtctttgatgcgaaagcgccaagttttcgccacgaagcgtacgaagcttacaaagccgggcgtgctccaacgccggaagactttcctcgccaattggcgcttatgaaggaattagtggatttgcttggcctcgaacgcttggaagttcccggtttcgaggcagacgacgtattagcgactctcgcaaagaaagccgaacgtgagggctatgaagtccagatcttgacagcagatcgcgatcttttccagcttttatctccgcgcatctcggtgttacacccggaagggcatcgtatcaccccggaatggctctgggagaaatatggtttgcgtcccgaacaatgggtggattttcgcgccttagcaggcgatccgagcgacaatattccgggagttaaaggtatcggcgagaagacggcgctcaagctccttaaagaatgggggtcgttggagaacttgcttaagaatttagatcaggtcaaaccagagtcagtgcgtgagaagattcttgctcacctcgaagacctcaaattaagccgcgaattgtcccgtgtacgcaccgatttgccgctcgaagttgatttcggtcgccgccgcgaacctgactgggagggtcttaaagcgtttttagagcgtcttgaatttggttcgctcttgcatgaattcggccttttagaaagcccgttactggccgaagaagcaccttggccaccgcccgagggcgcgtttttaggttaccgtttgagtcgcccggaaccgatgtgggccgaattactggctcttgcagcgtctgcccagggacgtgtgtatcgcgcggaagaccctcatggtgcgctccgcggcctcttcgaagtccgtggactccttgccaaagacttagctgttgttgcattgcgcgaaggtcttgatttacctccgactgatgatccaatgcttcttgcgtacctcttggacccgtcaaacacgacgcccgaaggcgtagcccgtcgttacggcggcgagtggaccgaagatgcagcgaaacgcgcgttattggccgaacgtttgcacgaaaatttattaggacgtttgcaaggcgaggaacgtctcctctggctttacgaagaagtggagaaaccattgagtcgcgtgctcgcgcatatggaagctaccggtgtcaaattagacgtggcgtatttggagaatctcagccttgaagttgctgcccacatgcgccgcttggaggaagaagtattccgtttagcaggccgttcctttcgccttaactctcgcgatcagttagaacgtgtgttgttcgatgaacttggtctccctcctatcggcaagacagagaagaccggtaaacgtagcacttcagcggcggttttagaagctcttcgcgaagtccatcccattgtggacaagatcttgcagtaccgcgaaatggcgaaattgaaaggcacctatattgaccgtcttccggcattagtccacccgaaaacgggacgcctccatacccgcttcaaccaaacagccacggcgaccggtcgtttgtcctcctctgatccaaaccttcagaatattccagtacgtaccccattgggccagaagatccgccgtgcgtttgtagctgaggagggttggcgtttagtggccctcgattatcgtcaaattgaattacgtgtccttgcccatctttctggcgatgagaacctcatccgcgtgtttcaggaaggcaaagacattcacactcaaacggcaagctggatgtttggattatcagctgaagcgatcgatcctttgatgcgtcgtgcagcgaagaccatcaatttcggtgttctctacggtatgagtgcctttcgtttgtcgcaggaattaggcattccctatgaagaagctcaggcgttcattcagaaatactttcaaagctatcccaaagttaaagcatggatcgagaagactctccgtgaaggccgcacacgtggttacgtagagaccttatttggacgtcgccgctatgttcccgatttaaacgctcgcgtgaaaggcaagcgtgaagccgccgaacgcatggcgttcaacatgcctgtacagggcacggcagctgacctcatgaaacttgcaatggtgcgctgttttccacaattgcgtgaagttggtgcccgcatgctcttgcaggtccacgatgaactcttgttagaagcgccaaaagagcgtgcggaagaggtggcagccctcgcgaaagaagttatggaaggcgtgtggcccttagcggtgcctcttgaagtcgaagttggtattggcgaggattggctggctgccaaagga

SEQ ID NO: 6036 - protein, 841 aa, synthetic construct
  REGION 1..841: note = Variant of DNA polymerase I from Thermus sp. strain 2.9
MHHHHHHGGSGVLPVFEPKGRVLLVDGHHLAYRNFFALKGLTTSLGEPVQGVYGFAKSLLKALKEDGDVVIVVFDAKAPSFRHEAYEAYKAGRAPTPEDFPRQLALMKELVDLLGLERLEVPGFEADDVLATLAKKAEREGYEVQILTADRDLFQLLSPRISVLHPEGHRITPEWLWEKYGLRPEQWVDFRALAGDPSDNIPGVKGIGEKTALKLLKEWGSLENLLKNLDQVKPESVREKILAHLEDLKLSRELSRVRTDLPLEVDFGRRREPDWEGLKAFLERLEFGSLLHEFGLLESPLLAEEAPWPPPEGAFLGYRLSRPEPMWAELLALAASAQGRVYRAEDPHGALRGLFEVRGLLAKDLAVVALREGLDLPPTDDPMLLAYLLDPSNTTPEGVARRYGGEWTEDAAKRALLAERLHENLLGRLQGEERLLWLYEEVEKPLSRVLAHMEATGVKLDVAYLENLSLEVAAHMRRLEEEVFRLAGRSFRLNSRDQLERVLFDELGLPPIGKTEKTGKRSTSAAVLEALREVHPIVDKILQYREMAKLKGTYIDRLPALVHPKTGRLHTRFNQTATATGRLSSSDPNLQNIPVRTPLGQKIRRAFVAEEGWRLVALDYRQIELRVLAHLSGDENLIRVFQEGKDIHTQTASWMFGLSAEAIDPLMRRAAKTINFGVLYGMSAFRLSQELGIPYEEAQAFIQKYFQSYPKVKAWIEKTLREGRTRGYVETLFGRRRYVPDLNARVKGKREAAERMAFNMPVQGTAADLMKLAMVRCFPQLREVGARMLLQVHDELLLEAPKERAEEVAALAKEVMEGVWPLAVPLEVEVGIGEDWLAAKG

SEQ ID NO: 6037 - DNA, 2523 bp, synthetic construct
  misc_feature 1..2523: note = Variant of DNA polymerase I from Thermus sp. strain 2.9
  source 1..2523: mol_type = other DNA
atgcaccatcatcatcatcatggcggtagcggcgtgttaccggtgttcgagcctaaaggtcgcgtgcttctggttgatggccatcatctcgcgtatcgtaacttctttgccctgaaaggattaaccaccagccgcggcgagccggtacagggtgtctacggctttgcaaagtcgctcctgaaagctctgaaagaagacggtgatgtggtgattgttgtctttgatgcgaaagcgccaagttttcgccacgaagcgtacgaagcttacaaagccgggcgtgctccaacgccggaagactttcctcgccaattggcgcttatgaaggaattagtggatttgcttggcctcgaacgcttggaagttcccggtttcgaggcagacgacgtattagcgactctcgcaaagaaagccgaacgtgagggctatgaagtccagatcttgacagcagatcgcgatcttttccagcttttatctccgcgcatctcggtgttacacccggaagggcatcgtatcaccccggaatggctctgggagaaatatggtttgcgtcccgaacaatgggtggattttcgcgccttagcaggcgatccgagcgacaatattccgggagttaaaggtatcggcgagaagacggcgctcaagctccttaaagaatgggggtcgttggagaacttgcttaagaatttagatcaggtcaaaccagagtcagtgcgtgagaagattcttgctcacctcgaagacctcaaattaagccgcgaattgtcccgtgtacgcaccgatttgccgctcgaagttgatttcggccgccgccgcgaacctgactgggagggtcttaaagcgtttttagagcgtcttgaatttggttcgctcttgcatgaattcggccttttagaaagcccgttactggccgaagaagcaccttggccaccgcccgagggcgcgtttttaggttaccgtttgagtcgcccggaaccgatgtgggccgaattactggctcttgcagcgtctgcccagggacgtgtgtatcgcgcggaagaccctcatggtgcgctccgcggcctcttcgaagtccgtggactccttgccaaagacttagctgttgttgcattgcgcgaaggtcttgatttacctccgactgatgatccaatgcttcttgcgtacctcttggacccgtcaaacacgacgcccgaaggcgtagcccgtcgttacggcggcgagtggaccgaagatgcagcgaaacgcgcgttattggccgaacgtttgcacgcaaatttattaggacgtttgcaaggcgaggaacgtctcctctggctttacgaagaagtggagaaaccattgagtcgcgtgctcgcgcatatggaagctaccggtgtcaaattagacgtggcgtatttggagaatcttcaccttgaagttgctgccgaaatgcgccgcttggaggaagaagtattccgtttagcaggccgttcctttcgccttaactctcgcgatcagttagaacgtgtgttgttcgatgaacttggtctccctcctatcggcaagacagagaagaccggtaaacgtagcacttcagcggcggttttagaagctcttcgcgaagtccatcccattgtggacaagatcttgcagtaccgcgaaatggcgaaattgaaaggcacctatattgaccgtcttccggcattagtccacccgaaaacgggacgcctccatacccgcttcaaccaaacagccacggcgaccggtcgtttgtcctcctctgatccaaaccttcagaatattccagtacgtaccccattgggccagaagatccgccgtgcgtttgtagctgaggagggttggcgtttagtggccctcgattatcgtcaaattgaattacgtgtccttgcccatctttctggcgatgagaacctcatccgcgtgtttcaggaaggcaaagacattcacactcaaacggcaagctggatgtttggattatcagctgaagcgatcgatcctttgatgcgtcgtgcagcgaagaccatcaatttcggtgttctctacggtatgagtgcctttcgtttgtcgcaggaattaggcattccctatgaagaagctcaggcgttcattcagaaatactttcaaagctatcccaaagttaaagcatggatcgagaagactctccgcgaaggccgcacacgtggttacgtagagaccttatttggacgtcgccgctatgttcccgatttaaacgctcgcgtgaaaggcaaacgtgaagccgccgaacgcatggcgttcaacatgcctgtacagggcacggcagctgacctcatgaaacttgcaatggtgcgcctttttccacaattgcgtgaagttggtgcccgcatgctcttgcaggtccacgatgaactcttgttagaagcgccaaaagagcgtgcggaagaggtggcagccctcgcgaaagaagttatggaaggcgtgtggcccttagcggtgcctcttgaagtcgaagttggtattggcgaggattggctggctgccaaagga

SEQ ID NO: 6038 - protein, 841 aa, synthetic construct
  REGION 1..841: note = Variant of DNA polymerase I from Thermus sp. strain 2.9
MHHHHHHGGSGVLPVFEPKGRVLLVDGHHLAYRNFFALKGLTTSRGEPVQGVYGFAKSLLKALKEDGDVVIVVFDAKAPSFRHEAYEAYKAGRAPTPEDFPRQLALMKELVDLLGLERLEVPGFEADDVLATLAKKAEREGYEVQILTADRDLFQLLSPRISVLHPEGHRITPEWLWEKYGLRPEQWVDFRALAGDPSDNIPGVKGIGEKTALKLLKEWGSLENLLKNLDQVKPESVREKILAHLEDLKLSRELSRVRTDLPLEVDFGRRREPDWEGLKAFLERLEFGSLLHEFGLLESPLLAEEAPWPPPEGAFLGYRLSRPEPMWAELLALAASAQGRVYRAEDPHGALRGLFEVRGLLAKDLAVVALREGLDLPPTDDPMLLAYLLDPSNTTPEGVARRYGGEWTEDAAKRALLAERLHANLLGRLQGEERLLWLYEEVEKPLSRVLAHMEATGVKLDVAYLENLHLEVAAEMRRLEEEVFRLAGRSFRLNSRDQLERVLFDELGLPPIGKTEKTGKRSTSAAVLEALREVHPIVDKILQYREMAKLKGTYIDRLPALVHPKTGRLHTRFNQTATATGRLSSSDPNLQNIPVRTPLGQKIRRAFVAEEGWRLVALDYRQIELRVLAHLSGDENLIRVFQEGKDIHTQTASWMFGLSAEAIDPLMRRAAKTINFGVLYGMSAFRLSQELGIPYEEAQAFIQKYFQSYPKVKAWIEKTLREGRTRGYVETLFGRRRYVPDLNARVKGKREAAERMAFNMPVQGTAADLMKLAMVRLFPQLREVGARMLLQVHDELLLEAPKERAEEVAALAKEVMEGVWPLAVPLEVEVGIGEDWLAAKG

SEQ ID NO: 6039 - DNA, 2523 bp, synthetic construct
  misc_feature 1..2523: note = Variant of DNA polymerase I from Thermus sp. strain 2.9
  source 1..2523: mol_type = other DNA
atgcaccatcatcatcatcatggcggtagcggcgtgttaccggtgttcgagcctaaaggtcgcgtgcttctggttgatggccatcatctcgcgtatcgtaacttctttgccctgaaaggattaaccaccagcctgggcgagccggtacagggtgtctacggctttgcaaagtcgctcctgaaagctctgaaagaagacggtgatgtggtgattgttgtctttgatgcgaaagcgccaagttttcgccacgaagcgtacgaagcttacaaagccgggcgtgctccaacgccggaagactttcctcgccaattggcgcttatgaaggaattagtggatttgcttggcctcgaacgcttggaagttcccggtttcgaggcagacgacgtattagcgactctcgcaaagaaagccgaacgtgagggctatgaagtccagatcttgacagcagatcgcgatcttttccagcttttatctccgcgcatctcggtgttacacccggaagggcatcgtatcaccccggaatggctctgggagaaatatggtttgcgtcccgaacaatgggtggattttcgcgccttagcaggcgatccgagcgacaatattccgggagttaaaggtatcggcgagaagacggcgctcaagctccttaaagaatgggggtcgttggagaacttgcttaagaatttagatcaggtcaaaccagagtcagtgcgtgagaagattcttgctcacctcgaagacctcaaattaagccgcgaattgtcccgtgtacgcaccgatttgccgctcgaagttgatttcggtcgccgccgcgaacctgactgggagggtcttaaagcgtttttagagcgtcttgaatttggttcgctcttgcatgaattcggccttttagaaagcccgttactggccgaagaagcaccttggccaccgcccgagggcgcgtttttaggttaccgtttgagtcgcccggaaccgatgtgggccgaattactggctcttgcagcgtctgcccagggacgtgtgtatcgcgcggaagaccctcatggtgcgctccgcggcctcttcgaagtccgtggactccttgccaaagacttagctgttgttgcattgcgcgaaggtcttgatttacctccgactgatgatccaatgcttcttgcgtacctcttggacccgtcaaacacgacgcccgaaggcgtagcccgtcgttacggcggcgagtggaccgaagatgcagcgaaacgcgcgttattggccgaacgtttgcacgaaaatttattaggacgtttgcaaggcgaggaacgtctcctctggctttacgaagaagtggagaaaccattgagtcgcgtgctcgcgcatatggaagctaccggtgtcaaattagacgtggcgtatttggagaatctcagccttgaagttgctgcccacatgcgccgcttggaggaagaagtattccgtttagcaggccgttcctttcgccttaactctcgcgatcagttagaacgtgtgttgttcgatgaacttggtctccctcctatcggcaagacagagaagaccggtaaacgtagcacttcagcggcggttttagaagctcttcgcgaagtccatcccattgtggacaagatcttgcagtaccgcgaaatggcgaaattgaaaggcacctatattgaccgtcttccggcattagtccacccgaaaacgggacgcctccatacccgcttcaaccaaacagccacggcgaccggtcgtttgtcctcctctgatccaaaccttcagaatattccagtacgtaccccattgggccagaagatccgccgtgcgtttgtagctgaggagggttggcgtttagtggccctcgattatcgtcaaattgaattacgtgtccttgcccatctttctggcgatgagaacctcatccgcgtgtttcaggaaggcaaagacattcacactcaaacggcaagctggatgtttggattatcagctgaagcgatcgatcctttgatgcgtcgtgcagcgaagaccatcaatttcggtgttctctacggtatgagtgcctttcgtttgtcgcaggaattaggcattccctatgaagaagctcaggttttcattcagaaatactttcaaagctatcccaaagttaaagcatggatcgagaagactctccgtgaaggccgcacacgtggttacgtagagaccttatttggacgtcgccgctatgttcccgatttaaacgctcgcgtgaaaggcaagcgtgaagccgccgaacgcatggcgttcaacatgcctgtacagggcacggcagctgacctcatgaaacttgcaatggtgcgcctttttccacaattgcgtgaagttggtgcccgcatgctcttgcaggtccacgatgaactcttgttagaagcgccaaaagagcgtgcggaagaggtggcagccctcgcgaaagaagttatggaaggcgtgtggcccttagcggtgcctcttgaagtcgaagttggtattggcgaggattggctggctgccaaagga

SEQ ID NO: 6040 - protein, 841 aa, synthetic construct
  REGION 1..841: note = Variant of DNA polymerase I from Thermus sp. strain 2.9
MHHHHHHGGSGVLPVFEPKGRVLLVDGHHLAYRNFFALKGLTTSLGEPVQGVYGFAKSLLKALKEDGDVVIVVFDAKAPSFRHEAYEAYKAGRAPTPEDFPRQLALMKELVDLLGLERLEVPGFEADDVLATLAKKAEREGYEVQILTADRDLFQLLSPRISVLHPEGHRITPEWLWEKYGLRPEQWVDFRALAGDPSDNIPGVKGIGEKTALKLLKEWGSLENLLKNLDQVKPESVREKILAHLEDLKLSRELSRVRTDLPLEVDFGRRREPDWEGLKAFLERLEFGSLLHEFGLLESPLLAEEAPWPPPEGAFLGYRLSRPEPMWAELLALAASAQGRVYRAEDPHGALRGLFEVRGLLAKDLAVVALREGLDLPPTDDPMLLAYLLDPSNTTPEGVARRYGGEWTEDAAKRALLAERLHENLLGRLQGEERLLWLYEEVEKPLSRVLAHMEATGVKLDVAYLENLSLEVAAHMRRLEEEVFRLAGRSFRLNSRDQLERVLFDELGLPPIGKTEKTGKRSTSAAVLEALREVHPIVDKILQYREMAKLKGTYIDRLPALVHPKTGRLHTRFNQTATATGRLSSSDPNLQNIPVRTPLGQKIRRAFVAEEGWRLVALDYRQIELRVLAHLSGDENLIRVFQEGKDIHTQTASWMFGLSAEAIDPLMRRAAKTINFGVLYGMSAFRLSQELGIPYEEAQVFIQKYFQSYPKVKAWIEKTLREGRTRGYVETLFGRRRYVPDLNARVKGKREAAERMAFNMPVQGTAADLMKLAMVRLFPQLREVGARMLLQVHDELLLEAPKERAEEVAALAKEVMEGVWPLAVPLEVEVGIGEDWLAAKG

SEQ ID NO: 6041 - DNA, 2523 bp, synthetic construct
  misc_feature 1..2523: note = Variant of DNA polymerase I from Thermus sp. strain 2.9
  source 1..2523: mol_type = other DNA
atgcaccatcatcatcatcatggcggtagcggcgtgttaccggtgttcgagcctaaaggtcgcgtgcttctggttgatggccatcatctcgcgtatcgtaacttctttgccctgaaaggattaaccaccagcctgggcgagccggtacagggtgtctacggctttgcaaagtcgctcctgaaagctctgaaagaagacggtgatgtggtgattgttgtctttgatgcgaaagcgccaagttttcgccacgaagcgtacgaagcttacaaagccgggcgtgctccaacgccggaagactttcctcgccaattggcgcttatgaaggaattagtggatttgcttggcctcgaacgcttggaagttcccggtttcgaggcagacgacgtattagcgactctcgcaaagaaagccgaacgtgagggctatgaagtccagatcttgacagcagatcgcgatcttttccagcttttatctccgcgcatctcggtgttacacccggaagggcatcgtatcaccccggaatggctctgggagaaatatggtttgcgtcccgaacaatgggtggattttcgcgccttagcaggcgatccgagcgacaatattccgggagttaaaggtatcggcgagaagacggcgctcaagctccttaaagaatgggggtcgttggagaacttgcttaagaatttagatcaggtcaaaccagagtcagtgcgtgagaagattcttgctcacctcgaagacctcaaattaagccgcgaattgtcccgtgtacgcaccgatttgccgctcgaagttgatttcggtcgccgccgcgaacctgactgggagggtcttaaagcgtttttagagcgtcttgaatttggttcgctcttgcatgaattcggccttttagaaagcccgttactggccgaagaagcaccttggccaccgcccgagggcgcgtttttaggttaccgtttgagtcgcccggaaccgatgtgggccgaattactggctcttgcagcgtctgcccagggacgtgtgtatcgcgcggaagaccctcatggtgcgctccgcggcctcttcgaagtccgtggactccttgccaaagacttagctgttgttgcattgcgcgaaggtcttgatttacctccgactgatgatccaatgcttcttgcgtacctcttggacccgtcaaacacgacgcccgaaggcgtagcccgtcgttacggcggcgagtggaccgaagatgcagcgaaacgcgcgttattggccgaacgtttgcacgaaaatttattaggacgtttgcaaggcgaggaacgtctcctctggctttacgaagaagtggagaaaccattgagtcgcgtgctcgcgcatatggaagctaccggtgtcaaattagacgtggcgtatttggagaatctcagccttgaagttgctgcccacatgcgccgcttggaggaagaagtattccgtttagcaggccgttcctttcgccttaactctcgcgatcagttagaacgtgtgttgttcgatgaacttggtctccctcctatcggcaagacagagaagaccggtaaacgtagcacttcagcggcggttttagaagctcttcgcgaagtccatcccattgtggacaagatcttgcagtaccgcgaaatggcgaaattgaaaggcacctatattgaccgtcttccggcattagtccacccgaaaacgggacgcctccatacccgcttcaaccaaacagccacggcgaccggtcgtttgtcctcctctgatccaaaccttcagaatattccagtacgtaccccattgggccagaagatccgccgtgcgtttgtagctgaggtgggttggcgtttagtggccctcgattatcgtcaaattgaattacgtgtccttgcccatctttctggcgatgagaacctcatccgcgtgtttcaggaaggcaaagacattcacactcaaacggcaagctggatgtttggattatcagctgaagcgatcgatcctttgatgcgtcgtgcagcgaagaccatcaatttcggtgttctctacggtatgagtgcctttcgtttgtcgcaggaattaggcattccctatgaagaagctcaggcgttcattcagaaatactttcaaagctatcccaaagttaaagcatggatcgagaagactctccgtgaaggccgcacacgtggttacgtagagaccttatttggacgtcgccgctatgttcccgatttaaacgctcgcgtgaaaggcaagcgtgaagccgccgaacgcatggcgttcaacatgcctgtacagggcacggcagctgacctcatgaaactcgcaatggtgcgcctttttccacaattgcgtgaagttggtgcccgcatgctcttgcaggtccacgatgaactcttgttagaagcgccaaaagagcgtgcggaagaggtggcagccctcgcgaaagaagttatggaaggcgtgtggcccttagcggtgcctcttgaagtcgaagttggtattggcgaggattggctggctgccaaagga

SEQ ID NO: 6042 - protein, 841 aa, synthetic construct
  REGION 1..841: note = Variant of DNA polymerase I from Thermus sp. strain 2.9
MHHHHHHGGSGVLPVFEPKGRVLLVDGHHLAYRNFFALKGLTTSLGEPVQGVYGFAKSLLKALKEDGDVVIVVFDAKAPSFRHEAYEAYKAGRAPTPEDFPRQLALMKELVDLLGLERLEVPGFEADDVLATLAKKAEREGYEVQILTADRDLFQLLSPRISVLHPEGHRITPEWLWEKYGLRPEQWVDFRALAGDPSDNIPGVKGIGEKTALKLLKEWGSLENLLKNLDQVKPESVREKILAHLEDLKLSRELSRVRTDLPLEVDFGRRREPDWEGLKAFLERLEFGSLLHEFGLLESPLLAEEAPWPPPEGAFLGYRLSRPEPMWAELLALAASAQGRVYRAEDPHGALRGLFEVRGLLAKDLAVVALREGLDLPPTDDPMLLAYLLDPSNTTPEGVARRYGGEWTEDAAKRALLAERLHENLLGRLQGEERLLWLYEEVEKPLSRVLAHMEATGVKLDVAYLENLSLEVAAHMRRLEEEVFRLAGRSFRLNSRDQLERVLFDELGLPPIGKTEKTGKRSTSAAVLEALREVHPIVDKILQYREMAKLKGTYIDRLPALVHPKTGRLHTRFNQTATATGRLSSSDPNLQNIPVRTPLGQKIRRAFVAEVGWRLVALDYRQIELRVLAHLSGDENLIRVFQEGKDIHTQTASWMFGLSAEAIDPLMRRAAKTINFGVLYGMSAFRLSQELGIPYEEAQAFIQKYFQSYPKVKAWIEKTLREGRTRGYVETLFGRRRYVPDLNARVKGKREAAERMAFNMPVQGTAADLMKLAMVRLFPQLREVGARMLLQVHDELLLEAPKERAEEVAALAKEVMEGVWPLAVPLEVEVGIGEDWLAAKG

SEQ ID NO: 6043 - DNA, 2523 bp, synthetic construct
  misc_feature 1..2523: note = Variant of DNA polymerase I from Thermus sp. strain 2.9
  source 1..2523: mol_type = other DNA
atgcaccatcatcatcatcatggcggtagcggcgtgttaccggtgttcgagcctaaaggtcgcgtgcttctggttgatggccatcatctcgcgtatcgtaacttctttgccctgaaaggattaaccaccagcctgggcgagccggtacagggtgtctacggctttgcaaagtcgctcctgaaagctctgaaagaagacggtgatgtggtgattgttgtctttgatgcgaaagcgccaagttttcgccacgaagcgtacgaagcttacaaagccgggcgtgctccaacgccggaagactttcctcgccaattggcgcttatgaaggaattagtggatttgcttggcctcgaacgcttggaagttcccggtttcgaggcagacgacgtattagcgactctcgcaaagaaagccgaacgtgagggctatgaagtccagatcttgacagcagatcgcgatcttttccagcttttatctccgcgcatctcggtgttacacccggaagggcatcgtatcaccccggaatggctctgggagaaatatggtttgcgtcccgaacaatgggtggattttcgcgccttagcaggcgatccgagcgacaatattccgggagttaaaggtatcggcgagaagacggcgctcaagctccttaaagaatgggggtcgttggagaacttgcttaagaatttagatcaggtcaaaccagagtcagtgcgtgagaagattcttgctcacctcgaagacctcaaattaagccgcgaattgtcccgtgtacgcaccgatttgccgctcgaagttgatttcggtcgccgccgcgaacctgactgggagggtcttaaagcgtttttagagcgtcttgaatttggttcgctcttgcatgaattcggccttttagaaagcccgttactggccgaagaagcaccttggccaccgcccgagggcgcgtttttaggttaccgtttgagtcgcccggaaccgatgtgggccgaattactggctcttgcagcgtctgcccagggacgtgtgtatcgcgcggaagaccctcatggtgcgctccgcggcctcttcgaagtccgtggactccttgccaaagacttagctgttgttgcattgcgcgaaggtcttgatttacctccgactgatgatccaatgcttcttgcgtacctcttggacccgtcaaacacgacgcccgaaggcgtagcccgtcgttacggcggcgagtggaccgaagatgcagcgaaacgcgcgttattggccgaacgtttgcacgaaaatttattaggacgtttgcaaggcgaggaacgtctcctctggctttacgaagaagtggagaaaccattgagtcgcgtgctcgcgcatatggaagctaccggtgtcaaattagacgtggcgtatttggagaatctcagccttgaagttgctgcccacatgcgccgcttggaggaagaagtattccgtttagcaggccgttcctttcgccttaactctcgcgatcagttagaacgtgtgttgttcgatgaacttggtctccctcctatcggcaagacagagaagaccggtaaacgtagcacttcagcggcggttttagaagctcttcgcgaagtccatcccattgtggacaagatcttgcagtaccgcgaaatggcgaaattgaaaggcacctatattgaccgtcttccggcattagtccacccgaaaacgggacgcctccatacccgcttcaaccaaacagccacggcgaccggtcgtttgtcctcctctgatccaaaccttcagaatattccagtacgtaccccattgggccagaagatccgccgtgcgtttgtagctgaggagggttggcgtttagtggccctcgattatcgtcaaattgaattacgtgtccttgcccatctttctggcgatgagaacctcatccgcgtgtttcaggaaggcaaagacattcacactcaaacggcaagctggatgtttggattatcagctgaagcgatcgatcctttgatgcgtcgtgcagcgaagaccatcaatttcggtgttctctacggtatgagtgcctttcgtttgtcgggggaattaggcattccctatgaagaagctcaggcgttcattcagaaatactttcaaagctatcccaaagttaaagcatggatcgagaagactctccgtgaaggccgcacacgtggttacgtagagaccttatttggacgtcgccgctatgttcccgatttaaacgctcgcgtgaaaggcaagcgtgaagccgccgaacgcatggcgttcaacatgcctgtacagggcacggcagctgacctcatgaaacttgcaatggtgcgcctttttccacaattgcgtgaagttggtgcccgcatgctcttgcaggtccacgatgaactcttgttagaagcgccaaaagagcgtgcggaagaggtggcagccctcgcgaaagaagttatggaaggcgtgtggcccttagcggtgcctcttgaagtcgaagttggtattggcgaggattggctggctgccaaagga

SEQ ID NO: 6044 - protein, 841 aa, synthetic construct
  REGION 1..841: note = Variant of DNA polymerase I from Thermus sp. strain 2.9
MHHHHHHGGSGVLPVFEPKGRVLLVDGHHLAYRNFFALKGLTTSLGEPVQGVYGFAKSLLKALKEDGDVVIVVFDAKAPSFRHEAYEAYKAGRAPTPEDFPRQLALMKELVDLLGLERLEVPGFEADDVLATLAKKAEREGYEVQILTADRDLFQLLSPRISVLHPEGHRITPEWLWEKYGLRPEQWVDFRALAGDPSDNIPGVKGIGEKTALKLLKEWGSLENLLKNLDQVKPESVREKILAHLEDLKLSRELSRVRTDLPLEVDFGRRREPDWEGLKAFLERLEFGSLLHEFGLLESPLLAEEAPWPPPEGAFLGYRLSRPEPMWAELLALAASAQGRVYRAEDPHGALRGLFEVRGLLAKDLAVVALREGLDLPPTDDPMLLAYLLDPSNTTPEGVARRYGGEWTEDAAKRALLAERLHENLLGRLQGEERLLWLYEEVEKPLSRVLAHMEATGVKLDVAYLENLSLEVAAHMRRLEEEVFRLAGRSFRLNSRDQLERVLFDELGLPPIGKTEKTGKRSTSAAVLEALREVHPIVDKILQYREMAKLKGTYIDRLPALVHPKTGRLHTRFNQTATATGRLSSSDPNLQNIPVRTPLGQKIRRAFVAEEGWRLVALDYRQIELRVLAHLSGDENLIRVFQEGKDIHTQTASWMFGLSAEAIDPLMRRAAKTINFGVLYGMSAFRLSGELGIPYEEAQAFIQKYFQSYPKVKAWIEKTLREGRTRGYVETLFGRRRYVPDLNARVKGKREAAERMAFNMPVQGTAADLMKLAMVRLFPQLREVGARMLLQVHDELLLEAPKERAEEVAALAKEVMEGVWPLAVPLEVEVGIGEDWLAAKG

SEQ ID NO: 6045 - DNA, 2523 bp, synthetic construct
  misc_feature 1..2523: note = Variant of DNA polymerase I from Thermus sp. strain 2.9
  source 1..2523: mol_type = other DNA
atgcaccatcatcatcatcatggcggtagcggcgtgttaccggtgttcgagcctaaaggtcgcgtgcttctggttgatggccatcatctcgcgtatcgtaacttctttgccctgaaaggattaaccaccagcctgggcgagccggtacagggtgtctacggctttgcaaagtcgctcctgaaagctctgaaagaagacggtgatgtggtgattgttgtctttgatgcgaaagcgccaagttttcgccacgaagcgtacgaagcttacaaagccgggcgtgctccaacgccggaagactttcctcgccaattggcgcttatgaaggaattagtggatttgcttggcctcgaacgcttggaagttcccggtttcgaggcagacgacgtattagcgactctcgcaaagaaagccgaacgtgagggctatgaagtccagatcttgacagcagatcgcgatcttttccagcttttatctccgcgcatctcggtgttacacccggaagggcatcgtatcaccccggaatggctctgggagaaatatggtttgcgtcccgaacaatgggtggattttcgcgccttagcaggcgatccgagcgacaatattccgggagttaaaggtatcggcgagaagacggcgctcaagctccttaaagaatgggggtcgttggagaacttgcttaagaatttagatcaggtcaaaccagagtcagtgcgtgagaagattcttgctcacctcgaagacctcaaattaagccgcgaattgtcccgtgtacgcaccgatttgccgctcgaagttgatttcggtcgccgccgcgaacctgactgggagggtcttaaagcgtttttagagcgtcttgaatttggttcgctcttgcatgaattcggccttttagaaagcccgttactggccgaagaagcaccttggccaccgcccgagggcgcgtttttaggttaccgtttgagtcgcccggaaccgatgtgggccgaattactggctcttgcagcgtctgcccagggacgtgtgtatcgcgcggaagaccctcatggtgcgctccgcggcctcttcgaagtccgtggactccttgccaaagacttagctgttgttgcattgcgcgaaggtcttgatttacctccgactgatgatccaatgcttcttgcgtacctcttggacccgtcaaacacgacgcccgaaggcgtagcccgtcgttacggcggcgagtggaccgaagatgcagcgaaacgcgcgttatcggccgaacgtttgcacgaaaatttattaggacgtttgcaaggcgaggaacgtctcctctggctttacgaagaagtggagaaaccattgagtcgcgtgctcgcgcatatggaagctaccggtgtcaaattagacgtggcgtatttggagaatctcagccttgaagttgctgcccacatgcgccgcttggaggaagaagtattccgtttagcaggccgttcctttcgccttaactctcgcgatcagttagaacgtgtgttgttcgatgaacttggtctccctcctatcggcaagacagagaagaccggtaaacgtagcacttcagcggcggttttagaagctcttcgcgaagtccatcccattgtggacaagatcttgcagtaccgcgaaatggcgaaattgaaaggcacctatattgaccgtcttccggcattagtccacccgaaaacgggacgcctccatacccgcttcaaccaaacagccacggcgaccggtcgtttgtcctcctctgatccaaaccttcagaatattccagtacgtaccccattgggccagaagatccgccgtgcgtttgtagctgaggagggttggcgtttagtggccctcgattatcgtcaaattgaattacgtgtccttgcccatctttctggcgatgagaacctcatccgcgtgtttcaggaaggcaaagacattcacactcaaacggcaagctggatgtttggattatcagctgaagcgatcgatcctttgatgcgtcgtgcagcgaagaccatcaatttcggtgttctctacggtatgagtgcctttcgtttgtcgcaggaattaggcattccctatgaagaagctcaggcgttcattcagaaatactttcaaagctatcccaaagttaaagcatggatcgagaagactctccgtgaaggccgcacacgtggttacgtagagaccttatttggacgtcgccgctatgttcccgatttaaacgctcgcgtgaaaggcaagcgtgaagccgccgaacgcatggcgttcaacatgcctgtacagggcacggcagctgacctcatgaaacttgcaatggtgcgcctttttccacaattgcgtgaagttggtgcccgcatgctcttgcaggtccacgatgaactcttgttagaagcgccaaaagagcgtgcggaagaggtggcagccctcgcgaaagaagttatggaaggcgtgtggcccttagcggtgcctcttgaagtcgaagttggtattggcgaggattggctggctgccaaagga

SEQ ID NO: 6046 - protein, 841 aa, synthetic construct
  REGION 1..841: note = Variant of DNA polymerase I from Thermus sp. strain 2.9
MHHHHHHGGSGVLPVFEPKGRVLLVDGHHLAYRNFFALKGLTTSLGEPVQGVYGFAKSLLKALKEDGDVVIVVFDAKAPSFRHEAYEAYKAGRAPTPEDFPRQLALMKELVDLLGLERLEVPGFEADDVLATLAKKAEREGYEVQILTADRDLFQLLSPRISVLHPEGHRITPEWLWEKYGLRPEQWVDFRALAGDPSDNIPGVKGIGEKTALKLLKEWGSLENLLKNLDQVKPESVREKILAHLEDLKLSRELSRVRTDLPLEVDFGRRREPDWEGLKAFLERLEFGSLLHEFGLLESPLLAEEAPWPPPEGAFLGYRLSRPEPMWAELLALAASAQGRVYRAEDPHGALRGLFEVRGLLAKDLAVVALREGLDLPPTDDPMLLAYLLDPSNTTPEGVARRYGGEWTEDAAKRALSAERLHENLLGRLQGEERLLWLYEEVEKPLSRVLAHMEATGVKLDVAYLENLSLEVAAHMRRLEEEVFRLAGRSFRLNSRDQLERVLFDELGLPPIGKTEKTGKRSTSAAVLEALREVHPIVDKILQYREMAKLKGTYIDRLPALVHPKTGRLHTRFNQTATATGRLSSSDPNLQNIPVRTPLGQKIRRAFVAEEGWRLVALDYRQIELRVLAHLSGDENLIRVFQEGKDIHTQTASWMFGLSAEAIDPLMRRAAKTINFGVLYGMSAFRLSQELGIPYEEAQAFIQKYFQSYPKVKAWIEKTLREGRTRGYVETLFGRRRYVPDLNARVKGKREAAERMAFNMPVQGTAADLMKLAMVRLFPQLREVGARMLLQVHDELLLEAPKERAEEVAALAKEVMEGVWPLAVPLEVEVGIGEDWLAAKG

SEQ ID NO: 6047 - DNA, 2523 bp, synthetic construct
  misc_feature 1..2523: note = Variant of DNA polymerase I from Thermus sp. strain 2.9
  source 1..2523: mol_type = other DNA
atgcaccatcatcatcatcatggcggtagcggcgtgttaccggtgttcgagcctaaaggtcgcgtgcttctggttgatggccatcatctcgcgtatcgtaacttctttgccctgaaaggattaaccaccagcctgggcgagccggtacagggtgtctacggctttgcaaagtcgctcctgaaagctctgaaagaagacggtgatgtggtgattgttgtctttgatgcgaaagcgccaagttttcgccacgaagcgtacgaagcttacaaagccgggcgtgctccaacgccggaagactttcctcgccaattggcgcttatgaaggaattagtggatttgcttggcctcgaacgcttggaagttcccggtttcgaggcagacgacgtattagcgactctcgcaaagaaagccgaacgtgagggctatgaagtccagatcttgacagcagatcgcgatcttttccagcttttatctccgcgcatctcggtgttacacccggaagggcatcgtatcaccccggaatggctctgggagaaatatggtttgcgtcccgaacaatgggtggattttcgcgccttagcaggcgatccgagcgacaatattccgggagttaaaggtatcggcgagaagacggcgctcaagctccttaaagaatgggggtcgttggagaacttgcttaagaatttagatcaggtcaaaccagagtcagtgcgtgagaagattcttgctcacctcgaagacctcaaattaagccgcgaattgtcccgtgtacgcaccgatttgccgctcgaagttgatttcggtcgccgccgcgaacctgactgggagggtcttaaagcgtttttagagcgtcttgaatttggttcgctcttgcatgaattcggccttttagaaagcccgttactggccgaagaagcaccttggccaccgcccgagggcgcgtttttaggttaccgtttgagtcgcccggaaccgatgtgggccgaattactggctcttgcagcgtctgcccagggacgtgtgtatcgcgcggaagaccctcatggtgcgctccgcggcctcttcgaagtccgtggactccttgccaaagacttagctgttgttgcattgcgcgaaggtcttgatttacctccgactgatgatccaatgcttcttgcgtacctcttggacccgtcaaacacgacgcccgaaggcgtagcccgtcgttacggcggcgagtggaccgaagatgcagcgaaacgcgcgttattggccgaacgtttgcacgaaaatttattaggacgtttgcaaggcgaggaacgtctcctctggctttacgaagaagtggagaaaccattgagtcgcgtgctcgcgcatatggaagctaccggtgtcaaattagacgtggcgtatttggagaatctcagccttgaagttgctgcccacatgcgccgcttggaggaagaagtattccgtttagcaggccgttcctttcgccttaactctcgcgatcagttagaacgtgtgttgttcgatgaacttggtctccctcctatcggcaagacagagaagaccggtaaacgtagcacttcagcggcggttttagaagctcttcgcgaagtccatcccattgtggacaagatcttgcagtaccgcgaaatggcgaaattgaaaggcacctatattgaccgtcttccggcattagtccacccgaaaacgggacgcctccatacccgcttcaaccaaacagccacggcgaccggtcgtttgtcctcctctgatccaaaccttcagaatattccagtacgtaccccattgggccagaagatccgccgtgcgtttgtagctgaggagggttggcgtttagtggccctcgattatcgtcaaattgaattacgtgtccttgcccatctttctggcgatgagaacctcatccgcgtgtttcaggaaggcaaagacattcacactcaaacggcaagctggatgtttggattatcagctgaagcgatcgatcctttgatgcgtcgtgcagcgaagaccatcaatttcggtgttctctacggtatgagtgcctttcgtttgtcgcgtgaattaggcattccctatgaagaagctcaggcgttcattcagaaatactttcaaagctatcccaaagttaaagcatggatcgagaagactctccgtgaaggccgcacacgtggttacgtagagaccttatttggacgtcgccgctatgttcccgatttaaacgctcgcgtgaaaggcaagcgtgaagccgccgaacgcatggcgttcaacatgcctgtacagggcacggcagctgacctcatgaaacttgcaatggtgcgcctttttccacaattgcgtgaagttggtgcccgcatgctcttgcaggtccacgatgaactcttgttagaagcgccaaaagagcgtgcggaagaggtggcagccctcgcgaaagaagttatggaaggcgtgtggcccttagcggtgcctcttgaagtcgaagttggtattggcgaggattggctggctgccaaagga

SEQ ID NO: 6048 - protein, 841 aa, synthetic construct
  REGION 1..841: note = Variant of DNA polymerase I from Thermus sp. strain 2.9
MHHHHHHGGSGVLPVFEPKGRVLLVDGHHLAYRNFFALKGLTTSLGEPVQGVYGFAKSLLKALKEDGDVVIVVFDAKAPSFRHEAYEAYKAGRAPTPEDFPRQLALMKELVDLLGLERLEVPGFEADDVLATLAKKAEREGYEVQILTADRDLFQLLSPRISVLHPEGHRITPEWLWEKYGLRPEQWVDFRALAGDPSDNIPGVKGIGEKTALKLLKEWGSLENLLKNLDQVKPESVREKILAHLEDLKLSRELSRVRTDLPLEVDFGRRREPDWEGLKAFLERLEFGSLLHEFGLLESPLLAEEAPWPPPEGAFLGYRLSRPEPMWAELLALAASAQGRVYRAEDPHGALRGLFEVRGLLAKDLAVVALREGLDLPPTDDPMLLAYLLDPSNTTPEGVARRYGGEWTEDAAKRALLAERLHENLLGRLQGEERLLWLYEEVEKPLSRVLAHMEATGVKLDVAYLENLSLEVAAHMRRLEEEVFRLAGRSFRLNSRDQLERVLFDELGLPPIGKTEKTGKRSTSAAVLEALREVHPIVDKILQYREMAKLKGTYIDRLPALVHPKTGRLHTRFNQTATATGRLSSSDPNLQNIPVRTPLGQKIRRAFVAEEGWRLVALDYRQIELRVLAHLSGDENLIRVFQEGKDIHTQTASWMFGLSAEAIDPLMRRAAKTINFGVLYGMSAFRLSRELGIPYEEAQAFIQKYFQSYPKVKAWIEKTLREGRTRGYVETLFGRRRYVPDLNARVKGKREAAERMAFNMPVQGTAADLMKLAMVRLFPQLREVGARMLLQVHDELLLEAPKERAEEVAALAKEVMEGVWPLAVPLEVEVGIGEDWLAAKG

SEQ ID NO: 6049 - DNA, 2523 bp, synthetic construct
  misc_feature 1..2523: note = Variant of DNA polymerase I from Thermus sp. strain 2.9
  source 1..2523: mol_type = other DNA
atgcaccatcatcatcatcatggcggtagcggcgtgttaccggtgttcgagcctaaaggtcgcgtgcttctggttgatggccatcatctcgcgtatcgtaacttctttgccctgaaaggattaaccaccagcctgggcgagccggtacagggtgtctacggctttgcaaagtcgctcctgaaagctctgaaagaagacggtgatgtggtgattgttgtctttgatgcgaaagcgccaagttttcgccacgaagcgtacgaagcttacaaagccgggcgtgctccaacgccggaagactttcctcgccaattggcgcttatgaaggaattagtggatttgcttggcctcgaacgcttggaagttcccggtttcgaggcagacgacgtattagcgactctcgcaaagaaagccgaacgtgagggctatgaagtccagatcttgacagcagatcgcgatcttttccagcttttatctccgcgcatctcggtgttacacccggaagggcatcgtatcaccccggaatggctctgggagaaatatggtttgcgtcccgaacaatgggtggattttcgcgccttagcaggcgatccgagcgacaatattccgggagttaaaggtatcggcgagaagacggcgctcaagctccttaaagaatgggggtcgttggagaacttgcttaagaatttagatcaggtcaaaccagagtcagtgcgtgagaagattcttgctcacctcgaagacctcaaattaagccgcgaattgtcccgtgtacgcaccgatttgccgctcgaagttgatttcggtcgccgccgcgaacctgactgggagggtcttaaagcgtttttagagcgtcttgaatttggttcgctcttgcatgaattcggccttttagaaagcccgttactggccgaagaagcaccttggccaccgcccgagggcgcgtttttaggttaccgtttgagtcgcccggaaccgatgtgggccgaattactggctcttgcagcgtctgcccagggacgtgtgtatcgcgcggaagaccctcatggtgcgctccgcggcctcttcgaagtccgtggcctccttgccaaagacttagctgttgttgcattgcgcgaaggtcttgatttacctccgactgatgatccaatgcttcttgcgtacctcttggacccgtcaaacacgacgcccgaaggcgtagcccgtcgttacggcggcgagtggaccgaagatgcagcgaaacgcgcgttattggccgaacgtttgcacgaaaatttattaggacgtttgcaaggcgaggaacgtctcctctggctttacgaagaagtggagaaaccattgagtcgcgtgctcgcgcatatggaagctaccggtgtcaaattagacgtggcgtatttggagaatctcagccttgaagttgctgcccacatgcgccgcttggaggaagaagtattccgtttagcaggccgttcctttcgccttaactctcgcgatcagttagaacgtgtgttgttcgatgaacttggtctccctcctatcggcaagacagagaagaccggtaaacgtagcacttcagcggcggttttagaagctcttcgcgaagtccatcccattgtggacaagatcttgcagtaccgcgaaatggcgaaattgaaaggcacctatattgaccgtcttccggcattagtccacccgaaaacgggacgcctccatacccgcttcaaccaaacagccacggcgaccggtcgtttgtcctcctctgatccaaaccttcagaatattccagtacgtacctttttgggccagaagatccgccgtgcgtttgtagctgaggagggttgggcgttagtggccctcgattatcgtcaaattgaattacgtgtccttgcccatctttctggcgatgagaacctcatccgcgtgtttcaggaaggcaaagacattcacactcaaacggcaagctggatgtttggattatcagctgaagcgatcgatcctttgatgcgtcgtgcagcgaagaccatcaatttcggtgttctctacggtatgagtgcctttcgtttgtcgcaggaattaggcattccctatgaagaagctcagggtttcattcagaaatactttcaaagctatcccaaagttaaagcatggatcgagaagactctccgtgaaggccgcacacgtggttacgtagagaccttatttggacgtcgccgctatgttcccgatttaaacggtcgcgtgaaaggcaagcgtgaagccgccgaacgcatggcgttcaacatgcctgtacagggcacggcagctgacctcatgaaacttgcaatggtgcgcctttttccacaattgcgtgaagttggtgcccgcatgctgttgcaggtccacgatgaactcttgttagaagcgccaaaagagcgtgcggaagaggtggcagccctcgcgaaagaagttatggaaggcgtgtggcccttagcggtgcctcttgaagtcgaagttggtattggcgaggattggctggctgccaaagga

SEQ ID NO: 6050 - protein, 841 aa, synthetic construct
  REGION 1..841: note = Variant of DNA polymerase I from Thermus sp. strain 2.9
MHHHHHHGGSGVLPVFEPKGRVLLVDGHHLAYRNFFALKGLTTSLGEPVQGVYGFAKSLLKALKEDGDVVIVVFDAKAPSFRHEAYEAYKAGRAPTPEDFPRQLALMKELVDLLGLERLEVPGFEADDVLATLAKKAEREGYEVQILTADRDLFQLLSPRISVLHPEGHRITPEWLWEKYGLRPEQWVDFRALAGDPSDNIPGVKGIGEKTALKLLKEWGSLENLLKNLDQVKPESVREKILAHLEDLKLSRELSRVRTDLPLEVDFGRRREPDWEGLKAFLERLEFGSLLHEFGLLESPLLAEEAPWPPPEGAFLGYRLSRPEPMWAELLALAASAQGRVYRAEDPHGALRGLFEVRGLLAKDLAVVALREGLDLPPTDDPMLLAYLLDPSNTTPEGVARRYGGEWTEDAAKRALLAERLHENLLGRLQGEERLLWLYEEVEKPLSRVLAHMEATGVKLDVAYLENLSLEVAAHMRRLEEEVFRLAGRSFRLNSRDQLERVLFDELGLPPIGKTEKTGKRSTSAAVLEALREVHPIVDKILQYREMAKLKGTYIDRLPALVHPKTGRLHTRFNQTATATGRLSSSDPNLQNIPVRTFLGQKIRRAFVAEEGWALVALDYRQIELRVLAHLSGDENLIRVFQEGKDIHTQTASWMFGLSAEAIDPLMRRAAKTINFGVLYGMSAFRLSQELGIPYEEAQGFIQKYFQSYPKVKAWIEKTLREGRTRGYVETLFGRRRYVPDLNGRVKGKREAAERMAFNMPVQGTAADLMKLAMVRLFPQLREVGARMLLQVHDELLLEAPKERAEEVAALAKEVMEGVWPLAVPLEVEVGIGEDWLAAKG

SEQ ID NO: 6051 - DNA, 2523 bp, synthetic construct
  misc_feature 1..2523: note = Variant of DNA polymerase I from Thermus sp. strain 2.9
  source 1..2523: mol_type = other DNA
atgcaccatcatcatcatcatggcggtagcggcgtgttaccggtgttcgagcctaaaggtcgcgtgcttctggttgatggccatcatctcgcgtatcgtaacttctttgccctgaaaggattaaccaccagcctgggcgagccggtacagggtgtctacggctttgcaaagtcgctcctgaaagctctgaaagaagacggtgatgtggtgattgttgtctttgatgcgaaagcgccaagttttcgccacgaagcgtacgaagcttacaaagccgggcgtgctccaacgccggaagactttcctcgccaattggcgcttatgaaggaattagtggatttgcttggcctcgaacgcttggaagttcccggtttcgaggcagacgacgtattagcgactctcgcaaagaaagccgaacgtgagggctatgaagtccagatcttgacagcagatcgcgatcttttccagcttttatctccgcgcatctcggtgttacacccggaagggcatcgtatcaccccggaatggctctgggagaaatatggtttgcgtcccgaacaatgggtggattttcgcgccttagcaggcgatccgagcgacaatattccgggagttaaaggtatcggcgagaagacggcgctcaagctccttaaagaatgggggtcgttggagaacttgcttaagaatttagatcaggtcaaaccagagtcagtgcgtgagaagattcttgctcacctcgaagacctcaaattaagccgcgaattgtcccgtgtacgcaccgatttgccgctcgaagttgatttcggtcgccgccgcgaacctgactgggagggtcttaaagcgtttttagagcgtcttgaatttggttcgctcttgcatgaattcggccttttagaaagcccgttactggccgaagaagcaccttggccaccgcccgagggcgcgtttttaggttaccgtttgagtcgcccggaaccgatgtgggccgaattactggctcttgcagcgtctgcccagggacgtgtgtatcgcgcggaagaccctcatggtgcgctccgcggcctcttcgaagtccgtggactccttgccaaagacttagctgttgttgcattgcgcgaaggtcttgatttacctccgactgatgatccaatgcttcttgcgtacctcttggacccgtcaaacacgacgcccgaaggcgtagcccgtcgttacggcggcgagtggaccgaagatgcagcgaaacgcgcgttattggccgaacgtttgcacgaaaatttattaggacgtttgcaaggcgaggaacgtctcgcttggctttacgaagaagtggagaaaccattgagtcgcgtgctcgcgcatatggaagctaccggtgtcaaattagacgtggcgtatttggagaatctcagccttgaagttgctgcccacatgcgccgcttggaggaagaagtattccgtttagcaggccgttcctttcgccttaactctcgcgatcagttagaacgtgtgttgttcgatgaacttggtctccctcctatcggcaagacagagaagaccggtaaacgtagcacttcagcggcggttttagaagctcttcgcgaagtccatcccattgtggacaagatcttgcagtaccgcgaaatggcgaaattgaaaggcacctatattgaccgtcttccggcattagtccacccgaaaacgggacgcctccatacccgcttcaaccaaacagccacggcgaccggtcgtttgtcctcctctgatccaaaccttcagaatattccagtacgtaccccattgggccagaagatccgccgtgcgtttgtagctgaggagggttggcgtttagtggccctcgattatcgtcaaattgaattacgtgtccttgcccatctttctggcgatgagaacctcatccgcgtgtttcaggaaggcaaagacattcacactcaaacggcaagctggatgtttggattatcagctgaagcgatcgatcctttgatgcgtcgtgcagcgaagaccatcaatttcggtgttctctacggtatgagtgcctttcgtttgtcgcaggaattaggcattccctatgaagaagctcaggcgttcattcagaaatactttcaaagctatcccaaagttaaagcatggatcgagaagactctccgtgaaggccgcacacgtggttacgtagagaccttatttggacgtcgccgctatgttcccgatttaaacgctcgcgtgaaaggcaagcgtgaagccgccgaacgcatggcgttcaacatgcctgtacagggcacggcagctgacctcatgaaacttgcaatggtgcgcctttttccacaattgcgtgaagttggtgcccgcatgctcttgcaggtccacgatgaactcttgttagaagcgccaaaagagcgtgcggaagaggtggcagccctcgcgaaagaagttatggaaggcgtgtggcccttagcggtgcctcttgaagtcgaagttggtattggcgaggattggctggctgccaaagga

SEQ ID NO: 6052 - protein, 841 aa, synthetic construct
  REGION 1..841: note = Variant of DNA polymerase I from Thermus sp. strain 2.9
MHHHHHHGGSGVLPVFEPKGRVLLVDGHHLAYRNFFALKGLTTSLGEPVQGVYGFAKSLLKALKEDGDVVIVVFDAKAPSFRHEAYEAYKAGRAPTPEDFPRQLALMKELVDLLGLERLEVPGFEADDVLATLAKKAEREGYEVQILTADRDLFQLLSPRISVLHPEGHRITPEWLWEKYGLRPEQWVDFRALAGDPSDNIPGVKGIGEKTALKLLKEWGSLENLLKNLDQVKPESVREKILAHLEDLKLSRELSRVRTDLPLEVDFGRRREPDWEGLKAFLERLEFGSLLHEFGLLESPLLAEEAPWPPPEGAFLGYRLSRPEPMWAELLALAASAQGRVYRAEDPHGALRGLFEVRGLLAKDLAVVALREGLDLPPTDDPMLLAYLLDPSNTTPEGVARRYGGEWTEDAAKRALLAERLHENLLGRLQGEERLAWLYEEVEKPLSRVLAHMEATGVKLDVAYLENLSLEVAAHMRRLEEEVFRLAGRSFRLNSRDQLERVLFDELGLPPIGKTEKTGKRSTSAAVLEALREVHPIVDKILQYREMAKLKGTYIDRLPALVHPKTGRLHTRFNQTATATGRLSSSDPNLQNIPVRTPLGQKIRRAFVAEEGWRLVALDYRQIELRVLAHLSGDENLIRVFQEGKDIHTQTASWMFGLSAEAIDPLMRRAAKTINFGVLYGMSAFRLSQELGIPYEEAQAFIQKYFQSYPKVKAWIEKTLREGRTRGYVETLFGRRRYVPDLNARVKGKREAAERMAFNMPVQGTAADLMKLAMVRLFPQLREVGARMLLQVHDELLLEAPKERAEEVAALAKEVMEGVWPLAVPLEVEVGIGEDWLAAKG

SEQ ID NO: 6053 - DNA, 2523 bp, synthetic construct
  misc_feature 1..2523: note = Variant of DNA polymerase I from Thermus sp. strain 2.9
  source 1..2523: mol_type = other DNA
atgcaccatcatcatcatcatggcggtagcggcgtgttaccggtgttcgagcctaaaggtcgcgtgcttctggttgatggccatcatctcgcgtatcgtaacttctttgccctgaaaggattaaccaccagcctgggcgagccggtacagggtgtctacggctttgcaaagtcgctcctgaaagctctgaaagaagacggtgatgtggtgattgttgtctttgatgcgaaagcgccaagttttcgccacgaagcgtacgaagcttacaaagccgggcgtgctccaacgccggaagactttcctcgccaattggcgcttatgaaggaattagtggatttgcttggcctcgaacgcttggaagttcccggtttcgaggcagacgacgtattagcgactctcgcaaagaaagccgaacgtgagggctatgaagtccagatcttgacagcagatcgcgatcttttccagcttttatctccgcgcatctcggtgttacacccggaagggcatcgtatcaccccggaatggctctgggagaaatatggtttgcgtcccgaacaatgggtggattttcgcgccttagcaggcgatccgagcgacaatattccgggagttaaaggtatcggcgagaagacggcgctcaagctccttaaagaatgggggtcgttggagaacttgcttaagaatttagatcaggtcaaaccagagtcagtgcgtgagaagattcttgctcacctcgaagacctcaaattaagccgcgaattgtcccgtgtacgcaccgatttgccgctcgaagttgatttcggtcgccgccgcgaacctgactgggagggtcttaaagcgtttttagagcgtcttgaatttggttcgctcttgcatgaattcggccttttagaaagcccgttactggccgaagaagcaccttggccaccgcccgagggcgcgtttttaggttaccgtttgagtcgcccggaaccgatgtgggccgaattactggctcttgcagcgtctgcccagggacgtgtgtatcgcgcggaagaccctcatggtgcgctccgcggcctcttcgaagtccgtggactccttgccaaagacttagctgttgttgcattgcgcgaaggtcttgatttacctccgactgatgatccaatgcttcttgcgtacctcttggacccgtcaaacacgacgcccgaaggcgtagcccgtcgttacggcggcgagtggaccgaagatgcagcggggcgcgcgttattggccgaacgtttgcacgaaaatttattaggacgtttgcaaggcgaggaacgtctcctctggctttacgaagaagtggagaaaccattgagtcgcgtgctcgcgcatatggaagctaccggtgtcaaattagacgtggcgtatttggagaatctcagccttgaagttgctgcccacatgcgccgcttggaggaagaagtattccgtttagcaggccgttcctttcgccttaactctcgcgatcagttagaacgtgtgttgttcgatgaacttggtctccctcctatcggcaagacagagaagaccggtaaacgtagcacttcagcggcggttttagaagctcttcgcgaagtccatcccattgtggacaagatcttgcagtaccgcgaaatggcgaaattgaaaggcacctatattgaccgtcttccggcattagtccacccgaaaacgggacgcctccatacccgcttcaaccaaacagccacggcgaccggtcgtttgtcctcctctgatccaaaccttcagaatattccagtacgtaccccattgggccagaagatccgccgtgcgtttgtagctgaggagggttggcgtttagtggccctcgattatcgtcaaattgaattacgtgtccttgcccatctttctggcgatgagaacctcatccgcgtgtttcaggaaggcaaagacattcacactcaaacggcaagctggatgtttggattatcagctgaagcgatcgatcctttgatgcgtcgtgcagcgaagaccatcaatttcggtgttctctacggtatgagtgcctttcgtttgtcgcaggaattaggcattccctatgaagaagctcaggcgttcattcagaaatactttcaaagctatcccaaagttaaagcatggatcgagaagactctccgtgaaggccgcacacgtggttacgtagagaccttatttggacgtcgccgctatgttcccgatttaaacgctcgcgtgaaaggcaagcgtgaagccgccgaacgcatggcgttcaacatgcctgtacagggcacggcagctgacctcatgaaacttgcaatggtgcgcctttttccacaattgcgtgaagttggtgcccgcatgctcttgcaggtccacgatgaactcttgttagaagcgccaaaagagcgtgcggaagaggtggcagccctcgcgaaagaagttatggaaggcgtgtggcccttagcggtgcctcttgaagtcgaagttggtattggcgaggattggctggctgccaaagga

SEQ ID NO: 6054 - protein, 841 aa, synthetic construct
  REGION 1..841: note = Variant of DNA polymerase I from Thermus sp. strain 2.9
MHHHHHHGGSGVLPVFEPKGRVLLVDGHHLAYRNFFALKGLTTSLGEPVQGVYGFAKSLLKALKEDGDVVIVVFDAKAPSFRHEAYEAYKAGRAPTPEDFPRQLALMKELVDLLGLERLEVPGFEADDVLATLAKKAEREGYEVQILTADRDLFQLLSPRISVLHPEGHRITPEWLWEKYGLRPEQWVDFRALAGDPSDNIPGVKGIGEKTALKLLKEWGSLENLLKNLDQVKPESVREKILAHLEDLKLSRELSRVRTDLPLEVDFGRRREPDWEGLKAFLERLEFGSLLHEFGLLESPLLAEEAPWPPPEGAFLGYRLSRPEPMWAELLALAASAQGRVYRAEDPHGALRGLFEVRGLLAKDLAVVALREGLDLPPTDDPMLLAYLLDPSNTTPEGVARRYGGEWTEDAAGRALLAERLHENLLGRLQGEERLLWLYEEVEKPLSRVLAHMEATGVKLDVAYLENLSLEVAAHMRRLEEEVFRLAGRSFRLNSRDQLERVLFDELGLPPIGKTEKTGKRSTSAAVLEALREVHPIVDKILQYREMAKLKGTYIDRLPALVHPKTGRLHTRFNQTATATGRLSSSDPNLQNIPVRTPLGQKIRRAFVAEEGWRLVALDYRQIELRVLAHLSGDENLIRVFQEGKDIHTQTASWMFGLSAEAIDPLMRRAAKTINFGVLYGMSAFRLSQELGIPYEEAQAFIQKYFQSYPKVKAWIEKTLREGRTRGYVETLFGRRRYVPDLNARVKGKREAAERMAFNMPVQGTAADLMKLAMVRLFPQLREVGARMLLQVHDELLLEAPKERAEEVAALAKEVMEGVWPLAVPLEVEVGIGEDWLAAKG

SEQ ID NO: 6055 - DNA, 2523 bp, synthetic construct
  misc_feature 1..2523: note = Variant of DNA polymerase I from Thermus sp. strain 2.9
  source 1..2523: mol_type = other DNA
atgcaccatcatcatcatcatggcggtagcggcgtgttaccggtgttcgagcctaaaggtcgcgtgcttctggttgatggccatcatctcgcgtatcgtaacttctttgccctgaaaggattaaccaccagcctgggcgagccggtacagggtgtctacggctttgcaaagtcgctcctgaaagctctgaaagaagacggtgatgtggtgattgttgtctttgatgcgaaagcgccaagttttcgccacgaagcgtacgaagcttacaaagccgggcgtgctccaacgccggaagactttcctcgccaattggcgcttatgaaggaattagtggatttgcttggcctcgaacgcttggaagttcccggtttcgaggcagacgacgtattagcgactctcgcaaagaaagccgaacgtgagggctatgaagtccagatcttgacagcagatcgcgatcttttccagcttttatctccgcgcatctcggtgttacacccggaagggcatcgtatcaccccggaatggctctgggagaaatatggtttgcgtcccgaacaatgggtggattttcgcgccttagcaggcgatccgagcgacaatattccgggagttaaaggtatcggcgagaagacggcgctcaagctccttaaagaatgggggtcgttggagaacttgcttaagaatttagatcaggtcaaaccagagtcagtgcgtgagaagattcttgctcacctcgaagacctcaaattaagccgcgaattgtcccgtgtacgcaccgatttgccgctcgaagttgatttcggtcgccgccgcgaacctgactgggagggtcttaaagcgtttttagagcgtcttgaatttggttcgctcttgcatgaattcggccttttagaaagcccgttactggccgaagaagcaccttggccaccgcccgagggcgcgtttttaggttaccgtttgagtcgcccggaaccgatgtgggccgaattactggctcttgcagcgtctgcccagggacgtgtgtatcgcgcggaagaccctcatggtgcgctccgcggcctcttcgaagtccgtggactccttgccaaagacttagctgttgttgcattgcgcgaaggtcttgatttacctccgactgatgatccaatgcttcttgcgtacctcttggacccgtcaaacacgacgcccgaaggcgtagcccgtcgttacggcggcgagtggaccgaagatgcagcgaaacgcgcgttattggccgaacgtttgcacgaaaatttattaggacgtttgcaaggcgaggaacgtctctcgtggctttacgaagaagtggagaaaccattgagtcgcgtgctcgcgcatatggaagctaccggtgtcaaattagacgtggcgtatttggagaatctcagccttgaagttgctgcccacatgcgccgcttggaggaagaagtattccgtttagcaggccgttcctttcgccttaactctcgcgatcagttagaacgtgtgttgttcgatgaacttggtctccctcctatcggcaagacagagaagaccggtaaacgtagcacttcagcggcggttttagaagctcttcgcgaagtccatcccattgtggacaagatcttgcagtaccgcgaaatggcgaaattgaaaggcacctatattgaccgtcttccggcattagtccacccgaaaacgggacgcctccatacccgcttcaaccaaacagccacggcgaccggtcgtttgtcctcctctgatccaaaccttcagaatattccagtacgtaccccattgggccagaagatccgccgtgcgtttgtagctgaggagggttggcgtttagtggccctcgattatcgtcaaattgaattacgtgtccttgcccatctttctggcgatgagaacctcatccgcgtgtttcaggaaggcaaagacattcacactcaaacggcaagctggatgtttggattatcagctgaagcgatcgatcctttgatgcgtcgtgcagcgaagaccatcaatttcggtgttctctacggtatgagtgcctttcgtttgtcgcaggaattaggcattccctatgaagaagctcaggcgttcattcagaaatactttcaaagctatcccaaagttaaagcatggatcgagaagactctccgtgaaggccgcacacgtggttacgtagagaccttatttggacgtcgccgctatgttcccgatttaaacgctcgcgtgaaaggcaagcgtgaagccgccgaacgcatggcgttcaacatgcctgtacagggcacggcagctgacctcatgaaacttgcaatggtgcgcctttttccacaattgcgtgaagttggtgcccgcatgctcttgcaggtccacgatgaactcttgttagaagcgccaaaagagcgtgcggaagaggtggcagccctcgcgaaagaagttatggaaggcgtgtggcccttagcggtgcctcttgaagtcgaagttggtattggcgaggattggctggctgccaaagga

SEQ ID NO: 6056 - protein, 841 aa, synthetic construct
  REGION 1..841: note = Variant of DNA polymerase I from Thermus sp. strain 2.9
MHHHHHHGGSGVLPVFEPKGRVLLVDGHHLAYRNFFALKGLTTSLGEPVQGVYGFAKSLLKALKEDGDVVIVVFDAKAPSFRHEAYEAYKAGRAPTPEDFPRQLALMKELVDLLGLERLEVPGFEADDVLATLAKKAEREGYEVQILTADRDLFQLLSPRISVLHPEGHRITPEWLWEKYGLRPEQWVDFRALAGDPSDNIPGVKGIGEKTALKLLKEWGSLENLLKNLDQVKPESVREKILAHLEDLKLSRELSRVRTDLPLEVDFGRRREPDWEGLKAFLERLEFGSLLHEFGLLESPLLAEEAPWPPPEGAFLGYRLSRPEPMWAELLALAASAQGRVYRAEDPHGALRGLFEVRGLLAKDLAVVALREGLDLPPTDDPMLLAYLLDPSNTTPEGVARRYGGEWTEDAAKRALLAERLHENLLGRLQGEERLSWLYEEVEKPLSRVLAHMEATGVKLDVAYLENLSLEVAAHMRRLEEEVFRLAGRSFRLNSRDQLERVLFDELGLPPIGKTEKTGKRSTSAAVLEALREVHPIVDKILQYREMAKLKGTYIDRLPALVHPKTGRLHTRFNQTATATGRLSSSDPNLQNIPVRTPLGQKIRRAFVAEEGWRLVALDYRQIELRVLAHLSGDENLIRVFQEGKDIHTQTASWMFGLSAEAIDPLMRRAAKTINFGVLYGMSAFRLSQELGIPYEEAQAFIQKYFQSYPKVKAWIEKTLREGRTRGYVETLFGRRRYVPDLNARVKGKREAAERMAFNMPVQGTAADLMKLAMVRLFPQLREVGARMLLQVHDELLLEAPKERAEEVAALAKEVMEGVWPLAVPLEVEVGIGEDWLAAKG

SEQ ID NO: 6057 - DNA, 2523 bp, synthetic construct
  misc_feature 1..2523: note = Variant of DNA polymerase I from Thermus sp. strain 2.9
  source 1..2523: mol_type = other DNA
atgcaccatcatcatcatcatggcggtagcggcgtgttaccggtgttcgagcctaaaggtcgcgtgcttctggttgatggccatcatctcgcgtatcgtaacttctttgccctgaaaggattaaccaccagcctgggcgagccggtacagggtgtctacggctttgcaaagtcgctcctgaaagctctgaaagaagacggtgatgtggtgattgttgtctttgatgcgaaagcgccaagttttcgccacgaagcgtacgaagcttacaaagccgggcgtgctccaacgccggaagactttcctcgccaattggcgcttatgaaggaattagtggatttgcttggcctcgaacgcttggaagttcccggtttcgaggcagacgacgtattagcgactctcgcaaagaaagccgaacgtgagggctatgaagtccagatcttgacagcagatcgcgatcttttccagcttttatctccgcgcatctcggtgttacacccggaagggcatcgtatcaccccggaatggctctgggagaaatatggtttgcgtcccgaacaatgggtggattttcgcgccttagcaggcgatccgagcgacaatattccgggagttaaaggtatcggcgagaagacggcgctcaagctccttaaagaatgggggtcgttggagaacttgcttaagaatttagatcaggtcaaaccagagtcagtgcgtgagaagattcttgctcacctcgaagacctcaaattaagccgcgaattgtcccgtgtacgcaccgatttgccgctcgaagttgatttcggtcgccgccgcgaacctgactgggagggtcttaaagcgtttttagagcgtcttgaatttggttcgctcttgcatgaattcggccttttagaaagcccgttactggccgaagaagcaccttggccaccgcccgagggcgcgtttttaggttaccgtttgagtcgcccggaaccgatgtgggccgaattactggctcttgcagcgtctgcccagggacgtgtgtatcgcgcggaagaccctcatggtgcgctccgcggcctcttcgaagtccgtggactccttgccaaagacttagctgttgttgcattgcgcgaaggtcttgatttacctccgactgatgatccaatgcttcttgcgtacctcttggacccgtcaaacacgacgcccgaaggcgtagcccgtcgttacggcggcgagtggaccgaagatgcagcgaaacgcgcgttattggccgaacgtttgcacgaaaatttattaggacgtttgcaaggcgaggaacgtctcctctggctttacgaagaagtggagaaaccattgagtcgcgtgctcgcgcatatggaagctaccggtgtcaaattagacgtggcgtatttggagaatctcagccttgaagttgctgcccacatgcgccgcttggaggaagaagtattccgtttagcaggccgttcctttcgccttaactctcgcgatcagttagaacgtgtgttgttcgatgaacttggtctccctcctatcggcaagacagagaagaccggtaaacgtagcacttcagcggcggttttagaagctcttcgcgaagtccatcccattgtggacaagatcttgcagtaccgcgaaatggcgaaattgaaaggcacctatattgaccgtcttccggcattagtccacccgaaaacgggacgcctccatacccgcttcaaccaaacagccacggcgaccggtcgtttgtcctcctctgatccaaaccttcagaatattccagtacgtaccccattgggccagaagatccgccgtgcgtttgtagctgaggagggttggcgtttagtggccctcgattatcgtcaaattgaattacgtgtccttgcccatctttctggcgatgagaacctcatccgcgtgtttcaggaaggcaaagacattcacactcaaacggcaagctggatgtttggattatcagctgaagcgatcgatcctttgatgcgtcgtgcagcgaagaccatcaatttcggtgttctctacggtatgagtgcctttcgtttgtcgcaggaattaggcattccctatgaagaagctcaggcgttcattcagaaatactttcaaagctatcccaaagttaaagcatggatcgagaagactctccgtgaaggccgcacacgtggttacgtagagaccttatttggacgtcgccgctatgttcccgatttaaacgctcgcgtgaaaggcaagcgtgaagccgccgaacgcatggcgttcaacatgcctgtacagggcacggcagctgacctcatgaaacttgcaatggtgcgcctttttccacaattgcgtgaagttggtgcccgcatgctcttgcaggtccacgatgaactcttgttagaagcgccaaaagagcgtgcggaagaggtggcagccctcgcgaaagaagttatggaaggcgtgtggcccttagcggtgcctcttgaagtcgaagttggtattggcgaggattggctggctaggaaagga

SEQ ID NO: 6058 - protein, 841 aa, synthetic construct
  REGION 1..841: note = Variant of DNA polymerase I from Thermus sp. strain 2.9
MHHHHHHGGSGVLPVFEPKGRVLLVDGHHLAYRNFFALKGLTTSLGEPVQGVYGFAKSLLKALKEDGDVVIVVFDAKAPSFRHEAYEAYKAGRAPTPEDFPRQLALMKELVDLLGLERLEVPGFEADDVLATLAKKAEREGYEVQILTADRDLFQLLSPRISVLHPEGHRITPEWLWEKYGLRPEQWVDFRALAGDPSDNIPGVKGIGEKTALKLLKEWGSLENLLKNLDQVKPESVREKILAHLEDLKLSRELSRVRTDLPLEVDFGRRREPDWEGLKAFLERLEFGSLLHEFGLLESPLLAEEAPWPPPEGAFLGYRLSRPEPMWAELLALAASAQGRVYRAEDPHGALRGLFEVRGLLAKDLAVVALREGLDLPPTDDPMLLAYLLDPSNTTPEGVARRYGGEWTEDAAKRALLAERLHENLLGRLQGEERLLWLYEEVEKPLSRVLAHMEATGVKLDVAYLENLSLEVAAHMRRLEEEVFRLAGRSFRLNSRDQLERVLFDELGLPPIGKTEKTGKRSTSAAVLEALREVHPIVDKILQYREMAKLKGTYIDRLPALVHPKTGRLHTRFNQTATATGRLSSSDPNLQNIPVRTPLGQKIRRAFVAEEGWRLVALDYRQIELRVLAHLSGDENLIRVFQEGKDIHTQTASWMFGLSAEAIDPLMRRAAKTINFGVLYGMSAFRLSQELGIPYEEAQAFIQKYFQSYPKVKAWIEKTLREGRTRGYVETLFGRRRYVPDLNARVKGKREAAERMAFNMPVQGTAADLMKLAMVRLFPQLREVGARMLLQVHDELLLEAPKERAEEVAALAKEVMEGVWPLAVPLEVEVGIGEDWLARKG

SEQ ID NO: 6059 - DNA, 2523 bp, synthetic construct
  misc_feature 1..2523: note = Variant of DNA polymerase I from Thermus sp. strain 2.9
  source 1..2523: mol_type = other DNA
atgcaccatcatcatcatcatggcggtagcggcgtgttaccggtgttcgagcctaaaggtcgcgtgcttctggttgatggccatcatctcgcgtatcgtaacttctttgccctgaaaggattaaccaccagcctgggcgagccggtacagggtgtctacggctttgcaaagtcgctcctgaaagctctgaaagaagacggtgatgtggtgattgttgtctttgatgcgaaagcgccaagttttcgccacgaagcgtacgaagcttacaaagccgggcgtgctccaacgccggaagactttcctcgccaattggcgcttatgaaggaattagtggatttgcttggcctcgaacgcttggaagttcccggtttcgaggcagacgacgtattagcgactctcgcaaagaaagccgaacgtgagggctatgaagtccagatcttgacagcagatcgcgatcttttccagcttttatctccgcgcatctcggtgttacacccggaagggcatcgtatcaccccggaatggctctgggagaaatatggtttgcgtcccgaacaatgggtggattttcgcgccttagcaggcgatccgagcgacaatattccgggagttaaaggtatcggcgagaagacggcgctcaagctccttaaagaatgggggtcgttggagaacttgcttaagaatttagatcaggtcaaaccagagtcagtgcgtgagaagattcttgctcacctcgaagacctcaaattaagccgcgaattgtcccgtgtacgcaccgatttgccgctcgaagttgatttcggtcgccgccgcgaacctgactgggagggtcttaaagcgtttttagagcgtcttgaatttggttcgctcttgcatgaattcggccttttagaaagcccgttactggccgaagaagcaccttggccaccgcccgagggcgcgtttttaggttaccgtttgagtcgcccggaaccgatgtgggccgaattactggctcttgcagcgtctgcccagggacgtgtgtatcgcgcggaagaccctcatggtgcgctccgcggcctcttcgaagtccgtggactccttgccaaagacttagctgttgttgcattgcgcgaaggtcttgatttacctccgactgatgatccaatgcttcttgcgtacctcttggacccgtcaaacacgacgcccgaaggcgtagcccgtcgttacggcggcgagtggaccgaagatgcagcgaaacgcgcgttattggccgaacgtttgcacgaaaatttattaggacgtttgcaaggcgaggaacgtctcctctggctttacgaagaagtggagaaaccattgagtcgcgtgctcgcgcatatggaagctaccggtgtcaaattagacgtggcgtatttggagaatctcagccttgaagttgctgcccacatgcgccgcttggaggaagaagtattccgtttagcaggccgttcctttcgccttaactctcgcgatcagttagaacgtgtgttgttcgatgaacttggtctccctcctatcggcaagacagagaagaccggtaaacgtagcacttcagcggcggttttagaagctcttcgcgaagtccatcccattgtggacaagatcttgcagtaccgcgaaatggcgaaattgaaaggcacctatattgaccgtcttccggcattagtccacccgaaaacgggacgcctccatacccgcttcaaccaaacagccacggcgaccggtcgtttgtcctcctctgatccaaaccttcagaatattccagtacgtaccccattgggccagaagatccgccgtgcgtttgtagctgaggagggttggcgtttagtggccctcgattatcgtcaaattgaattacgtgtccttgcccatctttctggcgatgagaacctcatccgcgtgtttcaggaaggcaaagacattcacactcaaacggcaagctggatgtttggattatcagctgaagcgatcgatcctttgatgcgtcgtgcagcgaagaccatcaatttcggtgttctctacggtatgagtgcctttcgtttgtcgcaggaattaggcattccctatgaagaagctcaggcgttcattcagaaatactttcaaagctatcccaaagttaaagcatggatcgagaagactctccgtgaaggccgcacacgtggttacgtagagaccttatttggacgtcgccgctatgttcccgatttaaacgctcgcgtgaaaggcaagcgtgaagccgccgaacgcatggcgttcaacatgcctgtacagggcacggcagctgacctcatgaaacttgcaatggtgcgcctttttccacaattgcgtgaagttggtgcccgcatgctcttgcaggtccacgatgatctcttgttagaagcgccaaaagagcgtgcggaagaggtggcagccctcgcgaaagaagttatggaaggcgtgtggcccttagcggtgcctcttgaagtcgaagttggtattggcgaggattggctggctgccaaagga

SEQ ID NO: 6060 - protein, 841 aa, synthetic construct
  REGION 1..841: note = Variant of DNA polymerase I from Thermus sp. strain 2.9
MHHHHHHGGSGVLPVFEPKGRVLLVDGHHLAYRNFFALKGLTTSLGEPVQGVYGFAKSLLKALKEDGDVVIVVFDAKAPSFRHEAYEAYKAGRAPTPEDFPRQLALMKELVDLLGLERLEVPGFEADDVLATLAKKAEREGYEVQILTADRDLFQLLSPRISVLHPEGHRITPEWLWEKYGLRPEQWVDFRALAGDPSDNIPGVKGIGEKTALKLLKEWGSLENLLKNLDQVKPESVREKILAHLEDLKLSRELSRVRTDLPLEVDFGRRREPDWEGLKAFLERLEFGSLLHEFGLLESPLLAEEAPWPPPEGAFLGYRLSRPEPMWAELLALAASAQGRVYRAEDPHGALRGLFEVRGLLAKDLAVVALREGLDLPPTDDPMLLAYLLDPSNTTPEGVARRYGGEWTEDAAKRALLAERLHENLLGRLQGEERLLWLYEEVEKPLSRVLAHMEATGVKLDVAYLENLSLEVAAHMRRLEEEVFRLAGRSFRLNSRDQLERVLFDELGLPPIGKTEKTGKRSTSAAVLEALREVHPIVDKILQYREMAKLKGTYIDRLPALVHPKTGRLHTRFNQTATATGRLSSSDPNLQNIPVRTPLGQKIRRAFVAEEGWRLVALDYRQIELRVLAHLSGDENLIRVFQEGKDIHTQTASWMFGLSAEAIDPLMRRAAKTINFGVLYGMSAFRLSQELGIPYEEAQAFIQKYFQSYPKVKAWIEKTLREGRTRGYVETLFGRRRYVPDLNARVKGKREAAERMAFNMPVQGTAADLMKLAMVRLFPQLREVGARMLLQVHDDLLLEAPKERAEEVAALAKEVMEGVWPLAVPLEVEVGIGEDWLAAKG

SEQ ID NO: 6061 - DNA, 2523 bp, synthetic construct
  misc_feature 1..2523: note = Variant of DNA polymerase I from Thermus sp. strain 2.9
  source 1..2523: mol_type = other DNA
atgcaccatcatcatcatcatggcggtagcggcgtgttaccggtgttcgagcctaaaggtcgcgtgcttctggttgatggccatcatctcgcgtatcgtaacttctttgccctgaaaggattaaccaccagcctgggcgagccggtacagggtgtctacggctttgcaaagtcgctcctgaaagctctgaaagaagacggtgatgtggtgattgttgtctttgatgcgaaagcgccaagttttcgccacgaagcgtacgaagcttacaaagccgggcgtgctccaacgccggaagactttcctcgccaattggcgcttatgaaggaattagtggatttgcttggcctcgaacgcttggaagttcccggtttcgaggcagacgacgtattagcgactctcgcaaagaaagccgaacgtgagggctatgaagtccagatcttgacagcagatcgcgatcttttccagcttttatctccgcgcatctcggtgttacacccggaagggcatcgtatcaccccggaatggctctgggagaaatatggtttgcgtcccgaacaatgggtggattttcgcgccttagcaggcgatccgagcgacaatattccgggagttaaaggtatcggcgagaagacggcgctcaagctccttaaagaatgggggtcgttggagaacttgcttaagaatttagatcaggtcaaaccagagtcagtgcgtgagaagattcttgctcacctcgaagacctcaaattaagccgcgaattgtcccgtgtacgcaccgatttgccgctcgaagttgatttcggtcgccgccgcgaacctgactgggagggtcttaaagcgtttttagagcgtcttgaatttggttcgctcttgcatgaattcggccttttagaaagcccgttactggccgaagaagcaccttggccaccgcccgagggcgcgtttttaggttaccgtttgagtcgcccggaaccgatgtgggccgaattactggctcttgcagcgtctgcccagggacgtgtgtatcgcgcggaagaccctcatggtgcgctccgcggcctcttcgaagtccgtggactccttgccaaagacttagctgttgttgcattgcgcgaaggtcttgatttacctccgactgatgatccaatgcttcttgcgtacctcttggacccgtcaaacacgacgcccgaaggcgtagcccgtcgttacggcggcgagtggaccgaagatgcagcgaaacgcgcgttattggccgaacgtttgcacgaaaatttattaggacgtttgcaaggcgaggaacgtctcctctggctttacgaagaagtggagaaaccattgagtcgcgtgctcgcgcatatggaagctaccggtgtcaaattagacgtggcgtatttggagaatctcagccttgaagttgctgcccacatgcgccgcttggaggaagaagtattccgtttagcaggccgttcctttcgccttaactctcgcgatcagttagaacgtgtgttgttcgatgaacttggtctccctcctatcggcaagacagagaagaccggtaaacgtagcacttcagcggcggttttagaagctcttcgcgaagtccatcccattgtggacaagatcttgcagtaccgcgaaatggcgaaattgaaaggcacctatattgaccgtcttccggcattagtccacccgaaaacgggacgcctccatacccgcttcaaccaaacagccacggcgaccggtcgtttgtcctcctctgatccaaaccttcagaatattccagtacgtaccccattgggccagaagatccgccgtgcgtttgtagctgaggagggttgggggttagtggccctcgattatcgtcaaattgaattacgtgtccttgcccatctttctggcgatgagaacctcatccgcgtgtttcaggaaggcaaagacattcacactcaaacggcaagctggatgtttggattatcagctgaagcgatcgatcctttgatgcgtcgtgcagcgaagaccatcaatttcggtgttctctacggtatgagtgcctttcgtttgtcgcaggaattaggcattccctatgaagaagctcaggcgttcattcagaaatactttcaaagctatcccaaagttaaagcatggatcgagaagactctccgtgaaggccgcacacgtggttacgtagagaccttatttggacgtcgccgctatgttcccgatttaaacgctcgcgtgaaaggcaagcgtgaagccgccgaacgcatggcgttcaacatgcctgtacagggcacggcagctgacctcatgaaacttgcaatggtgcgcctttttccacaattgcgtgaagttggtgcccgcatgctcttgcaggtccacgatgaactcttgttagaagcgccaaaagagcgtgcggaagaggtggcagccctcgcgaaagaagttatggaaggcgtgtggcccttagcggtgcctcttgaagtcgaagttggtattggcgaggattggctggctgccaaagga

SEQ ID NO: 6062 - protein, 841 aa, synthetic construct
  REGION 1..841: note = Variant of DNA polymerase I from Thermus sp. strain 2.9
MHHHHHHGGSGVLPVFEPKGRVLLVDGHHLAYRNFFALKGLTTSLGEPVQGVYGFAKSLLKALKEDGDVVIVVFDAKAPSFRHEAYEAYKAGRAPTPEDFPRQLALMKELVDLLGLERLEVPGFEADDVLATLAKKAEREGYEVQILTADRDLFQLLSPRISVLHPEGHRITPEWLWEKYGLRPEQWVDFRALAGDPSDNIPGVKGIGEKTALKLLKEWGSLENLLKNLDQVKPESVREKILAHLEDLKLSRELSRVRTDLPLEVDFGRRREPDWEGLKAFLERLEFGSLLHEFGLLESPLLAEEAPWPPPEGAFLGYRLSRPEPMWAELLALAASAQGRVYRAEDPHGALRGLFEVRGLLAKDLAVVALREGLDLPPTDDPMLLAYLLDPSNTTPEGVARRYGGEWTEDAAKRALLAERLHENLLGRLQGEERLLWLYEEVEKPLSRVLAHMEATGVKLDVAYLENLSLEVAAHMRRLEEEVFRLAGRSFRLNSRDQLERVLFDELGLPPIGKTEKTGKRSTSAAVLEALREVHPIVDKILQYREMAKLKGTYIDRLPALVHPKTGRLHTRFNQTATATGRLSSSDPNLQNIPVRTPLGQKIRRAFVAEEGWGLVALDYRQIELRVLAHLSGDENLIRVFQEGKDIHTQTASWMFGLSAEAIDPLMRRAAKTINFGVLYGMSAFRLSQELGIPYEEAQAFIQKYFQSYPKVKAWIEKTLREGRTRGYVETLFGRRRYVPDLNARVKGKREAAERMAFNMPVQGTAADLMKLAMVRLFPQLREVGARMLLQVHDELLLEAPKERAEEVAALAKEVMEGVWPLAVPLEVEVGIGEDWLAAKG

SEQ ID NO: 6063 - DNA, 2523 bp, synthetic construct
  misc_feature 1..2523: note = Variant of DNA polymerase I from Thermus sp. strain 2.9
  source 1..2523: mol_type = other DNA
atgcaccatcatcatcatcatggcggtagcggcgtgttaccggtgttcgagcctaaaggtcgcgtgcttctggttgatggccatcatctcgcgtatcgtaacttctttgccctgaaaggattaaccaccagcctgggcgagccggtacagggtgtctacggctttgcaaagtcgctcctgaaagctctgaaagaagacggtgatgtggtgattgttgtctttgatgcgaaagcgccaagttttcgccacgaagcgtacgaagcttacaaagccgggcgtgctccaacgccggaagactttcctcgccaattggcgcttatgaaggaattagtggatttgcttggcctcgaacgcttggaagttcccggtttcgaggcagacgacgtattagcgactctcgcaaagaaagccgaacgtgagggctatgaagtccagatcttgacagcagatcgcgatcttttccagcttttatctccgcgcatctcggtgttacacccggaagggcatcgtatcaccccggaatggctctgggagaaatatggtttgcgtcccgaacaatgggtggattttcgcgccttagcaggcgatccgagcgacaatattccgggagttaaaggtatcggcgagaagacggcgctcaagctccttaaagaatgggggtcgttggagaacttgcttaagaatttagatcaggtcaaaccagagtcagtgcgtgagaagattcttgctcacctcgaagacctcaaattaagccgcgaattgtcccgtgtacgcaccgatttgccgctcgaagttgatttcggtcgccgccgcgaacctgactgggagggtcttaaagcgtttttagagcgtcttgaatttggttcgctcttgcatgaattcggccttttagaaagcccgttactggccgaagaagcaccttggccaccgcccgagggcgcgtttttaggttaccgtttgagtcgcccggaaccgatgtgggccgaattactggctcttgcagcgtctgcccagggacgtgtgtatcgcgcggaagaccctcatggtgcgctccgcggcctcttcgaagtccgtggactccttgccaaagacttagctgttgttgcattgcgcgaaggtcttgatttacctccgactgatgatccaatgcttcttgcgtacctcttggacccgtcaaacacgacgcccgaaggcgtagcccgtcgttacggcggcgagtggaccgaagatgcagcgaaacgcgcgttattggccgaacgtttgcacgaaaatttattaggacgtttgcaaggcgaggaacgtctcctctggctttacgaagaagtggagaaaccattgagtcgcgtgctcgcgcatatggaagctaccggtgtcaaattagacgtggcgtatttggagaatctcagccttgaagttgctgcccacatgcgccgcttggaggaagaagtattccgtttagcaggccgttcctttcgccttaactctcgcgatcagttagaacgtgtgttgttcgatgaacttggtctccctcctatcggcaagacagagaagaccggtaaacgtagcacttcagcggcggttttagaagctcttcgcgaagtccatcccattgtggacaagatcttgcagtaccgcgaaatggcgaaattgaaaggcacctatattgaccgtcttccggcattagtccacccgaaaacgggacgcctccatacccgcttcaaccaaacagccacggcgaccggtcgtttgtcctcctctgatccaaaccttcagaatattccagtacgtaccccattgggccagaagatccgccgtgcgtttgtagctgaggagggttggcgtttagtggccctcgattatcgtcaaattgaattacgtgtccttgcccatctttctggcgatgagaacctcatccgcgtgtttcaggaaggcaaagacattcacactcaaacggcaagctggatgtttggattatcagctgaagcgatcgatcctttgatgcgtcgtgcagcgaagaccatcaatttcggtgttctctacggtatgagtgcctttcgtttgtcgcaggaattaggcattccctatgaagaagctcaggcgttcattcagaaatactttcaaagctatcccaaagttaaagcatggatcgagaagactctccgtgaaggccgcacacgtggttacgtagagaccttatttggacgtcgccgctatgttcccgatttaaacgctgtggtgaaaggcaagcgtgaagccgccgaacgcatggcgttcaacatgcctgtacagggcacggcagctgacctcatgaaacttgcaatggtgcgcctttttccacaattgcgtgaagttggtgcccgcatgctcttgcaggtccacgatgaactcttgttagaagcgccaaaagagcgtgcggaagaggtggcagccctcgcgaaagaagttatggaaggcgtgtggcccttagcggtgcctcttgaagtcgaagttggtattggcgaggattggctggctgccaaagga

SEQ ID NO: 6064 - protein, 841 aa, synthetic construct
  REGION 1..841: note = Variant of DNA polymerase I from Thermus sp. strain 2.9
MHHHHHHGGSGVLPVFEPKGRVLLVDGHHLAYRNFFALKGLTTSLGEPVQGVYGFAKSLLKALKEDGDVVIVVFDAKAPSFRHEAYEAYKAGRAPTPEDFPRQLALMKELVDLLGLERLEVPGFEADDVLATLAKKAEREGYEVQILTADRDLFQLLSPRISVLHPEGHRITPEWLWEKYGLRPEQWVDFRALAGDPSDNIPGVKGIGEKTALKLLKEWGSLENLLKNLDQVKPESVREKILAHLEDLKLSRELSRVRTDLPLEVDFGRRREPDWEGLKAFLERLEFGSLLHEFGLLESPLLAEEAPWPPPEGAFLGYRLSRPEPMWAELLALAASAQGRVYRAEDPHGALRGLFEVRGLLAKDLAVVALREGLDLPPTDDPMLLAYLLDPSNTTPEGVARRYGGEWTEDAAKRALLAERLHENLLGRLQGEERLLWLYEEVEKPLSRVLAHMEATGVKLDVAYLENLSLEVAAHMRRLEEEVFRLAGRSFRLNSRDQLERVLFDELGLPPIGKTEKTGKRSTSAAVLEALREVHPIVDKILQYREMAKLKGTYIDRLPALVHPKTGRLHTRFNQTATATGRLSSSDPNLQNIPVRTPLGQKIRRAFVAEEGWRLVALDYRQIELRVLAHLSGDENLIRVFQEGKDIHTQTASWMFGLSAEAIDPLMRRAAKTINFGVLYGMSAFRLSQELGIPYEEAQAFIQKYFQSYPKVKAWIEKTLREGRTRGYVETLFGRRRYVPDLNAVVKGKREAAERMAFNMPVQGTAADLMKLAMVRLFPQLREVGARMLLQVHDELLLEAPKERAEEVAALAKEVMEGVWPLAVPLEVEVGIGEDWLAAKG

SEQ ID NO: 6065 - DNA, 2523 bp, synthetic construct
  misc_feature 1..2523: note = Variant of DNA polymerase I from Thermus sp. strain 2.9
  source 1..2523: mol_type = other DNA
atgcaccatcatcatcatcatggcggtagcggcgtgttaccggtgttcgagcctaaaggtcgcgtgcttctggttgatggccatcatctcgcgtatcgtaacttctttgccctgaaaggattaaccaccagcctgggcgagccggtacagggtgtctacggctttgcaaagtcgctcctgaaagctctgaaagaagacggtgatgtggtgattgttgtctttgatgcgaaagcgccaagttttcgccacgaagcgtacgaagcttacaaagccgggcgtgctccaacgccggaagactttcctcgccaattggcgcttatgaaggaattagtggatttgcttggcctcgaacgcttggaagttcccggtttcgaggcagacgacgtattagcgactctcgcaaagaaagccgaacgtgagggctatgaagtccagatcttgacagcagatcgcgatcttttccagcttttatctccgcgcatctcggtgttacacccggaagggcatcgtatcaccccggaatggctctgggagaaatatggtttgcgtcccgaacaatgggtggattttcgcgccttagcaggcgatccgagcgacaatattccgggagttaaaggtatcggcgagaagacggcgctcaagctccttaaagaatgggggtcgttggagaacttgcttaagaatttagatcaggtcaaaccagagtcagtgcgtgagaagattcttgctcacctcgaagacctcaaattaagccgcgaattgtcccgtgtacgcaccgatttgccgctcgaagttgatttcggtcgccgccgcgaacctgactgggagggtcttaaagcgtttttagagcgtcttgaatttggttcgctcttgcatgaattcggccttttagaaagcccgttactggccgaagaagcaccttggccaccgcccgagggcgcgtttttaggttaccgtttgagtcgcccggaaccgatgtgggccgaattactggctcttgcagcgtctgcccagggacgtgtgtatcgcgcggaagaccctcatggtgcgctccgcggcctcttcgaagtccgtggcctccttgccaaagacttagctgttgttgcattgcgcgaaggtcttgatttacctccgactgatgatccaatgcttcttgcgtacctcttggacccgtcaaacacgacgcccgaaggcgtagcccgtcgttacggcggcgagtggaccgaagatgcaggcaaacgcgcgttattggccgaacgtttgcacgaaaatttattaggacgtttgcaaggcgaggagcgtctcctgtggctttacgaagaagtggagaaaccattgagtcgcgtgctcgcgcatatggaagctaccggtgtcaaattagacgtggcgtatttggagaatctcagccttgaagttgctgcccacatgcgccgcttggaggaagaagtattccgtttagcaggccgttcctttcgccttaactctcgcgatcagttagaacgtgtgttgttcgatgaacttggtctccctcctatcggcaagacagagaagaccggtaaacgtagcacttcagcggcggttttagaagctcttcgcgaagtccatcccattgtggacaagatcttgcagtaccgcgaaatggcgaaattgaaaggcacctatattgaccgtcttccggcattagtccacccgaaaacgggacgcctccatacccgcttcaaccaaacagccacggcgaccggtcgtttgtcctcctctgatccaaaccttcagaatattccagtacgtaccccattgggccagaagatccgccgtgcgtttgtagctgagaagggttgggcgttagtggccctcgattatcgtcaaattgaattacgtgtccttgcccatctttctggcgatgagaacctcatccgcgtgtttcaggaaggcaaagacattcacactcaaacggcaagctggatgtttggattatcagctgaagcgatcgatcctttgatgcgtcgtgcagcgaagaccatcaatttcggtgttctctacggtatgagtgcctttcgtttgtcgcaggaattaggcattccctatgaagaagctcaggcgttcattcagaaatactttcaaagctatcccaaagttaaagcatggatcgagaagactctccgtgaaggccgcacacgtggttacgtagagaccttatttggacgtcgccgctatgttcccgatttaaacgctcgcgtgaaaggcaagcgtgaagccgccgaacgcatggcgttcaacatgcctgtacagggcacggcagctgacctcatgaaacttgcaatggtgcgcctttttccacaattgcgtgaagttggtgcccgcatgctgttgcaggtccacgatgaactcttgttagaagcgccaaaagagcgtgcggaagaggtggcagccctcgcgaaagaagttatggaaggcgtgtggcccttagcggtgcctcttgaagtcgaagttggtattggcgaggattggctggctgccaaagga

SEQ ID NO: 6066 - protein, 841 aa, synthetic construct
  REGION 1..841: note = Variant of DNA polymerase I from Thermus sp. strain 2.9
MHHHHHHGGSGVLPVFEPKGRVLLVDGHHLAYRNFFALKGLTTSLGEPVQGVYGFAKSLLKALKEDGDVVIVVFDAKAPSFRHEAYEAYKAGRAPTPEDFPRQLALMKELVDLLGLERLEVPGFEADDVLATLAKKAEREGYEVQILTADRDLFQLLSPRISVLHPEGHRITPEWLWEKYGLRPEQWVDFRALAGDPSDNIPGVKGIGEKTALKLLKEWGSLENLLKNLDQVKPESVREKILAHLEDLKLSRELSRVRTDLPLEVDFGRRREPDWEGLKAFLERLEFGSLLHEFGLLESPLLAEEAPWPPPEGAFLGYRLSRPEPMWAELLALAASAQGRVYRAEDPHGALRGLFEVRGLLAKDLAVVALREGLDLPPTDDPMLLAYLLDPSNTTPEGVARRYGGEWTEDAGKRALLAERLHENLLGRLQGEERLLWLYEEVEKPLSRVLAHMEATGVKLDVAYLENLSLEVAAHMRRLEEEVFRLAGRSFRLNSRDQLERVLFDELGLPPIGKTEKTGKRSTSAAVLEALREVHPIVDKILQYREMAKLKGTYIDRLPALVHPKTGRLHTRFNQTATATGRLSSSDPNLQNIPVRTPLGQKIRRAFVAEKGWALVALDYRQIELRVLAHLSGDENLIRVFQEGKDIHTQTASWMFGLSAEAIDPLMRRAAKTINFGVLYGMSAFRLSQELGIPYEEAQAFIQKYFQSYPKVKAWIEKTLREGRTRGYVETLFGRRRYVPDLNARVKGKREAAERMAFNMPVQGTAADLMKLAMVRLFPQLREVGARMLLQVHDELLLEAPKERAEEVAALAKEVMEGVWPLAVPLEVEVGIGEDWLAAKG

SEQ ID NO: 6067 - DNA, 2523 bp, synthetic construct
  misc_feature 1..2523: note = Variant of DNA polymerase I from Thermus sp. strain 2.9
  source 1..2523: mol_type = other DNA
atgcaccatcatcatcatcatggcggtagcggcgtgttaccggtgttcgagcctaaaggtcgcgtgcttctggttgatggccatcatctcgcgtatcgtaacttctttgccctgaaaggattaaccaccagcctgggcgagccggtacagggtgtctacggctttgcaaagtcgctcctgaaagctctgaaagaagacggtgatgtggtgattgttgtctttgatgcgaaagcgccaagttttcgccacgaagcgtacgaagcttacaaagccgggcgtgctccaacgccggaagactttcctcgccaattggcgcttatgaaggaattagtggatttgcttggcctcgaacgcttggaagttcccggtttcgaggcagacgacgtattagcgactctcgcaaagaaagccgaacgtgagggctatgaagtccagatcttgacagcagatcgcgatcttttccagcttttatctccgcgcatctcggtgttacacccggaagggcatcgtatcaccccggaatggctctgggagaaatatggtttgcgtcccgaacaatgggtggattttcgcgccttagcaggcgatccgagcgacaatattccgggagttaaaggtatcggcgagaagacggcgctcaagctccttaaagaatgggggtcgttggagaacttgcttaagaatttagatcaggtcaaaccagagtcagtgcgtgagaagattcttgctcacctcgaagacctcaaattaagccgcgaattgtcccgtgtacgcaccgatttgccgctcgaagttgatttcggtcgccgccgcgaacctgactgggagggtcttaaagcgtttttagagcgtcttgaatttggttcgctcttgcatgaattcggccttttagaaagcccgttactggccgaagaagcaccttggccaccgcccgagggcgcgtttttaggttaccgtttgagtcgcccggaaccgatgtgggccgaattactggctcttgcagcgtctgcccagggacgtgtgtatcgcgcggaagaccctcatggtgcgctccgcggcctcttcgaagtccgtggactccttgccaaagacttagctgttgttgcattgcgcgaaggtcttgatttacctccgactgatgatccaatgcttcttgcgtacctcttggacccgtcaaacacgacgcccgaaggcgtagcccgtcgttacggcggcgagtggaccgaagatgcagcgaaacgcgcgttattggccgaacgtttgcacgaaaatttattaggacgtttgcaaggcgaggcgcgtctccgttggctttacgaagaagtggagaaaccattgagtcgcgtgctcgcgcatatggaagctaccggtgtcaaattagacgtggcgtatttggagaatctcagccttgaagttgctgcccacatgcgccgcttggaggaagaagtattccgtttagcaggccgttcctttcgccttaactctcgcgatcagttagaacgtgtgttgttcgatgaacttggtctccctcctatcggcaagacagagaagaccggtaaacgtagcacttcagcggcggttttagaagctcttcgcgaagtccatcccattgtggacaagatcttgcagtaccgcgaaatggcgaaattgaaaggcacctatattgaccgtcttccggcattagtccacccgaaaacgggacgcctccatacccgcttcaaccaaacagccacggcgaccggtcgtttgtcctcctctgatccaaaccttcagaatattccagtacgtaccccattgggccagaagatccgccgtgcgtttgtagctgagccgggttgggcgttagtggccctcgattatcgtcaaattgaattacgtgtccttgcccatctttctggcgatgagaacctcatccgcgtgtttcaggaaggcaaagacattcacactcaaacggcaagctggatgtttggattatcagctgaagcgatcgatcctttgatgcgtcgtgcagcgaagaccatcaatttcggtgttctctacggtatgagtgcctttcgtttgtcgcaggaattaggcattccctatgaagaagctcaggcgttcattcagaaatactttcaaagctatcccaaagttaaagcatggatcgagaagactctccgtgaaggccgcacacgtggttacgtagagaccttatttggacgtcgccgctatgttcccgatttaaacgctcgcgtgaaaggcaagcgtgaagccgccgaacgcatggcgttcaacatgcctgtacagggcacggcagctgacctcatgaaacttgcaatggtgcgcctttttccacaattgcgtgaagttggtgcccgcatgctgttgcaggtccacgatgaactcttgttagaagcgccaaaagagcgtgcggaagaggtggcagccctcgcgaaagaagttatggaaggcgtgtggcccttagcggtgcctcttgaagtcgaagttggtattggcgaggattggctggctgccaaagga

SEQ ID NO: 6068 - protein, 841 aa, synthetic construct
  REGION 1..841: note = Variant of DNA polymerase I from Thermus sp. strain 2.9
MHHHHHHGGSGVLPVFEPKGRVLLVDGHHLAYRNFFALKGLTTSLGEPVQGVYGFAKSLLKALKEDGDVVIVVFDAKAPSFRHEAYEAYKAGRAPTPEDFPRQLALMKELVDLLGLERLEVPGFEADDVLATLAKKAEREGYEVQILTADRDLFQLLSPRISVLHPEGHRITPEWLWEKYGLRPEQWVDFRALAGDPSDNIPGVKGIGEKTALKLLKEWGSLENLLKNLDQVKPESVREKILAHLEDLKLSRELSRVRTDLPLEVDFGRRREPDWEGLKAFLERLEFGSLLHEFGLLESPLLAEEAPWPPPEGAFLGYRLSRPEPMWAELLALAASAQGRVYRAEDPHGALRGLFEVRGLLAKDLAVVALREGLDLPPTDDPMLLAYLLDPSNTTPEGVARRYGGEWTEDAAKRALLAERLHENLLGRLQGEARLRWLYEEVEKPLSRVLAHMEATGVKLDVAYLENLSLEVAAHMRRLEEEVFRLAGRSFRLNSRDQLERVLFDELGLPPIGKTEKTGKRSTSAAVLEALREVHPIVDKILQYREMAKLKGTYIDRLPALVHPKTGRLHTRFNQTATATGRLSSSDPNLQNIPVRTPLGQKIRRAFVAEPGWALVALDYRQIELRVLAHLSGDENLIRVFQEGKDIHTQTASWMFGLSAEAIDPLMRRAAKTINFGVLYGMSAFRLSQELGIPYEEAQAFIQKYFQSYPKVKAWIEKTLREGRTRGYVETLFGRRRYVPDLNARVKGKREAAERMAFNMPVQGTAADLMKLAMVRLFPQLREVGARMLLQVHDELLLEAPKERAEEVAALAKEVMEGVWPLAVPLEVEVGIGEDWLAAKG
